United States Patent Application Publication US 2024/0404707 A1 - sequence listing, part 6

SEQ ID NO: 733 - DNA, 32744 bp, Homo sapiens
  source 1..32744: mol_type = other DNA
atctttgatgagggcagagctcacgttgcattgaagacgaaacctcggggaggtcaggcgctgtctttccttccctccctgctcggcggctccaccacagttgcaacctgcagaggcccggagaacacaaccctcccgagaagcccaggtaagaacccccctccccaggtcgtggctctggctcgggatggctgcatacccagaagggacagcagctgggcagtccgagtgggcttgggtaaatacaagtattggtgcacttagggtgcggtattccgtgtgtgcacgtctggtgggggctttataaagtgttttcgaggtgagctgctggggaaaagggaaacgggagccctgcaaatggagcgacggggaggaagagcgagggtacgtaccgaataataacttactcttttgaaacagtagtgggaccccctctttcttccattttgcgatgcagttttcagagatatttaggctgttgagttttcctcccctgtcgttctaaccctattattatgactgttgtcgttagggtgctattatccagggaagaattaagggggagacagggtgtgggtgctggggaggcgaaaggagaaagggggagttcccgccccgggcaagctgagctgctgcagcgacagcagcctccatgccccgcggacttgatttatgccgcctgctccacgtcaactgcaggctggcgggaggcgggcgggtcgtgccgggtgggagggctctgcggagggctggcgcgggtgggctggcttcggggactgcggcggcccgcgctcagcaccctggatagcaacaccgagggctcgcgcgggcgccctcgacctttcagcaccggggacagcggtccggccgcagcgcctcatctgcctgcggcagaaatgcctggccggggctggatgtgccagggctggagaccaaattgtctccctgagaccccggtcttacggagacccttaatagaggagtcatagtagcttaaaagaaaacaagaaagaaataaatcttcctcacagagactcctttgcagacaatttcctgttcccctcctcacctcctgcatagcttcaacaaaatagtctacttgtggaaatcttctgtgttgccctctgacccttattttacgtagaaaataaatacattttttaaaaaatatggatttatcctccagcagggtatcaaggtttttgtttggttttgttttttaacacagagtagatctgtctacagatcttgggtgagcataagtactgtatatatgaagaagccaatgctatctgtttatagggatgatacatctctctctatgtttccatttgataaaaatgtgagattagctgaactaagcagaatcaactttaagaatgaatcactcttccttttccttcttcccccatccttgcaatcaggcatgaatacaagcattcatccacaaaaacacatatctgagaaattttactggtcctgtactgaatagatttaacctctttggccacggtttcagagttactggaagtatttgctatcagcactggttatcgcaggctgatagctttagattttgacaatattaagactggccttcctcaggagaatccaagtgtgtccttcagggtaatgcaggtaaagaaccatggtgttaaactagaacttaactctgacctaaaggtctactgcaatttctcttatggcactgcgggattttgctgaggtggtaataactactttaaccattttctactctgaggcttggagcatctgagagagcaaaagtcatcaggggtatttctctctgtttgatgtagataaaactggcataaaaatgaccagagtcaaaattatgccatttgagtcattagcaaaaaagagtaacagcgtcatatgtaataatctatacaatgcattaaagaaacgctatcatgatccccttaaaagaccccaaatgagaacttggattgtgtttagatagtcatacctcctatcatctgtatgctacagacactaaaattccctgtccatatacagaaggtaatttcattcgctgctatttaattatttcctagtgttttttctttttatagatgaccatgtgtttccatgtatgtatatgttgatctgttattttgcatggatgtaaaattatttgggtggacatttatatatgagtatgtaaacgtataaaagaagtttataactttgcaatctgcagacaaaaataaacaactgtgttttagtagtggaggagagaaaatatgggcaggaatctttaaaaatgctttaacttcatgctgcatgtccagacagctgtctgcgtagttgcgtcaaatgaaaagcctaatgctgccggaattacgtgcttggacattagtaattactgctgggtttgtttgctagtggaagactggggaggagcgggggaagtagaggaccgcagtgaagatggcaaagggcacagagctgagaggaagaagcaatgtgcacaattagaaagctaattttagaatagcttactgagaaatttaaaaaatatatcattgaaccatgaatttaacatttatatcattgacaagcttccagggaaaaaaaatcgagaaatttcccattttaagttagaatttttaaaatccagggcaatgcggtgagaagaggcaggagcagatggacataggatgagccaggagtcattcacacagaccctctgatgcctgtttgttcatcggcatttactgcattaccacctcagtgttcaaattacagaacaatttacaatcctcttaacctcttcatggcaaaatctcccaagaattcacaattttatttttactttgttaaacacgcacaaccacacatgcacaaacacaatgcaaactacccgttaattagcttgtctaaagatattcccaagctctaaatgttaacccttgagtgagggttatcagctgaaagacatgtttctgccagtgacacctagaagctgcgtaagcagtcagccttcagcataacacgtaggttttgacgattagtagaaacgagaaaaataatctgagaaagaggttgagagaggagacatgaaggagaaaaatagaaaatatgctttttagataattcactatgaataaacaatgtttctcacattatgggactgctttacaattctataaaagaaggaaaaatctgtgttttaagcctcagcgctggatactttctgcaatgtcatcccttgtcagcaagtaccaacctgataggaagatactgatcaatcggtattcaccggatacagaaatgaatcccatgggagttataaaatttcatggttttgtcttgacctcaataagtttagcatctagcaatcttaataaaagcaataaacaataagttaataaataaaaccagaattaaatgcaataaaacattagaagacaaattttgaggacatatgtgattaatttccaagtgaatgtaaccaacaataagtaacataaaatcaggagggcgatatcgcagtggactggaacaatctgagagaagaggcaggccttgagatggcttttggaggttgcagagaggtgggagagttctgttaagctgaagtcacaacatatgcagaatatcaagttaggcaagcccactctacagttggcaaaccctgaaaatgcccattgatttgggtggagtgggaagcttggagggaataggctgggatgcagagttggagccttctgtggaaggctttgaatgtcaagctgagaatttggtactttatcctctaaagttgatttctgagcagaagctgatataacaaagtaaccaggtctttttaatatccagaaattactattgacagagtggatttaatttgcattcttccagaagtagaggggagcaaattggtatcataagagatggttaatgaaaaaaaatcagtccttactgaagcatcttttaagactacttttcaggatacatatacctacatagacatataattcctgcttggaagttaattgcaagtttccattttccattattgactaaatgaaattatgcaagttgagcacttgccaggcagactgaaaagaaagtcaagaatctggtgatgagacaccccagaaggtcccagaaggtgcacttgaataataaacatggtgctgaacactctcttgccctctgtgaatattcagcattgtcaagtgcactgacgggaggaatgaaaaaagttgtcatttcttctgagcatgttttgagcagcatgacatataggaccagccccaagtggctaaaaatgggaggaaaaagatggaatggtagaattttgaaaaactggaatgggtagtatatcagatttctttccctgcctattttgctgactcttgctagttaccctcacttcagggctacctcgaggtctggattacacccatttcctttctaaccttgtggttactactctcacagaagagcttcaaaaatccaaatgctgacagaattgctaagccaaaatagtcagtgggttcatgtagaggaagaaatggcaacggtagatacagattttactgccatttcatttctggctataaggtatcaagagactatcctcatctattcttcactaaaacactggcagtagagacaccacaggataacatttttatatccaagctgactacctaggggaaacttagaggtagtgacatttgatgctttaggaggtcaggttggtggttattaaactgagtccaggggctacacaagcatcaagtaaggtgaaggaaggagatatgacatagcactgaggaagtaggacatgatgaggggacaaaaagttaaaaaaaaaagtcttacaagaggaaaaagacttcatagaaatttctagagaaccccagctacactgtgaactcctcagaattgctattattgccttaacaataatacctactctttctacataattttcttcacaagactctcaagcacttcacccaatatgaaagtccaaggaatttctgatttctaaataaatagtgcaacccacagacacatatgttcagatatagtattagatcacatttagtaagacataaattgatttagaatgacagagatacccaaatcagtgattaatcagaatgggcttatggggaagaatgtgacactcattctaaaagtgtttacctatactggctcactgtatcctcctaacaaccttgtggtcagattactattattatttccatttcgcagatgaaataactgatgcacagcaagggtaagtaacttgtcgcagagcagagccaagacttaaatgtaatcagtctgactccagagattaagctatgaagtgtattttatgctacctcttgcatcatccatatttttcatattggccaaataaggcatagagaatgtacatgtctttttttttttttttttttttttttttttttttttgcagtcttttcctcctcacttgggtagcaaggcctgaaggtaaggatgctggtcagagccaggagacccagctctagccctgaaacaactgcttgtaatttcctgtttggaattacacagtctttaaattagtcagtgcaccactgttgaacttggtttctttactggcagaatgatagaagtggactaatgatgtccaatatccctaccattcaaaaatcaatgaaatcagtgctgaaaaccccaggcaatgggtcctggcctagtgaccgatggcctcagctggcatcatcttaataatgcttcagtaactgatctggacccaattggaagattaattacattcatcgcctccctcatcccaatccttattttttcccccctcagaattgcttgccttcatctttctgaagccttctcagagttaagaaatcctgtcttcttcctcaaagccctattctgagtcatcactgctttgggtatctcctgtccttctcaatcagatttgtagctatctagcacatactgtctcctacaacctgcctaaactttgtataaatttctttctagacctcttcttgatcatctcgtgtgtctgacttagcaatgtattagctgcagttccctcactcatcctcttacttcttctgccgcttagcaaagaggaaacagaagcttttatagaatctgtgagctgtaaagtactttaaaagtaacattcctgtgtgacctgaatctcatgatactgatagccagctcaaaaactaatcacattgggaggatgtggggtaaaatgacatcacaggaaagctttaaaaacataggacaaggagagaaggaagctttaaagcctatgaggtcagaggtcagcagttggtggtacaatgttgattaattaaattcatagtcacacatcaaataaattcacatgtcccggaggggaaaaaaaaaaaacacattcgccttgtcacaacctactgcagatttcaatgtctttccaccaaggtaaaacatggtatcacaagaggaaatcctaactgattttcttattgttgactacagaggtcaacctcagcagtgactgacttactggtaagaacaaatctgtatccctaaaaagagatggggggaaatcctatttaaggattagcatttccttctaaatgcttaacaatgattccagagaaattcagtcaaatgatgcctgctcccgaatgatgctgaataacagctgtactgggcttatggcttgctttctttggttgtggaaaaatatatttcatcctcttctttgctgttgttgatatggttcatattactcaaagatgtctaattctcatgtcttaaattgagactgttggcactttctgctgactcattgtgtcttaatcttccaaggtggtccatttttacttaaagaaaaaggttattttcctccaaagtggcaggttctacaaaatgaccatctggtcccagcttccccatcacttcctttattcaaatgacactagtcacagatcttgaacttgagagatgactttccatgcctgtaaccttgaatcagtggtttctgtcctttactgataacagcaagtaaaaaaatgaaagtctcttaggtgcccccctgaggccagagttcagccctacactcctgcctcattcctttttcagagaattttctcagttgagctctgaaaatcctgcaagttggacagagttccctttccatgaagagtctcagaccaagttgttaatctcctttatttatgttcatctttggtacagtttcaaagaataataactggcaaattccaaaacagtgaatttcttaaatttccctgcagttattccgaagttggtctggcagctaggtataggtaaatcacactgtgacttctctatcaataaacagaaaatgcacagaaataaatgccagaaagactgctaggaagaacactggcaaactatttcaatacgcattagccttgttgagtgaattttttattttaatgggaaagtccattcctaatttatgccagagaaattgctgaatgtatctactttttccaattccatgatcactgcccatgtattgcttcatcataaatcagctgctattatggcattcttcattaattaatccattgaacaaatatttattgaacacctgccatgtaccaggaaaacatacactggttcctaaagtcagagctgtaaataaaatcatcatgtttctgccctccatgtgttatgctaggtgtcccctcttgaggtgtcattattttaaaaggcatgtttcaatgggatgccttttagaatctaagacattaattcaatgtagaaaagagctatggctctctaatcaaaatatacaatctattgaaggtttctactgagctgtcagtatctacagagagattgctatatcataaacaaatacatattaagaaccagcctcagccatcaccgaactcagtaaatatctaaggtatgtctttgtgtgaacttgtctctatttacatggcaatcaactaggatgtcactaaaatgtcccttaaatacatgactatattccagtatcccaatctgttgggatctctccctgtagagaccactttctgccgctcatgggaggaaggggtcaagctttaagaaacatggtacctcctgggccagaaatcctattcccaactccaaaactcatggagcaatgcaagaataggttgactaagaaaggatcctttggatgagagtacttcccaatccaatccactttcctcctctgaaaacttcctgtcattaaacaaagttcagtgattcgggatcaagtagaattatgtagtgattctggatcaagtagaattatgtcttaatttcccaaactcctacttctagaaattcacctcttaccaatgagcaatgcccctatctcccttgtaagattgatcacactgctttgtagttacctacttatgtatttctctttcttaatagactttggaagtctttgagagcaagggtaatatcttagctttctttgaatcttcagtacctataacagtgcctgccacacccatgtatgcaggaaataagtgagcgaatggggataccagctacccctttgcagagaaaagaattctaccactgtaagtaatcctgctttttattgatcaaatgttatgatcagaataactcaggaattgttgtgtacccttgcacatagattcatcctaaatattggaataaaattatgtcccaaggaattacttaggtttaccctaactagctgccaaactatggcaaatggtataatattctaatctgttgttttatcacttatgagtcaggagttaaaatgctaacgaaggatcaaaggattctcaataaaggcattgctaaaatcaggtttatattcagagattaaaagccattcactaagagcatttaaagtcaagcagtttagcatatatgaattataagtttaaatgttttactgttcactaggatgaaaaggatatttcatacatccatttgagacatatattacattcaccagtggggtagatttatggctttggccaacttgtgttttcagggtcacatatttgctgctgtgctattagaattggcatggtggacacaagtttttcatgtcaattccgcttccttaaaagtgtccttcagagacaccagtctctgggcttttcctctcaaatagtcagtgtcctcttgcctgggagagaatcataagcctgggcatgatttggtaaataagtcccatttgtccttagaaaaaaaccttcaccagttgagcattgaattttgcatatcttttttccccattccttctcatgaaaacacgggttactctgcatccaactttctccagagaagactgaagatactaccacttaatgaccacaaggaaaaaagtaactaacttcctaaatgtctactgtgtgctgcactgggcacttgatgtatgttgtttcctttattttccatggcagccttaaaagagttcggaacacttgtctctgactgcaaagtccatggttttccccaccaccccataaattatcccatgagttgcacaaaatacattgagatcctctaacagaaagcacactgctgatacatagaacgtgagtcagccaaatctaaaaagctgagtcctccaagctaaatagccaggtgagatatggtggtgtaagtgaccagagaaactatgtgtccaaacaagttcatggagcaatgggtggagagtcagctggctgcatgccagctctgccacttcaattgtataaccctgaacaatttacctaatctgaactgagcctcacttttatttacatctgtaaaaggagagcaattgctgccatgcatatatgtcaagtggttgtcgtgagacctaaaggagctaatgcttgtgaagtagttacctccaccactctgagaaagaggaagggactgttgttatgttcagttacctgctatttgccataccagatttccagggttctttattataggttacatgaaggccatatgcttcttttcctctttattgttgtgtttgcttaaaaacaagtcttggtatcacatattttttagcttgatcagcatgcataataaaatggggaaatatgtcaacagcctttgatttttctatttggggaaagatttttaaatgcctttgattagcatctctgctttgggaatgacctcatgtttctcagggtaatgtttagatacctgaagaggcccagttgttatttaaacactggtcccctcttccttaacatcttgtattttaaagatgcttgaggagttaaaagagatgatatgcaatatgtcctgctattctttagcttttgaaaaagaaattttctgtaagctatttagtgaaccattactgaagctacatctgttggcttcattttatattcagctttgtgttaaggatttttgttgggggcggggataggtttcttattaaatattgtgtgtgcacatgtgtttttgtatgtgcacacaatacacaagcagagagatgcaaacccagactctttcttggagccagccttgaatacaaaattcctacatgcatcatctcattgtcaaaacctttagttttattcataaaccaataaatataaaacctgcacaagcaagttacaagaatagcagaatctgtgctcctaagctgcattcacagaatgatttttctttaaggttggaaaaggcttccaaaacaaccctatataaagcaatgacttcaaattctgctttggggagaaactctacagacaggagagcttgctggggaaagattttgaaagtcacactattttttgagcatctactatgtggtagatattatgttaggctatcgttgcttgttttgtatttattttctacagcaaccttctgagtggcaggttatacttcacacttgactaagagacaatactgtttaatcaaggtcttgcaatggattctaaggtactgatcacaactcttcccccgacaaacaagttcatacataaacaggggttagtaattaaaatactaggcattttgttaagcagaatttgggggaaaaaagaagaagaaaagaaaagattacaaccagcaaccagagtcagattatcagatttccttactcctttctagttctactccaagattagacattgggacctaccaaaggagaaagggctgcagaaatgtgtgtagtcagacaggatagctagagaaccaaaggcccttctctccttttcccacccatacccccaagtgacagaacctgcttccagaaacttgcaatctgggggagcagaaaatgcaagcttgctataggcaggcagatcccagagaaaaagccaaggaggagaactgagttatacttgctcactgcttatttcccatctcacagaatactttagttgggggtgggagggacaagtaaaggaaggggtggagggaatatcatcccaacactcatcttcccaaagaacggagagtcccattttgtgggacaaagtaggaattgatgagtctttgagagggggaaaatggttccttcttctacacagttaataagagagagaacttgagtttgaatttaagatctcaagtgcaatgaccttctacaatcaatgattcattactctaggacacttgttctcaaactatggtgtttagcagcatcagcatcacccaggattttgtttgaaatgcaattcccaggccccacacagacctactgaatctgaaactctagggcgagacccagtaacctctgttttaatcatctccaggtgattctgatgcatgctcaagtttgagaaccactgccctagagatctttgttgttccttcaaaccttcacatctgtctcaaactgagcctgttgaggatgaggtgttttcactgttctcaacctttcaaaagttgtgactgggtacttagcaagagaagagctgtcctggaccattggatagaaatctccatttaccctctgatttagtaatgaagatgctatttttcttccaagtgagtttgaaggatgaggaaggtgagcattcacagagtgaggacaagtgtgtgggatgggggccaactggctcctttattgtgctttgttttcttcaacagtggcccaatcccagcccccagaatcttgtctccaaagcttaaaatctcatcaaataataggacatctcctttcctctttctgcagtcccagcccatagcctctgaaggataccaaataggaaaaagtgtccccagtgcaaaggataaaggagtttctatcactcctcctctgtgtcaccccccacacttcctgcccccatccctcagcaatgagctaccacagaggcagagagtcatcctggccttttctactcatcccctgcaatgtcttgtttctgccctggattaaaataccaattgcccttgggaaaaggatcctgatgtcttacattgccctttttttcctgtcctcctcttgcttagaatcatgggttcagagcacttgctgagatttttaaattgtattttcaaaaacattgcagatgaccaggcccagagataaatttcacaccaaggtcacagggtgagcactgcagccaaggctcctgactcaagcttcagctcttcttccactgccctttactgccttaccacatctgcctccatctcttccaaattttctctctggtgcaggtccaatctcctggagtttccagatccccaatcaggaattctctcagtctgttgttacactcagaggtcttggcctcaagtggtgtcccaaactctacaaaacagggtaggaacattctcataaccctgagctatcaggcagagcttcctccaaaatttggatgtacagattgtacccaaacccaaaatgtttcacaatctgaaactttttgagcaccaatatgaccctcaaaggaaatgcctattagagcatttcagatttcagattttcagatttgggatgctcaactggtaaacataatgcaaatattacaaaatctaaaaatatctgaaatggaaaacacctctggtctcaagtattttggataagggatactcaacctatactgcttacatctctttggatttttcatattatagaaacccagctataagtggttttggcaacaattgagatttattggcttaaacaatctaagcaaatgttgagcagtcaagccataggaaaagcagagacgtagctggaattcaggaacaactcaatcccagtgtgcaaacattaccaaagctctctctttctcagcctcctgtccctgattctttctgtacattgattccactttctcttgttgaaaaacacttcctccctccccataccagaaacatacacatgcgatttgtactctctggacttccactatggaaaaggaactgacaattgttgtctgtatcctcgattcaaaaataccaaggaagatctctgattggcatagcttgggccaagtgctcaatcaattgtgggtgtggagtggcatggaggaatgtgatttccatgctggaaccacacagttcagttgggaagaaccagttgcaaagcagacacagtaagccatctttccttattttctccaaaaggttgggctgaatagcaaaccacaggtaaaatctctgctgctttggaagaataaactactcacctctgagaacattaaggagacttcacagaagtgaggaaggatgtttctttcacctttctgtgctcacactagcctggttctgcaggatattccctccacgttacaattcattcgccaaatatagattgtgcctccaccatagactaggcacagttctaagcaatggtaataagcagagaacaaagtagatgaagtcctgttctcatagagcttaccttctagtagagaaagacaatgctatgagttaaagaatgcaggatagagacatagagtgatataccccaaggaggtaaaatgatgatttagaaagagctatgagagaatgcatctctgagaggcagcatttaagcagagaccaaatcatctgtgggctcaatgatttttatgcccctttcccgcaataacatcagcagaactccagcacttgatccctttatttttcaacaataaaaataaacttaaccttgatctgaatcatatagatctgctttcccatcattttctcatttgtctccccaatttcatgaccaggcacacttacagctcaaggatacagtgagagaaaagaacttcataaaatccaaacagtccacagtggctgaaaataagggataactggtcctctggttcacgtctttcctcctctggctcattttgcctcctatcatgaccatattatgtgcacagatatatggatgagctggggcacctatggcctgtgtgggctaaagggctcaaagattagagccaaaccaaagattctgtcacaggatattaaactgggtggtgaattcccattaagcctaagattccttccagacctgcttaggccacatcccatgtaagctttatgaaaatatatgcaacccagagggaaaagatatgaatgtgattccttgacccagccaaccgtaacatttatccttgtcacaaattttcttggacacagtgaaggaagggaaagggagaatctccttcctctgcatttactaaccaaaacccatcgttccatcaatcacaaaaaaggcccagtgtaaagctgagttgtctctggtccattgagaaggtaagcattaagggatggcatctaattggataatgggatgcaggaaggcatacagacccgagaactagaccctcttctgcttctctctcaaggtggaagaactgggccaaatatgctgttaggctgcaagattgtgcctctggaccagcaaatttagtttcaagatcacgttctccctcgacttgttctattcccttcttgtcctagtatctcaggcgtctggttttccttcctttttatttctttaagcttgttttcaactttgtttgcctgcgtgtagctttttgtgtattattgaattggaaattagtcctccaccttagggcttgagactcatatgggtggctcttttatgtgctttttcctcccaactctattaacaattttggcccaatggatcacagttggcttctcagtgaagcaggcgaagttcccttaatcatttctgaagttctccttttggatatgacaggctggtaacttaaaagaaccatgtcctacatagatagacttaagttttttcaggtcacttaccaagcaattgcgttgatttattctgcgtctgtttaatgatccttgtttcttttttctcaaattgtttccccactattatttaatttttttttttgaacttcatcacagttctggaaaggaagatgatacagaaaccacagccattttgcagatatgaaaactgggacatagaaatttgactgccctggaaaagatcacctacttatttgatgacagagccagttcagggatgaaggttagccagatgtccagttccccaatcttgttcttaatccataaatggaacactagtgctctataggcttaatactacccacaaatttattttatttggctagtactggatttacaaaatcgttaatctgaaatgccttaaggcagggtacttcctctccaatttgccgcaaagcctaccattacttatgcccaaggcataattttcattattctcccagccctataggcatttgagattgcttccattgcttacaaaagttgtgcaatttgtcatggttttatgatctgccagaatcagaaatggctagaagtttcttgggttattttaccacaactctttcctatgaatgtcttcttgagttatgtcagtatttggggaaacacgattagacatataaattgcactaaatagactatggcttttgatctgagttgaattcaagcagtctcagatttttgttcttcccatggatcccactggcagtatggtgaagatatactgaagccactttcagagtgatactttttaatgtgtaaaataaaataacataaaataaaataaaataaatagggattagctgggcatggtgatgtgcacctgtatcccagctatttgagaggccaaggcagaaggatcacttgagcccaagaattcaagggttcagcggccttgaactggaccatgccactgcattccagcctgggcaacatagtgagaccctgtctctgcagaaataaagtaaattagttgggcatggtggcatgcaccagcagtcccagccactcaggggactaatgtaggagaattgcttgagcccacgagtttgaggttgcggtgagctacgatcatgtcactgcactccagcctgggcaacagagcaagacctcatctctaaaacataaaaattaaaaaataaaaataaatacatggggactatataggaaaccaattttattgaagtacaactattaaaatatttttagaaaaaccacatttgtggtataatatgtgttttttaattaaagcattaaataacaatatttagtggtaagtctaatagctaccataatttcaaagtggtaatgagaatatctgctattttgagatatctgcaacaactgtaaaatgatatgaagacgtcagtgtcgagctctcctgaatccctgtgggtggtgggatggaagaaaactagtcaagtagagggaggagtggatccacatgtcatccaggtccagtgaaactggctggccctgaagcagttatttttcttgtataacaaaccaccccaaaactcagtggtttaaaacagcaaccatttcttattgtgtatgtgtctatgggctaatgagttagttcttcagtcaattggtagattggctggagcctgcttggtgtgttcactcccatgtctagtggttattgctggctcttggctagggcatcaggggctggaccacatgtctctcatccaacaggctagccctagtgttggcatacagacatggtgggagttacagagtttctcaaaacagcaagagagaacaagccccaatgtgcaagtaccttccaagtctttgttgaggctacatttgctattatctcattaaccaaagtaagtcacatggccaagcacagagtcagtgtggaagggggattatggattttgggaggggaattatgccaactatatttacaaaaaatcaaccatagttcccaccaatcttgggagcataggtcagagagagccccacctctgccatagatagatggcctctgcccatccatcctgtggctacacatcttccactaagttccacaaaccaggaaacttagacctggcttattagtaccctgtccccatagaccttggagccctcaagtttaactttggatatccttggttcaagagggcacctgaatatctagttgcatctctccaaggtaactaaggaatcatagacccaggtatctgatcaattcagcagggaagtcaaaggggaaattttctcctttgaacattgaggataagtaaacttttctggattcaaactggcagggtggagcaggaggggatcagcatcttattgttttatggtaatgttgctttatctgtaatttcacttgagcctgtcttggtaaagacgattgcattttaagttttttccctgtctctccagaagtgccctctgtttaagcaaattctaccttctcatctaattacaagagctacccataatgttaaaaacaattctctgccagtcctctgcccaatgagcactttggtaatgggaacacaagggaggaggcaatggaaaaaaactctgaaggcctttcagctgtgttgccgcgtcatggaaaacaagccaagcaactgcgtggaagcctcgcagcaggtcccaccagagccttcttagcgattccagggattagcagggcacggctgactcacccagctgcctagccaggcacttccatagggcattctgatacctggctgtacatttgctcgactcacttcagatatcaaatagaagacccctaaagatgaggccctgggcagaactgtctgtgtcagttcctgcaccagcttcagtttactgagcctccaaaggaaaatacataaataaataaataaataaataaataaataaataaaggcttctaaattctttggttggaatgctgtcctaggttgagccctcccaaaagcagatccttagtgaaggacgagggtgcacatattttatttgggtggtgatcctaggaagcgctgatgggggagtggagaatctagacagggattcaaagaaagtcagtacagggggcactcatgagcagtttgccagctgctggggctcagcccagccagggacctctctcagagagagtgtacaacatgcctggattgcctaacctgaaaggcaaggaagctggagtattatgcaccaactcccatccttcagtggctaagggctgttcccagagtgtaaacttgcacccagccctgcaggagacaaattctacacctcagattggagaaaatcctaaggcaatgagtcttgcctcactcacagtagaggcactagcagaagaggccttcagaatacacagaaaaggcgagtgccaagggtatatggtgggcaccaactggctgctagaattttgccaactgttatcaccagacaccccaagtatcacaatggctgtctccagctttggcacattgatagctcggaccttcatttattcactgggtccctagtgggtaccattcattcaatatctgtgtgccaggtactgagataaagttttttcatacatcatcacatccagttctcaggacaacatgcagggtattattagcttcattttatagctgagaaaaccgaggtacaatgaggttaagtaaattatcttaagtccctcagcttaaaaataacaaagctgagattcccatccagagccactttaaagcccaagctctatccacagcaagcttcaccccaattaggtgaggagtattttctcctgctgagaaaaggcccagccatgtccagcccccataccaccatttctcctgaatccttctcttcctttctggtctttcctgttcctttatctcttgttttcaggttggctccatggaattaactgatgtcccttcagtgttctagatcctttcttgggtaagtgggctatccctcttatcctccagacctccttaccctaggggctgggatcactgtctgcatactcaagacatctttgaatctccaagtccttaaacactctccaactcatacccacccacccatgatctggtctcgttccacccacacatggcaggtgctttggtggattctactgattctggcattctagtggggaaggaatcatggaaccatttctttgtagcatcttgcaggtttaggactgatcttactggtgggtcccaagcaaattgaactgcttgatttgtacataagcatcaggccacagtgtaagccctgatttactgtggttaatattttaaaactaagatagcatgcagcaaggactaagagagggaataattaattctagcctggcagcgagggagtgggagggaggtggcagctcctgcagtctcaggggggctccacagtaataaacaaaactgtagcttccaggtggcaaaaaatataaggggaatggatgggtgcagaaggatgctgtgcaactctattttagagtcaacatatccaacttcatgaggatcatactattatttcaaaaagaatatcaataggttgggcgtggtggctcatgcctgtaatcccagcactttgagaggccgaggcaggtggatcacatgaggtcaggagttcaagaccagcctggccagcatagtgaaactccgtctctactaaaaataaaaaattaggcatggtggcaggcatctgtaatctcagctactcaggaggctgaggcaggagaatcacttgaacctgggaggcagaggttgcggtgagccgagatcatagcactgcactccagcctgggcgacagagcaagactccgtttcaaataataataataataataataatatcaataaagcatcaatgctggcaccatctctggtggggactcagaagccactatcagtgagtagcagattctctccatccaacacaggccaaaaacaaaaaataaagttagaccacaacataatgtgacagaggttgttgatggaaaatgccctggtatagattagggagcattaattttatacactggttccaaatggagcatttaaatgacaaaatctaaagtgttttatagagaaggaagagtagggggcctcgagtcattcaaacctcattttaaatcccatcttagattccaactccaggttcttttgaaccactgagtgtgccgtgccacctctgtggctgtagacaatagtcgaatttcatgcacacatatatgaaattcacataggtgatatttcaggtaatgtaagtgctctgaagacaaataaagtaggaggaacagagagaacgaaggagatactatatttggacagagtgggcattcatctaagaattttggctttggaacacaattgaattctttcttggcccaagcctgtagatctttttaaactacaaagtagacttcatttggtggctgcaggcaggtgtacaagcaggggagaattatttcaaaaagtcattacaaatttcacatgctcccatgcactaactgagcgctctatgcatatgaagtcatttgctattcactctgccaaatgcagtaggtaatctcaacatttccacttacaaatggggaaactgaggttctaagaagttacaaggaatatgcccagaatatggaatatgaccatgctagtcagtggggtggccatccctggaacctgcatgaccttggggcaacgcttctgtgctactccacaatgtcccatgagccctccctaagtagaggagcagaggaggacaagacagggtagaagccccctgactttggggaggcagcagcaagaacctacaggggcctttctggaacccgggtgtattcattagctattgctctgtaacaatattactgcaaccccagtgacttaaagcaacacacatttcttatctcgcagtttttgggaatcacgagtctgggcccagcatggcagggctctctccttagggtctcccaaggctgctgtgcaggggtcagctagggcacattttcatctgcagctttctccacttccaagctcattcaggttgtttgtagagttcacttccttgcatcaccctgagggccctgtttcctggctggctgtcatccaggaatcatgctcagtcccttaccacgtgaccctcttggggcaactcacaacatgacagctgacttcaagcccagcagaagaatctctctcttcaggaagggccggtccttcttttaagggccttcatctgattaaatcaggcccaacccaggcaatctccttttttacttatctcaaaatcaagtgattgggagccttaattatacacgcaggatccatttacgtttccctaatatcatagctaatcacagaatggcatcctgtcatgctcacaggtgccccccatgctcaagagaaggagatgataaagaacttgggcaccagggcacagaaatgctgggggtcatctcagcatggcaccctgcatgccaggaaagcgtgatcctgcttccttctgccattctccatgcctccctccaaggctgcaagtgttcctgccctacagagagccttggtccacatcacacagccagaggccttccaaacgaacatttcttagccgccaggcctcgttctgaactgggtaattgtgatgtttgcagacccatccacctgcctgagttggggcctacatgcattgttctgatcatgattgcctcaatctacaatcatccctccagaggaggctaggctcgcagagccctggaagagcaggcagggggctctggagcattcagtctttcagtgtttgccattagcgacctggggagtgatgcgaatggcttcaattgctccgtggagccagcaatcacagcaggctttgggggtccctgacatgagctggagaaaagcctctgtgaagcagctgccagggtaatggaaatgccctgctgccttgctgcgcttccatggagctgggcaagagtctagggctgcgtgccctgctcaagagaggcccagtgtgaactgcagggccgacatgggctttcctgatgaagctgttcttgcgccgaagagaactgcagaggccttggctgggaaggcaggaatcagtatgggagggcagggtgggtgcagtgggggaagtgagggcagcatctgtgttctgtgattcacaggcaacctagcagtgtctcctgagcctcagagtgcatggggtggctccgtaccccagctgctcatcaccctcatcatcttcatcatgcacagttgcagcccccgggtccatcaatatcccctcctccctctttctgccactccccatgtatttactgagcatctattacatgcctagtgctgctctgggcactgagtaaacaggggtgaacatgccaggcaatatttcctctcggggtgattaaattttaatgggaaggggcagacatcagtcagacagatggacaagaaaaatatcagatggggatggtggctaagtaagagattgaaatagggtgaggtggtcgagagagacgggtcagggaaggtctctccaaggaggagatgtttatgctgaggcctgatgacaagaacggccaatcatgagatggtgtgatcaggtgttgcagacagttcatgccaagcctgaggcaggggcaaggtgggtgctttcaagacacagcaataggctgatgctgttggagagaagcgcagaggaaagtgaagtgttaggagggagccaggttagccagggcctgccagcctgcagaggagactggcttttgttcaaagagccctggggagcccttggaattgtaacacggagattgataccatctgatttatctttctacaagatactctggattggagtgtagcaaggaggtggctgcagctccagagtatgactatgggtgaagcaacctaacccagggaggcagcattccttactaggggatccctactggacagtaatggccagcgggtgcgcaccatgggagctgctggagaaccctaactgctgtctccacagtctccgcctggagcagaagagaagctgattctaagtctgttcctaaatgcagcagaatgtatacgcaagtgaggaaggattctcaagtgaaacctatgtaagaaagtgagggggaaagaatggggcgggagaaagaagcaagcaaggatgtggttgcagctggagactagcatcagctgatcccagaggagccctggagtgtggattgcatcacagttactgctgccttgacactcggagtgccaggctttggtagccctgaactggtcagtcattccagcacagagtggaggtgttagaaactcccagtaggggagggggttcctgtgtctcaagggcaaggctcaggagaagtcacagttataaactctaagccatgtgaagcctggcatctggggaacaggtgcacttgctagtggaaagtaacaggaatctgggcagagcacctccagcatctgttatagtggccacgactttactgagagaggagagggaggatgcctagactaagaaagtgtcctgctgcaagaaagcacaggacccacatttctaaaagcaaatgagctaacaggaggcctgttacaggaggaacctctcattgcctacagatgctctccaaatagtcagctcccagtatgcacttaaaatagggatcaatttatgggcattccattcatccagcttcccaggaataagttcattgcattctggaaggttatatctaaatatccatttagccagcataaaaggagattaggattaggtgcacttaatcagtacattagaatcttctaccaaaggtatctgatcctgtttctgagaataaatgcagaataaacatggcctattagcaaggagtggctcttcctgtcccctgctctgtgattgcagagaagaaaccagtagctaagaagtagggccgcctaacagctgcttctgtgatggccacagctttgcttaggggcactggctttaccgttcagctgtgtagctctttagaatgtagatcagtggtttccagaccttgcctgcacatcagaatgccctgggatcttctaaaaatccagaagcccaggtcgtatcctgaaccaactgaattacaatctctgggaatactttttaaataaactttttattttgaaatatttttagagttacagaaaagttgcaagggtggtatacctctcacccaatttcccccattgttgaaacctaacattatcatgatacatcaattacaaccaagaaaccaacatgagtacattactattaatcgacctccagacttcacttggattccatcagcttttcaattagtgtttcttttttgttccaggaccaatctggggcaccacattgcatttaattgtcatgtctcccctgttttctttagtttgtgacagttcctcagtctttctttgttgttcatggccttgagagtcttcaggagcattgacagggatcctgtggaatgtcatccaatctgggtttgtctattgttcttgtaatggaacaagactagggttgttagactcgggttatgggtttttggaaagagtgaagctaaggtaaagtggcctactcatcatttcatgtcaggggatacagtagatccatatgacattactggtaatattacgctccgttatttggtgaaggtcatatttgccaggtctctccaatgtaaagttagtatttttccctttccctattctaatctttgactgagtctagctcactgtcaaagtatggcgtgtgtagaggtgggtggaaatcagtcagaaatctatgagacacatttttatggccaccaaactatcttcatctctttgccttagttcccaatcactgtttgcaaactttctcaaatgatctaggactttgcagacccctcagttccctgggattgagacagcacttcctgactgttaccttgggtaagttatttagttttgtctcagcctcaatttcctcctctgagaaatgggtattggtcaaatatctgtttctaggagttattgccatgactaagttagataatgcctataaggttttgactatggtgcaaacattcaacaaatgttcactatcaatcatgttaatagtcgtggtaataattgccttcattactctgaccttgtgtatctgatctctagggccacaataatgcacctcagtgacataaaccagtaagttagaacttacatttgggaaagagagacatattataaaactaaatccaccaggtttatttattataaagaaacacttagcacttactatatgcccagcactgttcaaatcatttttataaatattaacccattccatcttcataaaaagaattcaaggtaggaactattatcactgttttacccattaggaaactgaggcacagtgaggtgaggcagcttacctaaaggcacacagccagtgagtggcagagccaagatttgaatgtaggcagttcgacttcagagtctacacttgtaaccactacatgatgctatgtgggataaacaagaagtataaactgtgtgagactgtgtgaaaggtgactgggtctcatcaggagcaggaacccagtgagacataacatctgctaaatcttttttgtttctttctttctttctctctttttttttttttttgagatggagtcttgctctgtcacccaggctggagtacaatggcatggtcttggttccctgcaacctccacctcccaggttcaagcgattctcctgcctcagcctcatgagtagctgggattacaggcacgcgccaccaagcccaggtaatttttgtatttttagtagagacggggtttcaccgtcttggtcaggcttgtctcgaactcctgacctcaggtgatccacccacctcggcctcccaaagtgctgagattacaggcatgagccactgtggctggccatcatctattaaatcttaagcaagcatatgccagacaggagagaggggccagggttaggaaaagagagctgaggtgtttggaaagattgctaaggaacctcccagtctagtgtggcatcctctacaaaagccagctggtattaagcattctcccccaaagccaactaatattaaattttctttcagagaaatatctcattctctctctcactgtctatatcctgctctctcaatttctgaatgtgcccttgggaattcagacggtctttggttttagggaggttggagctggcagggtgtctctttcaataactggaactgatcgccggtataaaagaacctggaccactcaaagcacatcctcatgctgtgtcttccacagtcaacatcaatccaccctccttcgcttttaggtcaggagtttcgtaaggcaaaggaagtttctgattgggagaacttagattagccatcaaattatatttggggtaagtgaatgttcatttcaaactggggggtctaaaaaaagttttgtttctggggcagtgtgggtttcaaagtatcgcatttacagtttcaccccgggcgtgtgcccagatccaaagtcttgcatcagaattcaactacaaacttctgggcgacagaaatgctatcttcatcttatacacacacacacacacacatactgacaattcccacacaataagtgctcaacatgtgtcttaaatgaatctacaattagacttatgataaggtgccataacttgcttatttgtcactgcatctgtatttgaaatcccaagaacacatgtaaatcataagctttgtcctttcctttgtcccatcttgtcaccatataaaattatctttctacctccaaaattggcagggaggaaaagcatcttaattcacttcatgactgaaattttaaacatacctttaccgaagtctgagacttcaaagctgtgtgcccttcagcccaggtaactagtgagtgtcctcaagcattgacattatttaatggaattcattttatgcctgaatatgttgactccacttctgtctaaagtctgctgggaaaacttggaattccagtggcttcacggagagcatattgattctaagctgagtctgagctatttctgagccattatgtttcaaagacagggtctcacactgaattttcctggtttagagtaaaagagaagatggtgtgggtgtatgcgtgtgtgtgtgcacgtgcgtgcattcgtgtgcgagcgcatcctgcacacatctgtgcatgtatgtgaggtgaggggagaaggtggagagagagataaaagggggttggcctatttattgagagggaggggaattgcacttacaaggttctccttatcaatgaagacagaatgattggccgagcccaggaaattttgacgtttatctaaaacgtcttatggagaagaaagaaaagaggcaaaccaccctgacagtggcaggggaatgagtcctatggctacccaccatccccaggggctcatcagtaccccagccctcagccacaatgcacacacagcctcagtgaaaactacatgcttgctaaaaaactcactttgcagacaagtctcctaaacttcccaccaaattgccaccttttaatttcacagcccccttgaaatccagaaagaatagatgtgcccttcaagtggagagagaaggacagaagaggagaataaatatcactaatattcattctaaagatgtgttcaccagccgctgggtacaatattcctgttagggctcacatcgttgggcacaatatttgttgagcatttattgtgtccaggcactgtcctgcatgtagttgcaatttagcataaaggttaacagcctgagacctaggggaaagttatttaactttcctgtttctccattcttcatgtgtagaaaaggggtgatgatcataacattgttatgagcactgacacacataaagaagttagacactgcttgacatgatgtgagtgattcacagatgtcaactatggtgtttctaagcatgaagatggcctcatgcgtccagttaagatccatgtgacccaaaagttagaaaagaactggcaatttctcgatggcaaatgcaaacatcttttttacttcttaaaggatttgggaagctgcagagagcaccctagttcttcccagaaggctgcccctgagctcttatactgatgaccaacaacagagtggtcaagtggtgccaccaacaaccacttgttctgatcagtgatgacatttagggccggccctgtagcaaacttttttctggctcctgaaatgaaatgagatgacgagattttatttcaccagtgacattcttcctgtcctagcccacaacttcagtattcccttttagaccaacacaggcattaaactggaaatacatttcagctttgatagaggaaaaggctaagaatagaatcattggttgttcctgagatgccatgtgaaaaatttagattaagtcaggcttccttttttcctcttggcctattttcttttggtaaaggatgtgaagagagcaccttccatgactgatgcgccttccaagcatgctgcatttctgctctacttgctgcctgctgcttactcatcctgatagtccaactgtctctaaaactcctaacatgaaagaagagaaaagaaatttgactgcagggtatggagggcagagctcggagagaggatgatggcacgaaagcaaacttttgagacatactcagtaggtcagttagcttttgctttgtaacaaatgaccctcaacttaaaacttagaggcttcaaacaacattcatttatttagctcatgattccataagtcagcagtttgggctgagttcagctggactccctttgtagtctgttgctggatcagctggagggctcgttggtttagagtgccttagctaagatgatttctctctgttccacagggtgtatctcatgatccattagactagcctgggtttgttcacctaatggttgcatggatacaaagacggatggagaacactccaatctaatcatgttgagcccatgcttatgagataatgaaacctaaaaagttgttctccccagctgaattgcatgggaattatcaaacacacatgtgtgcacagaagccaacaaaaagtatacttggctttaaggataagggtacagggtgcagggagacccgggagacccataaaatagtttatagccaaccccaacacctcatgtaattttgctgttaacattttccctccttcaatgcaaattattttatagtgtttttttctgattataaaagtaattcgtgttaattgcagaaaaataggccaagaggaatataacaaggaaaatataattaaccataatctcatgtgcagaggcaataattatgaataattattttattatacatacggcataacatgaccttgtttctatctatatttaaatatccagtaataccatttgttatgtgctatatgtcagaatgtctgctaactgctttatatgtattaattcatttaatccccacaacaacgatcatttttgagatgaggaaaatggggcacagagaggctagacatcttgcctgggatcacacagcaagtaagtagtagagccagcattcaaagtagtgcagccccactcctcagagcatttttgacccttaaaatctgtactattgatccacatccaatgttactcaaacattagtgtgcactagaatcccctgaaaggcttgttaaagcaatttgctgagcatcatttccagatattatgattcatttggtctggggcctaagaatttgcatttctaacagactcccaggtgaggctgatattacaggttcatcaaccactctgcgaataactctggtcacagcagtgtcaaggtatgtactgttaattccgcttcacagatgaaaaaacagaagttcagaaagattcgataaataggccatggacacacagcttgtcaagtctatgttatatccattttccagtttactctcatggaaaacaataacagccaacgtttacttcatttgatagctcgtgcctttcttctggtgaggctatagtgctaaggagatagttcagaagttagatgcagcctctctgagagccaggttttactgggaggtatgtggattgcagccacgcatttgtttgctcattcattcaatcccttggcaaggagccctagctgggaagccccatcggtgatggttggtggtaggattcctgcccccagcagcttccacatgctgatactgaagtgactgtttctgactgaaggaatgacaatctcatcaagtgaagtatgaacagaaaaaaaaaatggcacaaagatgttaccttttgaagctattgacgggaacctgttccaaagacctctgtgctattttctaacagcaaagagactggtattattttggcgggttccttacaagaaaaaaaataaccctcctgtgatggcagagcctctgtgatgtctgcctagatggagtgtagcttttgcagccatgtaggaccagcttggagctctctgggtgtccatccttcctgctcagtgtgggccacagacaatagcatcactgtgcaacttgatagaaatgctgattctaaaccccaccacaggctgactggactagaatctctagatttggagcccaggaatctgtgttttaataagttctccaggtgatttttagaagccctagtctaacaagaaccctgcaaagctaattattttgcttcccaaggagaacagctaaccctctggaaagttaaaaccctttaggtctagtgttagacctaaaggtctactcttctcaaactttagtgaccatcaggatcacctggagagcttattaaaacataaattcctgggccacaccctcagagattccaattcagcggatctagggtggagctcatgaatatgcatttctagtaagttcctgcatatgctgctgctgcctgtcctggaccacattcctagactcctttagcaacatccttcttaaagaaaaaaaactgattgcaactgtcagaccttttcaagatctctgtttccgtcattccctttcaaaattatattttcttatttagggaactcagtttcttcagaaaactacttactttttaaacttatttttcaatcaaagtccacaaactatgttaaaatagaactggttctggtcgtccagggcatttctgaaagagcttgttgagtgtaagtaaatggaagaggtatggtatggcttcatgatttcctgttcaggagactttaatcaccttccatctgcttagaaccagagctctcatgatacacattgtgggggactaaattttctgagcacattagtcaagccctgcaaaaatgacacccaaatgatcacaagtggtctccaagtcccctgaggaagaaaccttaaagtatttatctctagtctcaaaaaccctcagtatcttaacccacagtctctaggatgctaacgcttaatgggcaaagtatgtaaagaattttttaaattactcattggactctcctgtaagtattaacatgctcaaattaatttgatatatattgccttaaatagtccaaggaagattggtgccaaaaagcttcatgaaacaattaaaaaacacacacagtcatgtgctatgcattttgatcaatgatggatagatgggtggtcccataagataagaataccagattattactgtaccttttccaagttgagatatctttagatacgcaaatacttactattgtgttatagttacccatagtattcagtacagtaacatgctaaacagatttgtagcctgggagcaataggctataccatatagcctaggtgtatagtaggctatcccatctaggtttgcctaagtacacactatgatgtttacacaacgatgaaatcacctaatgacgcatttcctagaaggtatccccatcgttaagtgacgcatgactgtatactccaatttaagatcccagcaccatgtcaaacaaaaaatgttataaagatgtgtgagacatgatccttgccctcacaattatttacttgctgctttctgcatggtaggcactcagactaaaaggatgctggtggagtgacctgtcaaacacgaatgtacacagtatttttgtctccaggagaatttgtgcttcaaggagaatttgaggacctatcacagtttcctgggggatagagatgacatagaggccaaagtagcatgaagcaagaaatactgggaaggatacctgagaaccacacaggagtccaaaggcagccttggtccaagctgccagcctactccaggagatgccatttgttcagaattttgaaggctggatggaaggctggaaaagggttgagggatgatattatggcaaaagaaatagcagacattggaaggattacagtaaaagtaagtagggaagcattttcatcaggcatgctcctgaaggagcaatgattaataagc

SEQ ID NO: 734 - DNA, 23245 bp, Homo sapiens
  source 1..23245: mol_type = other DNA
agcttacggccgacaaaccactcttctctatcagtatgcccttgaatagatgaggttgtgcaaagtcctttgctcttaaatgtattgctgtcattgagaatatttggaggttttctcttgggtttgtttggattttttttttcagcttttgtctgaattttggttttatttttctggggcagagaaaatggctttccttatgaaaagtatgataagtaaccaggtaaagaatttaggatttggtggtgggtctgaagaaaataaagaagaaggaggtgcatctgatcctgcagcagctcaagggatgactagagaggagtatgaggagtatcaaaagcaaatgattgaggagaagtgagtacatgctatttcatttcccttaaaaagcaaaggaaattcattctggccataccttcttcagttctccagtttatttctctttgctttttaagatgcctttccttttgccgtttacctctaacccaaggaaaggttgttcttctaaagtaaacggttccctaacatcagcagctactatgttctatgttctacatgtatgaatggaaatgaacaataataaatgaatctatatgttgttcttaaagcagcttaacactttctggtctaggcatgttttgattgacctcaatttaattatttagatgaaaagtggtaggtttaactatctttacattctttctaaacttcaccctcttagcacgtagaaagtcttcaaattgtaagaattcagaccttatacctagaaaagggcctaaaataacatagagggcagcttctttgatcttgcatgtgagaaaaaaaaaaaaaacccaggaagcataacatgacaattatgtcataagacttggcttatcaaagactatgaatggatttgtggactgtttaatatggaaattctaaacatacagaaaagtagaatagtaggacaaatacccacatatacctatgacataaaatcaacagcttacagtttgctacatttgcttaaagattaaaaagatagatggtagataatagcttttaaagtaaattacagatgtcatgtacttcacccccaaatacttcagccaccttcctccaaaaaataaaggcattttcttggctatataaaatataacaaaaataaaatataaaatataagcaacatttaattgggtattatagaatgtgaatatcaccaacaacttttcaccacttgaagactgattctgaaataaatgtaatctctgtgtaatttttaaatgtttaaggtagaattaagattcttttaataatcagttaagaaatgaaacatcaatctagaggttaaatgtttatcatatgtttcaaaagaaaagtatttcttttttgccaccaggactcttttgctaatgatcaattacataatagttgcctaaatcctatcgctaagatgattataggtgaaaaggttaatgacctggaggaaacaaagaaagtacaaagactacgtttagtggaaaccttgtctattgtatttttctgaaagaaatcatggcttatagactacctagaatacattatgcttggttctgcagtaacttaaagttggtttttaaaaaacagtcaatgcaactagcaaaaatgatggtgctaagacttgggcaaaagaagcagcattccttgaatattggctgattttacctatggcatgcaaaagaacaaaaagcttaaaagcaaaataagtactgtgtaatgaaggatagaagacaaaaatcagcatcaaacattctcagatcaagtaggctaatgaaaacagaaatgtagactacagttgtgagcatgcaaaatatcacctaatatgttcaagcagcagatccgattgcagataaggcatctatttgattaactaatgtcctagttttccttaattttatatctggacagatcaaagctcaaaatggccaaatcatacagtcaatcagcagactgagttgtcagctactcagctttttgcatatgtgtgtgagaatattatatatttatgtagtcactcaatgtaagaaatagtgtcaggacaatggagcatttggcttccctatgataaagagggatgactttcagtccattgtttgagttttcaagaatttcaccacctagaatgcaatatgtagtaggcattaaaaataattcatcacaagataaacgcagagagagctacaaacagtttagtatatataataattaaaatcaatgttagcaaatgaaagcctcctaaacccatcctcatcattgtaggaagtggggagactatatgaattataaataaaaaactatttagcaatgcactctatttaataatgcacattcatttttattttctttctgtgttcaatgtgtgtgtgtgtgtgtgcgcacgcaccactggtaacattagtactgaaagaggtctaaacataaatagactatctggaaaggaaataaaacaatagtctgtttctcccgccattttctcaattatattaaaatgcttctttgccatagttatgcttcaacagtttctacaatatcatttgtaacttgactctgacctttgttttattcagtaattgtttggacccctagtatgagcatagcattgtgaggaatgtactgaaatggaagagatgggttttcttctgcaggaatttacactttacttggtggggggagactagctagctgcatgtgactataaacagagcaaccagcttttctgcgtgatttgtagactggctctggaggactggaatgtaactctgcgtggcattagtatcaacaaatcgatcaatggggtttatagttatttgattttcaacaaaagcgccaaaataatcagaccaggaacggaaagtcttttcaacaaatggtgctaaacaactgaaaaacattgaactttgacccctacttaacactatacacaaaaattaatttgtcatgcatcatacacgtaaacataaaagccaaaattataaagcttttagaaaaaaaagtaggagaatatctttgcaacttgaaagtagatgaagatttctgtatcatgacccagattggcaatgaccatatcaatgaccataaaattattaaatgataaattcaactctaagttaaaaacttttatacgttaaaagatgccatttagaaaataaatgggcaagccagactgagaggatatatttggaaaatatatctgacaaaggactggaatctaggaaatatgaagaactcctataactcaataatgaaagcaaaaacaatgggcaaaagatttgaagaaatacttcagaaagatagatacatggccaattagtacatgaaaatcttactggaaattacatgaaaagctgcttaatatcattagctgtcttggaaatggaaaaaattaaaatcacagtaaagtagcactccataaacaccagtatggctaaaatcaaaaagacaaaaaatgttaaatattggccaaaatgtgaaaccactagaactcttgtttcaattgttgaagcataaactagtatgaccattttggagaaaggtcgtgctgtttcttataaaactaaatgcatcccagtaagttaccgtagaacccagcaaattccatgcctagttatttacccagtagaaattaaaatatatgtccacaaaaaaatctagaacaatattcttagcagctttacttactgtcaccccaaatggggaacaattcaggtgttcattaacagaaaaatgactagacaaatggtgattgtatttgcgcaaacaatagaatacttactactcagcaataaaaaggaaccagctactagtacataaaacaacaaggttaaatctcgaaagtattttatgctgagtgaaagaagccttacacaaagatgaactgtatggttccattttatgaagttctagaacaggcaaaaccaatctatggtagaaaaggcgtggtggttgcctctagggctagggggtaggccttgatcaggaatggggatgggggaattttcccaggtgagagtaatgttttctatcttgagagggtttttgggttacacaggtgtgtgctttttggggaatcattgaatggtgtgcttcagaggtttgtgcattgcattggatacaaattttgcttcacaagaagaaaagagaaactataaacaaacatgtcacgctagttaatgacatgcatattgaagagtttgggggaaatgttactgatttctgcaacttcgaaatgtatcaaaaaagtaaaatgtggataaagagaggaataggtgtgataaaaaaaaaagtacagtgagatgccaattgtagaatctagatggatttgatatcaaaattctttcaacgtttctgtatgtttggaagtttttacagtaaaacatggggagaaaaggtctgctgcttgtccatgccgcaggtcgctaatctcctggacaggtcactttattcgatgtccctctccaaaactagaaggttgaacccgatgttctctcatgcccgttccagacctgacattctgtggatggaaatgagttcagagagcacctgagcccagggcctttgatcagtttaaactgatcatttgctgcagctccttccttaacactcagtttttttgtataatggttaagattatttacaaactcggagtcaagacatagaaaccagttttcacctgaaaatgaaaacaggggatttgttttaagcagataatgctttatgcaaagatagttcaccagatccacaagtagaattcccatcaggcctcacgtgggcctaaaccagaaagcagaaggctgttgagaggccacgagcactctttccctatctcttaccattgcttctatctgggcatggctgctttgttcttcctcagcagccagactacaaggttagtggaaaatgacagccaatggctaccaagttcatctgttattttgacagccacactgcaagtgtctgtcattcttagtaccattcccaaattttcaaagagatttcatttacggagcttggtctaacccaatatagccagagggcagggccatgtatataaattcagctaccaataaaggacttctgtgggcagcagggacgggtggtggtgcttgtgagccttgcagacattcccaaaggtgtctgcttttgtctgaatcatcattagcaagaacgtccatttcaaaccagcaacatcatgagttcaattagatcattcacacagcaggaccccagtctgacattctggaaacataccctgccttgtttggggctacctccttccaaactgggaagaaaataccgtacctaaattggggtctggagagagtaacaatgaagggagacaggtttatattatatcccccaacaacaacggtcttcaaagaactgcctggttctggacactgtggccctattttagtttgcgtaagaatcactcggggagcttgctaaaaatgtagcttcccctcccctgcacccagagattctgatgcagcagggctaggatcaggcccaggaagctgcatttgtcataggtgcaccaagtgattctgaggctcatggtccctggctgaacagtccacggaaaactccatgttaggaaaaatctcctggttcgcatcacacagagattcctaggaccaaattgtctttgagacttagaggtatatactgaaagttatgacagtagagtaacaaacagagaggcagacgtttggggacctaggaaaaaaatcccatagttcccaagtgtctgccagcagtggcatctcagaaggtgtaaccctgtgtctggctcctctgagcacgggcaggaatgtccttagctctctgtatccttctgatcctttattctttaacttttaggatggaaagagatgctgcatttacacagaaaaaggcagaaagggcatgcctcagagttcatctcagagaaaaatacaggctcccaaaggtaagacactctggaaacatctaatcatttcttaattaatgataaatgggaagtcatggttgattatccacaaaggatcatgttcctgaatatgaatatatatatatatattcaagatatatatatatataaaaatatatatattcaggatatgtatatacatattcaggatatatatatattcaggatatatatatacacatattcaggatatatatatattcaggagatatatatatatatatacacacacacatattcaggatatatatatatatatgcacacacgtatatcctaatcataactgaaatgtttgatatagtgaaaagagcactgaactaggagttcataaaaacttgattccagtttttaacttaacctctatgaacttccactgttgctaaaaaaaactggagttaatacctatagatgacattttaatgtaaacttatctaaaggttctagaacttctctatgtaaatacacaacaaggacaataatcatagctcacattggttgagctctttctaggtaccaggtacagtaccttggcatgtattaagtcatttaggttctattatcatctctgtcttatcatagaggaaacacaggcatgaagaaagtaggtaccctcctgccatgggccagatagccaggaaagatagagcccacggtcctgatttctatgatattccacctctatttaaaaggaaccatcgcttgctggtttggggaataatgtagtagtgacagtcatcacctagcaccatcttatgcatctcagcactggctgagggtgactgctgtaggctgtggtcgagtgagtcgttggtctcctggtgggaagggaatgcgttgacatgttgtggaacacgtcttggaggtactattccagggcttgcatccagtagtgacagagggcccatcactttgctactctgactcataccacctgactccaccttcactacctgtctacctgactaaatgactccaccttcaccttctgagctggttattcaatttcatattccaaagatgcgccatcccttaaagaacatcttccatctggagaagccaaagtaaaagatccctccaaagggcatgatcccaagtatgagagccatctccaagtctgggtggtctagaaagtgctgctaaaccaattccttccatggatccccagcagatcccagaaaaagctgattttagaaactacaagcactagacaagggagaagccactgtctatgcaaggtcactgatgaaatcaccaaagacttaaacatggtagaggttgatccctaaggtgcccaaggaacctgggttctgttcttaataagggaaggaaaacccacaataaaatgtaagctcatttcattcacaaccaatgaacttggaaaagaatgccttgcttttcctacccccagccccgttcaggtttaataacttttcctcactgtgcttgcattttggaagagtgaagcacttctaaacactgtcctttccactttcattgtctggtgaatttcctgaaactccctggatgtcattggctcactttagcaatgtggtctcgccctaggcaggaagattgagtcggattcatgctactgcgctgaagcccctggcctctgctcttgggccatctgattaaagcatcatcaacttgttgggatgaagcagaaatttcacacacacacacacacacacacacacacacacacacacacacacgattggctgggtgtgcatcgtccagaatgtagggctttttacagatttatttttggcaactgttattcttctgtagggatctagggagaattggggttccgttgtagctctgtgatgcaatatcacatggtttttaaaaatatctgagtctcttaatttatgcagcagcaatagaaaaaaaaatctgagcctcagtatcctcatctataaaatgagggctgaagtacctaacttcataggatctttgtctgagataatgtaatataaaggacctagtacaacgcctgacaatagagctcttattattgacattatgatctctgggcacaaaagtcttatttcctgataataacaaccaggggtcttgaggaccgccagtccttaggtgtgtaatcaatgcaacaatggaggttcctgagcctcaaggccccaagccttttatctgtttctccactaatggtaaatcagcagtcttgctgacttccagatcttcaggggtgaacacccttaggcttagcagtaaggtttaagtactcttccaagaaaaataattcttaaatctctgtgccagggtatcttttgaaacaagagcctttccaacagaaactatggaaagaggaaaaaatgatagccatgaaatgcacaaatccaggtcctctctggagaatgattgtggctatacctgcataggctactgctctctaaagccagctagggggagggaccgacatgaaggatgttgataaataacagtagagcccaccagtgtctttcattgcatggcttactgatgttcatatagccccttttctacagctgtttcaaatgcataatgcatttgagaccccacctgattttctcatagaccatgaaagagaccataaagctcatctaataatctcataccactgcgtcattttacacctgagataactgcagcccaggagggttaagtagctttgcaataagccacatctcctgtgacagacttaggactggaactcaggccccacaaccatgaaaaagagcagcttgttcacaaaaggacttcaacagggctcctcctttcaaggcatttgttctttctactctttttttctttttcttttttttttttttttttttgacacagagtctcactctgtcacccaggctggagtgcagtggcatgatctcccctcactgcaagctctgcctcctgggttcaccccattctcctgcctcagtctcccgagtagctgggactacaggcgcccaccaccactcctggctaattttttgtatttttagtagacacggggtttcaccgtgttaaccaggatggtctcgatctcctgaccttgtgatccgcccacctcggcctccctaagtgctgggattataggcgtgagccactgcgcccggcctctttctactcttaatattttgagctgttccccaaaattttagggcagttttgaattccacgtggcttaaaaaaatgggagcatattatttctcctgtgttgtctaacggtttgaccctagatctgcaagtagctgtctaaattccaaatacaatccaaacaaacagataagaatttcacttgagaacattgtacacaccatcattcattgcagtttacttccaggtggggaccccctcctccaagggcgtttttatatttggttgcatttgtaacaatggattctacacacaatgtttcaaaaccgtgcctatggtatggaagatactacaaataccaataatacaattgcctgctttttgtaaagcacatggaaattctaatcccgtgtagctagctataaaaatagcacctaataaaactatatgataagaaaaatcggctactctgggcagactgccctgctctgcaaggagcagtttaaaaactaaaatttaaaagtttaaaaaatcagctggatcgtattccacttagtccagttatcaccagctgtggctaacttcccctaccccagtgcaacactttgcgcttgcaaaccagccccacccttgggcgcctcctctgcctcccgcgctgtcacttgtcgcacgttaccctcccgcccgcgtccccgcactgacgaggctctgggtacagggacccttcgatggcccatgtggcgaaaaagaggctgcgggggacagacacgtttcccaggctaacgtctgcccaggctatgcagaacagccgctcccgtccaagccagatcctggctggagcaaggagggcgcagcggtcgccagcgcgggccccgaatcctcgacgccggcgccccctggtgttcctagcgccgcggccactggcacccgcgggaggcggaacccgggctgcgggtggtggcaggaccagggaggggcagaaaccaatttctagaggtgacttaaaaaaaaaaaaaaaaaaagtcttgataggtcattggatgggatgggggggaaaacaaaacaacaacaaagaaagaaagaaaaggaaaaaaaaaaagccttactattttgttattaaggaccagatcgtgcgttttctatcctcccatggcataacgggagagggagctcgcaaacagccgagtttccgctgtctccgcagtgaccaggctgcagagagattctgaaacgacagcaatcgagggcgggctgaaggaattggaatcttcggccttgagagatgactgaataaatgaagcttatggggggcagaatcatgccccaggcctccagtgccatgctttttattctaatactgaattcagccaacttacccagtggcttagctgctggttgttattgaactgtaggtacctaaagtctgtctctgattacgcagaggaaactccgtaatggaacctttagaaagccatccttagagagaggccggacgcggtggctcacgcctgtaatcccagcacattgagaggccgaggcgggcggatcacctgaggtcaagagttcaaaaccagcctggccaacatggtgaaaccccgtctctactacaaatacaaaaaaaaaaaaattagccgggcaaaaaaaattagccggccatggtggcggacccctgtaatcccagctacccaggaggctaaggcaggggaattgctggaacccgggatgcagaggctgcagtgagccgagattgggccactgcactccagcctgggcgacagagcaagactccatttcaaaaaaaaaaaaaaaatcagaaaaacacagtggggatgcgaggtgtagggttttgtctcctagatgcttcattaaggagcaaggagaccctggaaggccagacagtgcccatctgggtcactaagagatgtgattgacaagcccaaggcatggtgctctgtccaaagaactggagggaaggagaggagaggcaggcctgccagtgctggctcttactgaggccaggggagggctgaccgagggctgaaccaaaggaactgctgtattcggagggaaacagagcaacagattcccaagtccttataagtcccctctttggggcttggcttccaaggtcatctgaggaacatgccaaccatcacttccctccaaccttctaagttcttttcctagaacaggttcaggttcctggatgaccacagtactttggctcctcgacaccagtgtctgagtgctgtttctcttttcaatagacttatttttttacatccggaaaagcacataccatatgtgtgcactcaatacataaccataaggatcatgtaaatgtagggacgttccgaaggtcacaaagcttgctgtgacaaatggagactcaagcctccttactcttcatccaggactttttcgtgcccccttctcctcatatccctctaaactgggcatcagattcctggtggtagactttagaactgaacagactgtctgacaaagaaaacggcacaagacagaaagcaggggtcactgggactctagtgggttcctaataaccgtcccctccctgccaggtttgcagaatacttaacctgtgccatcttctaaagcccatattgggtaagcattcatagtaatagtattaacagcccacagggaattggacgaatttaacatgtcctccagctaatgagggatgaccccctgggtgcctcattcacaattccccagggtcaccaccacagcggttacataacagcaggattcagttctagacccttcccctgaccaaggcccgacggggagcagatttgagaaaatgtcttcccgggagctgtcaggtctaatgaggataactatgtcacattttggaattagaactgtattttctaaagaaattatttggctggtgtttcctctgaaaaagagtttcactctattgctgacagggaaaagcaaatgtagactctttgaaaaggagcaacataagccatagccctctagataaacaataaaaggtcttgggtctcaagtttattaattgttagtgacaatactatttgctataccaatgtcttttggtgaccattgttaattttggtaatcagataagtaattaaataagggcagtaatcaaattgcagtaatctgcagtaagtatgtatatgtatatgtatctataccagtcattataatgttcgtgtacacatatccagattatgtcgatttcctctagttgtcaaattataggtcatcagaggacttaaaatgcctaaagtcatccatgatgctcacgttagatttggatcgcacaccactaattattccacatcctgtatcttcagtttctccttcttgattggcctctccttaataaaggaggtcaaatctctcccatctaaaacaaggaaacagtactttctgagtaaacatggctttttaggtgtcttcccttaaatgactagttctcactgctctgctgaaaccttcttcttccagatgttcagggtctgtctaaatacagtaagtggttcccttaatttctcttggggcctctttgtttcttctagcactggtgatctcttcttccttaaagccctctctctcctcagcttgcagacatcaccctctggttcctgttctcgtactgcttcttctttatgagttatctttctctgtctgcctgcaaattgtgggatattccggggtgcccccttggctggctcttcttctcactcgagcctgcacattgtcctcgagggctgcaccttgccattgctttttgctaccacctacatgttgatgattctcaaatctatacctccagaccacatctcccgaaatttcataactgcagccacctttccttggacacttcacaggtagaaccagctcatatccaaaactcacttgctcattctccccataaacctgctcctcctataggctccacttccatgggtggctctcccgacaagcccatcatctcccaggctggctaccagatgtcaccattgcctcttccctccctgctccagctgcacgtccagtaaatcgccaagtcatcttaattcagagttctcaattcaccatagcttttctacttggagtcttgtccccctccatactgaggtttctaaaatgcaaatctgatcctgtttctttcctgttttttgtttgtttgtttgtttgtttgtttaaagccactatgtcttttagaataaaatccgaactccttgtcctgtatgccatgatatggctcctgtctctccagcctcacctcttgctactactccctgcctggactagcacttcctcctgcttcgttccctgctccctgtggcctttgctttctgtaagactctggtcagtgccacttcttccagggccttccatgatctccctccctctacctagttctggattgggtcatcctcctccatgtccccatatatcttgagtccatgtctcctacatcatcttatgaccctaaatatctgcacctactgtgtgctccttttaaaaagggaccgacttttaaatctctgtgctcagtgcctagcaaggtgcctgagatatagaaaattgcacacacacacacacacacacacacacacacacacacacacactgattgttgagtaaatggatgttattggggaaaaagaaaagaaagaaaaatgcccggccgggcgcagtggctcacccctgtaatcccagcactttgggaagccgaggtgggcagatcacgaggtcaggagatcgagacgatcctggccaacatggtgaaaccccgtctctactaaaaatacaaaaattagctgggcatggtggcgcatgcctgtaatcccagctactcgggaggctgaggcaggagaatcgcttgaaccagagagttggaggttgcagtgagccgagattgtgccactgcactccagcctggcagcagagtgagactccatctcaataaaataaaataaaataaaatgcccaaagaacaaagtgtcaacacaacagaaagaatttacctgccattagagttacagtaaaatacaattttatgaaaataactagtccagattggatattgtagttttgtataaaacacaaaggtttccttgttttataattaaaacaccatatttcttcaagtagaggaagcaatatgttttaaataaagctacaagattctttctaaaagcaaatgtgttcctctccctggccaatttaaaatgtatatgtaagtcaagctaaattaataagagaaaacagttccacaatgaaccctaatcctattaacagaattgtcaatctaggttagtcattgaaaaataatgttgtgacccctgctgagctatatgatttagttacacctggtgtttgtctgccgtattaagggcaccattcatttcgaataaagatgcatataggagaaacttaacagagttttctttaaatgtgtcacattgaaagctccattacagttgaatgtaaaatttgcctcttaaaaaaaataacaaagatgattgtgtgaaccttcctttgccagaccccttcagattaggagctcttggggctgcccagcagggtctgagacaccgaaacctcctgctttctgagcagctgtttctggtggccaggcggtgggaaggccatcagaggccccagcagccgccatctcttccttcccctcctcaccctgccccagttcggtttgctcctcctactcatgtccttgaaagagcaatggactacatgtctacagggagcatggggatgggaagcagtcactggacactagtgaagcaggatttcaagacgtgttgcttggccacaccagctttctcacgtcatcttcacaagtgccctgtgaggtaggtagatatcacttcgcctttacagatgagaacgcctgctcagagagggaaagtgactttccaaggtcacacagccagtaaatggcagagcaagattctgccatgagacaatccgagcccacaagccatgttttcttgctagacccttctggcagctgtgctaggttctcatcccctaaaaagcagaatgacatttttgcaagaatctttacctctcgagacctcactttcctcctctgtaagtgagaggcttggatatgcggcctccgggagcttcttgagtccctgtggaatgtcttcataagggaaagaggtatgagatgtgcacagctggtatctagaaattctcattccatgtagctcccaacgcatgcacactttcaatcaaactgaaaactgatgcctattcttcaagaagacaaatccacaccatctgtcctactctaggggtgctgagggctctttaagtagctaaagagggaagggcagcagtggggcacagcagaaggagcagccagcatgccccagcccagggcctccacaccagtcacacactagcttctgagggcagcagcctcactcataaccaggacagtgagagtggtttatgaagacaagtacctgactgctcaagtccatgatcctcaccattatgtcaatctcacgctacatgaactcctccatgtgaaagaaatccattcttctagcttttggtatcctgtggacaacaataagtgaataaaccaaaaacaaaatcaaatctacctaatatcaatcacactggtatttgcttatacaacatgcttagctaactagactctgacaagaggagaatgctcagctttttgaagacataaccatctaagataatttatcatggtatctcaagtttggtaaaagagaagtccagtttatccaggtccaagaagtagtaagtcttgaaatccagggtcatgtttatcctttggtgaaaggtcaggcatcagtcacaggaaatgacaatggtaggatatggagctatttaaataatggggtactcagcactggccataaagataataagtctggttaaaaacaagagattaaaacggattctcatcagctggcataaaaataattagctcttaactgcattaaacaatatcccaaattgataagatttctagaaatgagacgatctctgaaacagagcctctaagaacaaagtatagcctataagtcccctaattatgtgctggctcactcattcattcattcacgccacggttctcatccttgagccttccctccctccctggagctgcttccggcctgtagtgatgctgattcacattggctataactgcacttgtatttgggggttgtaatgaggcattacttcttttccttgaagtgtgaactgtgtccaaatattcctggtctccccaacccaagatttgtcaatgggcagcagaacgtgtggacaagacattcattgtttgaattgcagacaaggtcctgtcagcagggtggttcattaggaagagaggaaacaaggctgctgtgtccactgtataaatcccatttatgcttcttaattgcttgctgtgtcccggatctttctcttaagggccgatactctcccaccgtctctttcactgtccatgccttctttatcccagggatcctttcagcagggatcttgacactgagctgccctctttcctctaaaatattcataaccactgctaccatttgtccagagcttagatgcttgcgaggctgtttcacagcatgtctcattcaatctgctcaacagtcctctaagtggcccttccattggacatcagaaacataagttgacttgcccaaggtcatgcattggtgaatggcagatctgggactcaaacccatgtctaactccaaatcccacaatctttcattctcctaggctgcctccaccagaaaacggtttggataggctgcaactttttacaaaggagatacttgaatacttagccagttctaggtctagggctagctcaattagttaggatccagagctaatgaggctacaggcccacatttggttccagagggcatcattttctcctctagccactcaacggccttgtctggttgtcctacctttagtcataagatgtccatggcacaggctgcagcccagagtaattggcttcaagactagaatcatctccagaagcagccatgctctggtggagggccagtagccttgtacttctagatcaatggtgagtgcaggactctctgaccacagccatcgagtacacccattgctgcctttggacctggacatctgaggccactgccctggggcccatgttttagagggctctcttggtctctcttctagccacactctttcacacggggtgaagagtctgtgggccaaagggcctagcccaggcagagcccacacccctcttgtagactatgctcaagctgcttaggaccccaaacgccctgcctaagtgcattccagagcattctcaggcctccgatgcagatctgtgctcctgagagtggccaggcagactaggcctgaggagtggggtaggggccatgcacccaaggtcctaaggcccttcccagtgagggctggcaccaggaactggaaaaaaaagagggccaggttgtgagccaggaacttctatcagcacttatgttctgccacccacaaaagtcaggggcgggcctgacaagaggtaaggggagctagggctggctaggtagctttctcctagaatagagagcctagtgctaaagaggaaatgactaagcctggcttgttagaaaaaccaagcctttgggtgaaggtaggagtcattgctaggtcagaggtaaggtgccaggacatcacagcctcctgacagagctaaccccatgtgcaagactgcccacagcaaattcccctgcccacctctgaaggttattatttttatgaatagctactactgggtgagtgcttaacagattctaaataattcagttaccatctaattaaccttccacagctctaaggcaaataatgcaattctccatatacagacaaggaaataaagctcaaagaggccatctatacgaagtgccccaggtcacccatcctataagtggtagaactaatgtgctcactcaggcaatttaggctgcgatgccccaatggaattataaagataaaccgatagctacgaaaacagagctctttacagcaaagaggacctacaaatttgagtattactaaggctgttatcctctctgacaataggttcattgaatcattcagtaaacatttattttaatttttaaaaatatttatttatttgttaagacagagtctctctcttttgcccgggctggagttcagtggcgtgatcttggcttatggcaacctctgcctcccaggttcaagtgattctcctgcctcagcctccctagtagctgggattacaggtgtgtgccaccactccctgctaattttttgcatttttagtagagacggggtttcaccaaattggccatgctggtcttgaacccctgacctcaggtgatccccccgcctcagcttcccaaagagctggggttactggcttgagccaccatgcccggctattcagtaaacatataattgtctgtgtctacatgccagaaaccttgctgggttatgagacagaaagatgagtaagttacagcccttgtcttcaagaaatgtagagcaggggttctcaaacttcagcaagccccagaatcacctggaagacttgttaaatcacagattgcgaggcccgagccctgagtttctgattcagtgggtctgagtagggtcccagcacgtgcatctctagcaaagtcccaaaagatgttgatgctgttgtcctggagaacccactttgagaactactttgagaaccactttgataaaagttagggcaatcaagatcctctccataaggcaacgtagaattgcactgctctcccttccctgagcaagaagcacaaggataaaacgaacctcagagtcacccttgaaggaggaaaccatcccaaagcttcttcaagcgctgcagagccatagatggtggcctcgctgaagtctccctgtgaatgggaggcaggcgagcaccatcccgtgagccctcatgagtgtgttcggtgttttatactcctggctggctgacacgctttcctctagcccctctagctgcccatccctgcaagcccacagcagttaccctgtccaggttcaaacctggtgacatgcttggggatcttactaccaacctgagggaaggggccagaattcccgggaatgtcttttcagattacttgcatttgatttcaggatgcataagagagggcagatgtcccacattggcatgaactgagaatgagtcgtccaccttgtgcttttcctctccttcctgcaaaaagtcccagaagacgatcagcaaggaaagcagccgctagggaaggcaaataaaaaataaatagaaatgcacaattggctgggagcccctaaggattaactaactaattaatcccacaacagtttgaccaggaactaattaatccgttaagcacttggagggcccaaggccctggccaagagcagggagaggcttcacttatctccggaggctggcgcggagtgggactgtcctccaggctctccaaggagggcctgggtgaagactgtccttcccaaaatcagtggttcctgctgcatcagaaatctgcttctcaagctatttcttgagccagactcctgtgtcactctgcccagggaaccgaatcaaagaagagagccctgaggaaaggcagctgggcttcagcccctccaaggatgggagccacagagtgttagaactggaaaagacttcagccatctcgtccttccaacccactttccagatgaagaatgaagtttccaggttacctggtgtgctgtttggacctagagacaactgatgtttctttctgatcattcctacatagcacccagacagggagaattcagatctctctttaggtgctgtctttaactccacctcagaagtcaccaggtgcagaaatctttcttaaagcaatgtagtctgtttgactaagatcgtcattttttaatatgatttttcatgagctttggtaacaaatttaaggctggtcacaacatattcaggtggctctaacatagatctttcctctcattagcttttctgacactctttttaatcttctgtttccctgaaacccaggtcacctcatgttacaacctgatctccaaaaaatctgacagcagccatctggggatgtaagctactgttaacctttcccagagaatatttttctttagactcctctctcattacagaacaagagactctatagcctaagtggtaaaagaatctcagctgagtatgggggtgcatacctgtagtcccagctacttggaaggctgaggtggaaggattgcttgagcccaggaggccaaggctgcaatgagcccagattgcaccactgcactccagcctcggtgaaagagagagaccctgtctaaaaaaaaaaaaaaataaaggaatctcaaagaccaggcagcatgcattaagaaattctagaacagacactcctaaaatcacaaaatgaaatgtgcaaggcgcttgtgacagcgtcagcaacaccgaaggctagactgccagtatgctgagtggcggccatgcccttgatggttcacttaatacatgtgtactgtgtgctagactccagtccaggtgctaacggtggaaagttgaatctgacaagagcccatgacgggctccctgtctagtggaagggaggaaaagagccatgattaagaaaaagttgccactaaggtgtgatgagtgaattaatgcatactgtctagttactataaactgagacctcatcctctacagtggggtcaaccaggtgagtgggtcttggcatggggctgatagaatctgcaagacttgcaaagctgcccttaggcagagttggggtgtgatgccccagcttttgtgtgtatcagcatcacagagagaaagacattcttaaaaatccagatggggttgggagtggtggctcacacctgtaatttcagcactttgggaggccggggtggttggatcgcctgaggtcaggagttcgagaccagcctggccaacatggtgaaaccccgtctctactaaaaatacaaaaaaatcagctgagtgtggtggtgcacacctgtaatcccagctactgagatttactgaggcaggagaattgcttgaaccaaggaggcagaggttgcagtgagctgagatcgagatactgcacttcagcctgggcaacagagcaagactccctctcaaaaaaaaaaaaaaaattccagatggctgggctccatctccagagttcctgattcagtgggtctgggatggggcccaagaatttgtagttccagcaggctctagatgatgctaatgctgcttgtccagagaccacacttggagaaccaccatgctggaaggttctgatcgacgcaaggtgccatgaagaaaggacccccctacagaagcccccacaactgccatcaggaccaggctctgctgcaaggccaagagtgccactcacttcctgtattctctaaagaccttttcctgctgcttttaaaatttatttagttagtgagttagtagtttagagttatttatctatctctatttatttttcacatagagtgaaatggatgagaatcaaatccagatggctggagatgatgtggatttacctgaagatctccggaaaatggtagatgaagatcaagaagaggaagaagataaagattctattcttgggcagatacagaatctccagaacatggacttggataccataaaagaaaaagcccaggccaccttcactgaaatcaagcagacagcggagcagaagtgttccgtgatgtgaggggtgggaggggtggagggagggaaccagccatccttggaaaagaccactctcttgtgggacgtttcaagcagtacatgttttaatgtagtgaacacagttaggaaaaccacgatgatccattgacagacaataatttggttgttctaaatattcctggcagagcatttagctaacaccttgcagcgggaaccttactttccttttagttataaatgagataaactggaaaatttcagttgtaaatgatgatgcagaacacatatctgcttaaagaccttgagatgagccaggaagaaacaaaagcaaggggcatttcctctccaactttcttccttggaggccaagttctcaccctgtccaactattcgcaggacaccaggtcccttcagagagaaatgtggagagtcaaggtgtctactgggagccgggtttcccacagggagctgagtctacagactccagggcaatcaaaggtcaccacccccacccctcacctctaggatccttgaatttgtcaatgatactcatcaagtatgcttggatcctttggtccttggatgcttctcagccaagtggcggtagcacagatgtggtgaacaatgacgaattgaggcagggaatagacctcactagccctttgcaatggagatcatcgttctagtggccatgtgaagaatggaaccaagggaggcacaattagaggcagagggaaaccaggcagacggctgctctttttgagttgagcttaactctccttgtctgaacttggtgatagcaatgggaacaaagtgggtagactaacagagagcattaagaagttaaatcaatctctctctgtctcctcccaacctctctctctctttcatccccttctctccctatctctcttttttttttcttctcctgtcccttcccatcccacccctttagactaccttccagtaaatcacactgtcatttggtgccacaagctttcagggtagacactgatttttcccccctaatatctgctctctttcaaaaggaataattcaaaagacttaggacaattaccactgaaacacttcgagctatttagctaaagcccaccaaaccaaaacaaaatactgatttttttttttttttttggtgactctgttcatacagtgaataaagatctatcaaaggaaaaggaaactgagaccgaaaacttagggtctaagttgttctaaacccagggttctcaaatgtgttgtacaaaaagtttcatgtaataaaattaagcaaataaaacaaatgaatagaggtcca

SEQ ID NO: 735 - DNA, 26893 bp, Homo sapiens
  source 1..26893: mol_type = other DNA
gccttgacgcgctgcgcctgcgcaatgtctctttgcggggcgcaccggcaggctcccagccccgcttcgtcgcagcggcttgggccctccggccctccgtagccgctcgactgtcgcgctgcaccagcttcctcctcggcgttcccacgcctatttgggcggattcttggcgccggaggaagaggcagggtcaccctctctccacgtcagagacctgactgtggagatggcggctcagaagataaacgaggggctggaacacctcgccaaagcagagaaatagtgagtgagaaccttccgggggcctgtgtgtagacgccgggtccgtctctcactggcgcggccttagcacccggggggggcgggagggagggctcagggctgaggggcctcggcgcgctggtgcccgcagggctgccggggctcggtgtcctctgggtcacactcccggggtcggggtcagctctgcggcgcctcgggaagcgccgtgggtccaccccgccggaagtccgctccccagagccggtgtgggcggggactcggcgcagtgctgcggggcgagggcttctctacttgggcgctctgctcctgaagattgtggtgggggctgtctgtgcatcggaggctcgttagcagcatccttggcctctacctgctgggtgccggtcgcatctcttccccatttgtggcaacccaaaatgtcatctggggaacaacatcgctctgttgagaaccaccgccctagaagagccccctgtgtggaggggaccataggtttaccccaaaaactcctcggtgaacctttgtcatctggcattttactgtccctgtgggcagggactgtgcttcgttcgtcctttgatgtgtatgtcctgccacctctggtacagtacgtagtaggcaccctgcaaatgtttgtgggactgaactgataatccttaattcatccttttggcagcctcttccccccgtttcattactccagtgcatttttatctggcagttacagttaatagaaagtcagcattgtgggccgggcgcggtggctcacgtctgcaatcccagcactttgggaggccgaggcgggcggatcacaaggtcagaagatccagaccatcctggctaacacggtgaaaaccgtctctactaaaaatacaaaaaattagccgggcgtggtggcgggcgcctgtagtcccagctactcgggagcctgaggcaggagaatggcctgaacccggaaggcagagcttgcagtgagccgagatcgcgccactgcactccagcctgggccacagagcgagactccgtctcaaaaaaaaaaaaaaaaaagaaaagaaaaagtcagcattgtgctctgtggtgggtgcttcacatacataatttcataagctgagatcttcacaataactttccaaatagagattctaatttttcgtaagaggaaatgagactcagggaagcctcataacgacttgcccccaactgcacaggtgaaagatcgcagagccagttttcaaacagtggaaaaactcaagctctatcacatgactcgaggcagtcagcgtgtaaggtgctggggctctcctggtgcaggaggttcccacaacattctgctttctagtgggagcaaacgcaaaatttgtaataagaatagtgtgtggaatagggaccacaaaaaagctgtattaactgtgcataggtaacccagagggagaagtttattctgcctgagaaaatttgaggaggagatgatttgtgagcagagcttgaaaaatacggaatgttttagacggagggaaaatcttgtgaaagagattctgtgcgcaacctgtagtatgtattatacgcgggcctgaaaatgtgctctgggaacagtgaatgtagtgtagtcacagtgccaggggacgagctggagtgaaaaagagttggggccagactgtgaagggacagcttctcacatggctattgtaggcatccaaccagtggactcggttagatttgcttttggtgaaagaaatgtggcagcaggctgggccctgtcgctcatgcctgtaatcccagcactttgggaggctgaggcgggtggatcacttgaggtcaggagttcgagaccagcctggccaacatggtgaaaccctgtctctactaaaaatacaaaaattagccggctgtggtggcgcgcacctgtaatcccaattgctcaggaggctgaggcaggagaatcccttgagccctagaggcggaggttgcagtgagcggagatcgcgccactgcattccagcctgggagacagagcaagactctgtatcaaaaaaataaataaataaaaaggaaaagaaaaagaaatgtggcagcagtgtggagaatggactttgacatattcagtaaacgaacatttacaaagttgtctctgtgtacctgtaccagccacagaggatactggagtaaccaaaagtggtcccttcttcaagagcttagaattcacaggtgggcagacaagttaacagaggactaaaaataggatgttcagtgctagaatagaagtattcagtgtggtatggtagagataggaagcaaggaaaaggtaatatgctcaggatgtggggaatggaagaggaggaaaggtgactctcccatgaaggtactgccagacatgttagtgggttgtcgacttcaggggagaggtggtgatggcctgaattcaaataacagtacaggggtaggactgggtgatgtttgtcagtaaggttgacatgctttaatgaggtgcctgcatgtagagatgaagagttaactcctaggtttctaacttgggagacgagtgggagaggccttcagccaagataggggatatagattaatggatgtgattggtgggtaggtctggggcagggaggtggggcggggaggtgtggagttcaggcttgaagtgttagtttgaaatgctgctagacagagttactcagtgggtggtaggaaaaatgggccaggagcttaggagatatttgatttttctccattttctaatgatgacgtagttcaatattgctgagtaattttgtaaattgatccccacacagatggtaattttgctgttttctttttttctgtggaaattggtcagtttccttattgattctttggagaaaaaggtcaaaaggactaacaggtatggctgctaaacccaaattagctgtatatctttcttccttattagtggtgttcatgtgacttgggatggtttgcccagttttaaactctctgggtctttccgtgtatagcacattaggtgacggagtgattgtatcttgtttttagtgggattaaaaaaattatgttaatatacagaatgtaatgtttgttatgggataggaacagagggttagcattttgcatattgcatatttcctcaattttgtagatttgagtagacacaccacaatttaaggatattatttttctgaacagtgaaattcttggtaagcttgaaaaattgcttattttaatttgaatcttgtaacactatatacacaaacaagttttagatgctaaatatgttgaataaatttaattggcaaaaaatgttactgtagctggctgggtacagtggctcatgccggtaattctagctctttgggaggccaaggtgggcggatcacttgaggccaggagttcgagaccacctggccaacatggcgaaacctcttctctactaaaaatacaaaaattagctgagtgtggtggcacaagcctgtaatcccggctactgaggaggctgaggcacgagagtcacttgaacctgggaggcggaagttgcagtgagccgagataataccactgcactccagcctgggtgacagagcgagaccctatctcaagaaaaaaaaagaagctatgactttgtggcagttcccatggctgtcacataatgaaggctgtacttctgagtgctcatacagatgcctcatctttcagttaagatactcccctgagtcatttgaagcaagcagtgttctgtgcaagcaggccttcactaattgaatgacatttagaatttacgatggtttgggcaatttctatgcacacccaaatttgacagttactgaattagtttaaactaagtctgaaattattttaaaataagaaaataaatattgaggaaaaggcaagtaagttaaggattcaaaattgattgtcctttggtttggcatccaagaagccagtagtgatcctagaaagcagtttctcttggcttttgtaatatccttccctttctgattatccttcttgtttatgggtggcgagttttcactttttttttttttttttttttttttttttgcctacttcctctgttgtttcactgaatgattgtattccttagtctttctgttctctctctgcagtctcactaggggatctgatctcatctatgctcttgacatatgcttatgatgcctccatttatgtctctagactcttgtctgtgcgtcagtttcatgaatccctctgctgtcgatactgtgcttcagaggttctaaagctttaatgcacctttgagctcgttaaacctcagaggtgctgtaggcttgggatggggtcaacaatttacgattttagtaagttcccagttagtgctgatggtgctggtccagggaccatgaattgagaacctctaggaggaaaaccacgtacctgtgacagtgggagtgaaagaggtgaggttgtgtttgttaggcctaagtttggatggaggcgggtgacacagagtttgtgcctgatggtttctcctttttttttttttttttaaagacctagaaggtcattacaagcagagatctgacttataaatgtggttggtaactcctgttaactgtgtttttttcattctagcctgaaaactggttttttaaaatggaagccagattatgacagtgccgcttctgaatatggaaaagcaggtatttttgactatagtccagttgctccagtatgtaatcttaaaatagtctgataacttcatttcaccataatacttactcatatgctttctataaggctttaatagttaaaaaacaaacaaaacaactgtgcaagcccttgagtttttttccacttgttattttcagatgtgttgagagctgagtcagagttcctggtacctgctgtctatgacagcagggatggggcggggttggtgatacacagtagtgggtttttagcgttgcttatatattctttaactccagttatttgaataccatatccatgagttttgccatatttctctattatactttctattgaattaggagtttgttaaattttttgttaacttagcctcatcttaacctgatacgcaaatcatatgtttgcttggtattttatgtcttttatgaacctcactttgagtgtatctgttcagtgttcatgaagtgttaagctatatacatattttaatcaatttatctttatataagatataaacaatctaaaatatgcaacagaaagggaatttactaaaaatgtagcattctgaattacagaatgatagctttaagcatacctgtgataatttgcagtataaatataacaaaattttgaagtaccttgaacacattttcagttgtatttcagcgatagcccttatcacatttgttagcctagcatagagatcatctggggcaagtgcttttggttaaacagcaaatgagtcttcagtacttttatttaaatctgagtaaattctgtttttttgcatcatgcaaattgtttatcttatacttgaaaattattaaaagttcaaactttgtatgaattttgtggactactcatgcaaggaggcttctgtagcagaagggaacaacattttgcaagtttcctctgtgagggaaatttaacacagatttgttttctgcccctctgagatcatgaattacattcaaaaataaatgttttagatgaaattttccccctgaagcatcctttgtttattttctttaagggcttatggaaaacctatttaatcagaataaattttttaaaaagcaacatatggaaaagcagggaggggaatagcttcagtatttggttttcacattttattaaagagaattttaagagtgtttttaacaaatagcacttttcttaaagcattatgctttttgcttctttgtaagcaacccttgataagttttccaaaatttgtaagatcatatgttataagcactcctgttttgttttgatgattacacttttaaaacagctttcagtatgctttagctgtttgaacagtgagacatctttttcatagatagtaaacagtataaaagattgtttttttaaaaaaatgcattgttagacatttaaagattgtgccaaaaggaaggtttattataaaaaactgttaaatgtgcttattggccctcagtttctacctaatcgaatgacctatacccaaaataccgtttaaaggtaaaactggtgaagtaaggtgctgtcttttgtgactgaagaatctgccggttactggggagtattggggagtgttggtgttagaaagacttcttgattttgagtggaagaaacactgatttgttgccagtagtcaacaattaaaaaagaaaaagttttaaaaatactcgtaagttaccaataattggaaaagttgtaaggaaattgctttagaaaaaagtaatattttatagttttaggatacttcctaagtatttgaagtaagtatgtttataatacttcatataaaatgcagatttcagtaatgattcatttgaggtttttaatgatggaaatagtcaatttttttttctatttcagctgttgcttttaaaaatgccaaacagtttgagcaagcaaaagatgcctgcctgagggaagctgttgcccatgaaaataatagggcgtatctttttcaacttttaaaaagaaattaaacaattagatgattttgacaagctgttttctcttgctgtaaatttactttactacctgtgaagtaaaatgtttttaaattagaaaatgattagaaaaattctgtatttttaaactatgaaggagcgtttataatgaagtttgattataaggtccacactggttcgcagagctacaatacttactttctattgtttgtgattttacttgatgatggttttacttgggatgaagtaaagtaaatctgtagacatgtgctgaagaatgaagaagtagcacaggtattgaaaacacgtgaactactgtatcaatttttttaaatacagttttccttaggtatttgaaataaaaattataagtagtttaaaacagtacattttcttgaggtgtttgcaaacttatcaataaaaaatgtttctcttatttgcaaactgtagtcataataactttgtacttcagtaaaacttcagattattgcgtaatagaaatagtttaaaatctgtgcagtgttttgttagtggttttgggaattatgtagttttaaactatattgacaggtattgaattacttcttttttacctgtttgtaggatttgtcttttggaaccaactgggtcagtgatttagttaactgtctttaaatagttgatctatagaaactattgatttttttcttttttccttaactttgacttcgttacttccattcagtctttttcatgctgccaagtaagtattcttcatgttttcatgtatttgcaaattatgttttaaatgttgctgtttttctgtaggttggtaattttttcccaaattataaattttgtattgatttaaataataatcatttctctttgcttcagtttttacctaaaccttaaaaaccaagacttactcctaactgtaagatgtaaagagtttaaattaaatttgccataatattttattaggagcattttgttcagtagcctatgggaaaaaaataagttaggatctcttttttcctctgtttgatagttaatggtgcctgtggagatgaagcaggaagctttctcttgccttgtggagagtagttatttgttggccgaggcaggcggatcacttgaggtcaggagttcaagaccagcctggccaacttggtgaaaaacctcgtctctactaaaaatacaaaaattaactggatgtggtggcacgtgcctgtaatctcagctgttggggaggctgaggcaggagacttgcttgaacctgggagatggaggttgcagtgagctgagatcgtgcctctgctctccagcctgggcgacacagcaaggctccatcccaaaaacaaacaaacaaacaaaaaaacttaggtttaggtttgtcagatggaaattaatttaaccttactgagccttacttaattttgcatctgcaaaataaaatctctttaactcaaatgtctgatgttctaagccattattccccacaaaaaaagaataaaaaattatattgtgtggtaatataagcctgaagtgatatgttgtgcatgagcccattgtaattgaagtcactttccttaccagtagttcctcaccagaaagtttcttctaccccttatttcgttaagatctcatcagagaaattatattctctttgcagagcttatgagcaagctggaatgatgttgaaggtcagtaatgttatgtcacaattgttgtgtaggtaaaatgaattaactacaaggtgttaaacaagaatttttgttgaagttgaaaagcttccttactgtaaggcaagaggtgctaagttaagattttctgtccacggtaacgttaattggacccatagaatacattctgtacgtcttaaggaatgttaaaagtgaaatttaagagaaaatgtattggagtgaactgggaacactaatgttctaagctctataaccaggatagatgtgtattgctataaaaagagctctatgggaagtttctctacttttgagaaggacatctaaatgtagtaaaattttataaatattaaaaaattatcatacatgggttatagaagagatttttacttatgtgaataacagttggcagcagaaacaaccacagatttaagcttttgctactttaattcattctgcatggaatattccaactaatgtacctgtgccactgtttgtacttctgctcctcaaaagcaggccaggaattaatgtcctgctgtggtgagacagaacatactactttatgatgctgactttcaaagtatgccagctggcagttgaaatgaagtatttgtctttcttttttaaaaatgtttttttctaaaatggtaaaagctactttcaagtatttattataaagctttgtttttaagaacttttaccttagtaaagcttttgtttttaatttctatgacttttataatgtgaacttactcatttttttagtgaacacatgctcattgtagacaataaaaaataccgaaaagttaaagaatgttagtaatagctgttaacatacttagtttaaaagattttatagtctttgacccaggaatttcaattctgtgagtctatcatcgagagagagagatcaaagatttatgcatcaggttgtttcttgaagaaatgccaattatctaaattttgaataataggaaagtgaggttggatgtagtggctcatgcctgtaatcccagcactttgggaggccaacgtgggtggattacctgagatcaggagttcgagaccagcctggccaacatggtgaaaccctgtctcttctaaaaatacaaaaattagctgggcatggtggcgggcgcctgtaatcccagctacttgggaggctgaggcaggagaattgcttgaacccaggaggcagagtttgcagtgagccgagatcgtgccattgcactccagcctgggcaacagagcgagactctgtctcaaagtaataataataataggaaagtgtttaaataaattatgatgcttccttattataaactattatatatccattgaaataaagcttttctggccaaacatgcaactgaattggtatttggtgccgcaagttaggttattaaccacagttcctttgaaaccatagagtttctcttacggccaaagaagctggggatctgctctggtcttcttatgtctcattttcctctgagaattaggaagctcccaggtggctgttacattcttagtgtacttcatgcctgtttaagaaatgctcaaacactctaattctcacagcctcagtttatattacaacagctgtactaagacttgaatcttcatcaaaagttattattcaggcatcatttccattgctcaagtatctatttaatttgagggttggaaaggcactactttgaatgaaagaaaattaacttagtggatagggaaacagatgaaggaaaatgctttctggcattgtcttatatttaaattaaatgcctttggacactgttgggagcacaggacccctgagctacgtggtccacaattctgtgggctaaaatttctaccaatttgtcatacaaaccttcacactgattcaccagaaaggcttggggagtgccattttgtagacatatgcacaagggaagccacagaaacttgttggatcaacctttggttctgtcacttgatgactgctgtgatttcatatcctgtttgctccactggcacacagccattgaaaataggcatatttatggtggagggtataactttcaagtaggcagctcatcattttttatggagaagtatcaatattgtggttggacctcttactcacagcctcacttgattttacgcaaaaacaggaagatgtagttgctaatttttaaacaacaaataggactcggatgccatttttactgccttctaatgtattttttgctctatctactgggtaaaactcatgacgaatagttcctgtggtttttttatcctcccaaatgcttttatgttgtagattcacattatatatgtaattagtgggtaggtatatttggggaggaaatacagttgacccttgaactacccaagggttgggatgccaaccccttgtgcagttgaaactctacatataactttttactccccaaaaactttactaatagcctgtttttgttttttttttttgagacaggatcttgctctgttgcccaggctggattgcagtggcacaatcatggcttactgcagcctcaacctcctgggctcaggcgatcctcccacctcagcctcctgagtagctgggactataggtgcatgtcaccatgccctgctaattttttaatttttttggtagagactggttctcgctgtttttcccaggctgggctcaaactcctgggctcaagtgatacttctgcctcaacctcccaaagtgctgggattataggcgtgagccactaccctactactgactggaagtcttataaataatataaacagtcagttagtacatatgttgtatgttgtatggaatatgttttatactgtattcttagaataaagctagagaaaagaaaatattaagaaaatcgtaaggaagagaaaatatatttagtgttctttaagtggaagtagagcatcatagggctcttcatcctcatcatagtcttcacgtttgggctgaggaggaggaagaggaggaggaggaagaagaggggttggttttgctgtctcaggtggcagaggagcaagacagtctgcgtataattggaccagcacagtttaaatctctgctgttcaaggttcagttgtattctttaaaagccaaaatgaccctcaggactaatgtgtctgagagagattttgttaggtttacctcccctgttcattcagatatttttcagcagatattgtagactcggattctttcattgacttttggttttataacaaaaaaagtattgtttttattttttcactgaggtttggaaatgcattagcatttcattctgcttgagtgaatgatagcagtcttatttcatacagtgtctttcagtctgtgttattgttagtttccatagctaaataataaagttatgttttggggttggcgaaaatgagaccagttttgttaagggtatcctaatgaatttgtcaacttagcaagggactgaataggcagatttgtaaaccacccatgagatgtcagtgtggagcctaccttaagatacagcaagtcaacactaaataagttgcttatgtaaactttataactagcttttaaacggtgtttttttttaagtttatttttaaaatgtttgatttggagatattagacattaggactgcatgatcctgagatgtgtagattaatagtaagatacagaatttattagtcatggaagagggttgcaaactcagatgaactcagggtgtagaggaataactaaaatgaatgagcagctgggacgtggagggcatttggaagtgaagagcggggagaagcgccaggaggtgcatgctcatgtggcgggacagtgctgcccagccccagcctgttgccatacagggatgcaagcctgctgatgccgtagcttttgatatttttttgaagaaagccataaaacaattttcatgaaagtatctaatttaaaaatactgcatggatcaagcaaaacacacttggaagtgagatagagtcattgggctgccagtttgtgatccttggcataggtcttgtatgtagtagggacttggtaaatgtttaaagaataagaagtgcttagaaaacagtaaagagcaaggtttttggttttttctattttcatagatttcccaaaggtctgtgaagtgatgatgaactctgtgtagaaattacctggtacctttttgattgggtttaatgaagcttgattgggagagtaatcatgtgaagcatttcattttaaatatctttattgctatacaatgtatttgagtcatttactttcatgaattagggataaaataattgtatttcatatcctttgcccactttttgattgggttttttttttcttgtaaatttaagttccttgtagaaaaagaagacatacagccaagaaacatgaaaaacagctcatcatcattgatcattagagaaatgcaaatcaaaaccacaatgagatctcacgccagtcagaatggtgatgattaagaagtcaggaaacaatagatgctggccaggctgtggagaaataggaaagtttttatactgttggtgggagtgtaaattagttcaaccgttgtggaagacagtgtggggattcctcaaggatctagaaccagaaataccatttgacccagcaatcccattactgggcatatgcccaaaggaacataaatcattctatagaaacgtatgtttatacagtaaacacgtatgtttattgtagcaccatttacaatagcaaagacatggaaccaacccaaatgcccatcagtgatagactggataaagaaaatgtggtacatatacaccatggaatactatgcagctgtaaaaaagaatgagatcatgtcctttgcagggacatggatgaagctggaagccatcattcttggcaaactaacaaacacaggaacagaaaaccaaacaccgcatgttctcactcatacgtgggaattgaaccacaaggacacatggacacagggaggggaacatcacactcctgggcctgtcgggggctggggaataaggggagggagagcactaggacaaatacctaatgcatgcggggcttaaaacctagatgatgggttgataggtatagcaaaccaccatgggacatgtatacctatgtaacaaacctgcacattctgcacatgtgtcccagaacttaaaataaaaaataattgcatttcagattgttaactctgtttttctttaattgatgcatttgctgacctgtctactgtatcctttgcccaaaggagatgcagaaactaccagaggccgttcagctaattgagaaggccagcatgatgtatctagaaaacggcaccccagacacagcagccatggctttggagcgagctggaaagtgagtgtgagatggacaagtctctgcatagaagtcttgtctttttgttttaaagaggtccctgaaaaacaagttttccatttctcatataagacatgttttcttgtctgattcaggcttatagaaaatgttgatccagagaaggctgtacagttatatcaacagacagctaatgtgtttgaagtaagtttgaatcttatttttttctttaattacttagaatgtttagattaataatatataggaaaatagagaagtgcagtggctacttttaaaacttttccctgctcacagttgcacgctatttcttttctgttagagagtagtgaaatgaactagcagctttcgtgttccccccttgatccagtgccattacttctttacaaaataaatattaggggataaaaacatttcaacattaaagcagccaacacttgtttttctttgattccttcagaatgaagaacgcttacgacaggcagttgaattactaggaaaagcctccagactactagtacgaggacgtaggtatgtctttaaaaactattgctgtgtgtttaactatactttgaatccacatttggaactggaaagtaatttgggggatagcttgttaattttttggtataagctgtagacacaccaggccacacaatagaatattaacatttactagacagtaggcacactgaattagatattaaaagatctgctgttttttgaaagtgtaatgcccaaatttatcatgcactgtgcttttattggttgaaccctggctcagcaacatgaaagggaacagtttccttcatctgttacttggttggattataatatctctctcaaggaaaaataagaatattaggataaatgacaaagatgcataaacactcacccatgaaaactgacaggttcttgacaaatagtgtcattattagaatatttaccttgttatcgtttcacatatgacctgaagcacaaatagttgaacctcagaaagctaaaatcctattgggatttccttttgtttttttactttatctcagtttacttttagtaaacaatttttttcattaataaaattctgtctcaataatatttaagataaacatctctaggagattgtaagtctgcagatatcttaattgaaatttgtccaaagcttcccagtaacagaaaacacccaagatccatttaatatgtcaaggaatcaaaatagaaatgactgatgaatctatcctatctgagactgaattaaattttttcttcatgaagactgcagattctgaaatacaatttaaaccggtctagagtaatatgagaataaattaatctagaattaactattaaacaatctcatttagattaatttgtttataggaccttccttcactgaggagtatttttttgtctaaatggaatagaaatttcattttgtttttaaattaggactttaatcatgaaggaaagtttaatttaaatgtcagtccggggtcattatctttattcatcttattacttactcgtcgcttcccagaaatcagtgaatgaaatgctaactctgacaaatcccaacttaaaaatggttcactttagtttctgaaagtgtttgttacagcagcagagctgttcttggtgatggcgttatggctgtggcaaaatagctgaactgtgaggtgataccaaggttctgacttgtgagcaggggccccatgtcttagaaacagtgtccttcattcttttcagggcagctaggaggcaagttttagcatagtttacctcctttctcttctgttctcatctcctgatgctccccgacaagactcccagtgcctttctagagcgctaagccccttactataagaccccatggaaggtgaaggaagtgaagttgcaggaaggggcagaagttaaggacagccctgtgtgaaagtccagactgcatcagctcccctgaagtatttctgctttccacatcttctttccttttgtttctcaaggtatagattatctaaagctgtgttgtagagggagtagcaggaaaggagagaggccaggatcttttcgggggaggtcagatgaggaacgttttccagctgcctgtgcatattcctttagaaagctccactagggatgggggccaccatcatcctcaaaacattaccagtgttgccagtcggtttggacacatctgatgaaagccattgttttaaagcaattactgtgttaaattcttcaaagcctcagcagaggggagaatgctagttgagtgagcagcagaagtgagaatgctgcgtagatgtgctcaaagggcacatttataaatccagggcttttattcgtgactttgttttattggttttttttttttctttttaggaaaaatgtattttaaaatggtactttctactgtgctcaacaaaaatgttatggaaatatatttttgaagtgtattaacaatataaaaattaatttaaatttgtgcaggaacatgaaggaatttgatcttttgaaaagtgttgctgggtatcttggtatgaaaaaattaagtctactgtcatggtacttctattgggaacttaaatagtgcaggataagaaaaaacatgcagtgtttatagtgatggagacattattgagatgatttatgtgataattgaaaatattaactatgtgcttagattattatttgattgcatctgttgcctaaaagaactaaacaggtggtaattttatgcttcacacaagcaacatctactaatagactgtgtggcatggagtctaaagttttatgtttgttatatttagttagtgcacttatgtttttacattaacatgagtccataagatgtcctaatttaatactttctatgttagtgtagcaaagaatctatttaatatattaatctcttgcttctccttcagttttggagagtcaaaattcagaagtgattcgtagtttcatttagattacatctgggaaaagtcagtccaaggccagtgcccttgttcctttttagaaaaggcctttccaggctgggtgcagtggctcatgcctgtaatcacaacactttgggaggctgaggcaggcagatcacctgaggtcagaagttcaagattagccttggccaaatggtgaaactccttctctactaaaaatacaaaaagtagccgggtgtgatgacgcacacctataatcccagctactcgggaggctggagaatcgcttgaacccaggaggcacaggttgcagtgagactcccatctcaaaaaaaaaaaaaaagaaaagaaaagaaaaaaagacctttccagcaagttgatcatgaccttgtgcctctgagagaaggtctatgcctctgagacaaggtgtgtggtctcagtgaacccaaatccctcctagaagactcacttagcaaagaaaagagctgcttctcaccagttgtctgagacagtcactagatcctaaacacaaggagggttgggtgtgtatatgttcaggggtgggatgtgtgctattaaggagaatcactgggtttctgtcttgcataactgttctgtccatggtgccatcaataactgagataaggaatatagaaacaaacttatcagtgatgataataaacttagctgggaatatgacacataaactaaacatttctgtaggtagttaaaaataggttttggagttcaggaaatagttggggccagaggaacagtttgagttgtggtgtagaaggtgtctgttgaaagcttggggatgaatgaggttctgtgacagttttctgccatttgcacataacttctgtggggtttcaattttgttacatttggggaagataaaaacaatttattcttttttcagcaaaaccaaattcttgtcattttgttaggaatattaagtattacctgatggaaaagttgaaagcatctgtgtttcattataataagtaactaatacttttctggatacatttaaaaatagatggctttgtatgctaatttcatggccttttagcaaagtcgatcaactttttcgactacaaactcatgtaagggcttggctcttttgttaggtaactatatattagcacatagaaatgctaatattatgtcaaggaaataaacagtttatgcgtaaagaatgcaccctttatagttaaatatatgaaaagtttaaaatactgagattgctaatagaatgatataatctagacacgacgggcacagaatattctgaccataatttattttataaaacaggatctgttataagctcagggtcacaattataaatgatacagatacatgtagctgtagtccgccttgcattaattttttatttctgcatagcagattgctacaaacttagcagcttaaaacagtactcactgattagctcacagtttcatgaggccagaagtctggatacagtgtagctaggtcctagtgtagctaggtagcagagctagggtctcaccaggccgaaatgaaggtgtcggagggggctgatctcaccggaggcttgggtccttttccaagctcattgattgttggcagaattgatttccttgcagctgtgtggaagagattcctgttttcttgttgcctgttcgccaggaactgctctcagctttgagtttgccttcagttcctggccgtgtgcccccattggtggttcacagcatggcagtttgctgctaattcgagacatcaggagtactctggcctctaacttaaggaagggcccacctgattaagtcaggcccacacagacagtgattcactcgaagtcagctgatttgtgtcctaatcacaggatggcccatcatattccgagggtcacacctacacttaaagggggattatagaggaaatgtttacaaggggcaagaatcgggagcactcttagaattctgctaccaaacccagcttataaattgactttgttccaaaaatttatcaagttgacctgtggaaattcagaatgcatttctcctatgagtgtcattttataaggcactaagttgccagcgtgcatcccataaagattcagtttaactcatgatgtaagtagccataatagcataagccaagccactgtgtgtgtggtgtgtgtgtgtgtctgtgtatacatgccactatttttaaaaagataacatacaggctgggtgcggtggctcacgtctataatcccagcactttggggggctgaggcaggtggatcccctgaggtcaggagttcgagaccagcctggccaacatagcgaaaccccatctctattaaaaatacagaaattagctgggcgtggtggtgggcgcctgtaatcccagctactcgggaggctgaggcaagagaatcacttgaacccgggaggcagaggttgcggtgagccgagatgtcgccactgcactccagcctgggcaacagagtgagactccgtctcaaaaaaaaataaaaagacagaaaaatagagcatatagcataacaagcataacatttttgtatttttactttggtttacaataccacttacctccctttgaatcccgatagtacagactcttgccccttttggctgttggttgtgtgtattcccaatgcccagaccctggtagtttctcccataaccgtggactgttattgggatgagagcagtggctaaagactgtacatttcactcagtctcaagttgtactactgagggagtcctggcatttggagtatactacagctttgcagggaggggaggttcaattagggtttgatggaattagggctgggggaatgagaaaggggtaagggcctggagggtttgggggaaatgttttggtgacccctttccttgctttcgtcttcattctgccattgggcaaaatggaagaaaaggagaatgtatgagggtcaatggaaaagatgaatgttgaagactgaagatgcaggaaggcttttgtttaggtctctaacttgcctcccctctgctgcccttttaggcacctcagagcttgctagggccactggggcagcagcggagtatgtgatggagggacacagtcgggggaaggcaccgagtgccttgggtgtctggatgttctttcagtcgggaggaaagaaatcttgggtgatttaatcgaagatcgtctcaagtacgtatcacgaagaagtcgtgacactcgctattggacagtccttactaagcttaaaactccccgtttgacctaacccatccttgagttcttttgctttttctgtcagcgtgcagcctgaaagtggggagtcagacatttgaaaggtaagccagatgagcagagcatgtggaaacctgggtcctggggcagctgctaataatacctgtcctcctggtgtctctacaatctatgatgtcaagtacatttcacaggggacctctgctatagatcatttagacctgctttttttacatttctgtgttttgttttaggtttgatgaggcggcactctctattcagaaagaaaaaaatatttataaggaaattgagaattatccaacttgttataaggtattctttgaaagtgtttgtttttggtattacattagatgattttttatactggtatgaataagtacttaagaaaggattctatgggtatttctatgtttttgtaaaataatacttcatgggcctctatttttgaccaagatagagtaagcccactacagcttgtttctctgctgattacagctaaactactggataaaatacaaaagcaaccacccttgaactctgaaaagtaaataaaaagagactaaggagaggagcaaacacgtggagaaacaaccaccatgggaatgagtttctcgggtttttttccatttcctcttgcagcattcattgccctgccctgagagaagcccacagttgtggagctgggcagcaaaggctgcaacaatgaaaactccaaaagaaaccccgcctttctaaccagcaatgggagaagaggtcccattgttttcctctcctttggctttgctccaagcttgtcccaggcatggagctacactgtgatgatggctcaggttgataaaactccacaaggaccccagtctcttttgccagaggaactaggaaaatgagctagagagcaaggagaaaattccggaaaggagagagctggaaacggagtcccctgagtgtggatgtggcccacacaagtcttgggtttactcttcagctgtgctgagacaggcctcaaagtagcagtgcagcgcaaagcttggagagctaagatttcatcactgtcgaagtgttgcactgccctctgaagggcttatgcatggaacaggcccaaagccacatagcaaaggatttgaattaagtgtagaacttccatccaccaaaaacaaggcaccacatgtagtctgaacctaactggggtgattacctgctgaaaacatctgtactctcctgaaaattaagcagaggctgtgcagcatcacattcacagtacaatccagaattactcaacatgcaagaacctggaaatatgaccagttttcaggagaaaagacaactgatggcaacccggcagtgaccagggttgttggcattatcacataaagactgaagcaactataagttgctccatgaggtaaagataaacacaattaaaatgaatagaaaagaggacctgttgttttttataggaaaaattatttttatagaaactataaaaatgaactaattgggaattttaggactggcaaatacattattgaagtaaaataattggataagcttaatctcagagatgacagaaggaagactttgtgaacttaaagatagatcagtaaaagttacctaaacaatagagacaccaaaagatggaaaaatacttcatgaagacctatttttccagtaatttatcagtcatatccttgatcttattactacttttattgttgacttatcaatactatcattgtttctgttatctgaagttttcactcatacatctttttcctagtttctttttaaggattctaagtatcattgtggtgttacgggtcccccccacttcttttttattcacttttcaagattgaatctgtgtagatatttgaaagagatctctttaaaacgtggttgtgatctaaggcttgtgtcaaagtgcggtccccagaccagcagcaggagtgccccctggaatttgttagaaatgggtgaatcccaggcttgcccctagcagccaaattccaggacatgagaattggaaaagtactgttctaggatatttcccctcaggtgtcccgtggaagttactatagcatttataaatctctgtttatacaaacaaagactctgaaagttaaactccaggtgttttcaatactgccaggttattgactttattaaacagatgtaaatttgaccatgatcctctcttttgttttagaaaacaattgctcaagtcttagttcatctacacagaaatgactatgtagctgcagaaagatgtgtccgggagagctataggtaagacgttgtctgggccctcttgacttgcagtggcgacacctctgtgtctacaactaagattgctgctaggacacatgttcctggccatgaaactgtcatttctaaatcttaggagtgctcatctaccatttcatcttttacagtgggtgttttacaccttttttttttttccctttcctgtatttttctctaggggacctccatggaagtgaatgactttagtcattttagtcattttatttgccttctaagaaaaaaagaacaagaaaaagggggaaaaaattatcagatttatgttacagaaatcaaaatgaggaattttctcggtgtttaacatgagcagtcttaatctcaacactgttaacatttgggctggataattctttgtggtcgggcctgtcctgtgcactgtaggctggttagcgggatccccggtctctgccctctagatgccactagcattcccacacttttaagtaccaaaatgtctccagacagtgtcacatgccaggggcagaatcatccctgcctgagatgtgttcttttaaggagaaggtgaagacgtgtgatttgtgcttactgcagcatccctgggttcaatggcagtgaagactgtgctgccctggaacagcttcttgaaggttatgaccagcaagaccaagatcaggtgtcagatgtctgcaactcaccgcttttcaagtacatggacaatgatgtaagtggacccatttgcatagctttcatcttttctcttgaaagaaagaggtttctagtgagattattttttacccatgtacttaagagattttttcctacctctttttttcttctcaagctactactcataaggaaactgaccacttgcattgaatttcaccatagatttagataaaatagatgttagttgtgtggtgtatagccatttactcacccatctaactctgttgaccatatacatattttaaaattgaggctcatttctccacttttcctctatctgttgtcctctgtaggttgcttttattcatttcttttagacggactctctgaaagaggtccattctgtagtggcctttgtaattcagtagacctatgaaaatctgtgaggactagctgtgtgttgcaggtcattaattatctctaagcctcagttaattcatttgtaaaaatgaagccactagtacctgtcttgctggactgttgtgaagaatacattagtcagtgtgtgagaaatatcctcacatgatgtcttgcacataaagtgaaccatgactataagtttttattttttctcatttgtctttttcagtagatttgtaagtacctgtttggccttaggcctttagagtatcatcatagtatcagatcaacttaaggccttcagttgtttattataatgatatatgtagataattttttttctaaataacgtcttacataggttttgaaaatatatatatttctaaagttttaattaaaaaaaatttataattgaaacttttactagttgtgtacctgtcccaccatggtcatgaggcatctggggagcagcattgttgggctttgtttttccatctgaatggtagaattggtgttcctgagggtggggagccaggctgtgtctttttagagctgagtaaaacatgttaggattctagttatccagcttttaagaacatgttctgttgttgacagtatgctaagctgggcctgagtttggtggttccaggagggggaatcaagaagaaatcacctgcaacaccacaggccaagcctgatggtgtcactgccacggctgctgatgaagaggaagatgaatactcaggaggactatgctagtattttgcttgctgaaaagaaaagggaaacaaaggtaaaatcctgacatgccatttcaaggacttgggaatagattagggatatccgtacttcattacagtcatgattttggatcctaataaagactagtttttagttaccatcttcccaaatcactcattgtatccattacctgtgaagcatatctttttctttccataagagcttttctaagacaccagcaggaattaacagaaaatgtactgtcatgttttaatacattgattaaaaaatttgcaagccaaattatacataaattatgttctaaacaaaaggggtaataagcataggtattctctcttggacacttgtaagttactgttagtgaattgttttttacgtttcatttaataattgctgctaaaggtgatgtttactgataaatcattttaaaatttttttgttttgaaaagtaaatttatcccccatgatgttagatacatttaaattattaagtcttttcagagatgagatggggacaggaagttattttgagccttacaatattatttagcccaataaaagatgcattgaagctcttatatattatgagtttgaaaaattttgaaggtagcatattgaagtgatctataaatatcttcagtcctctctgaagtgtgggtatttcttctatctaaaaaatacatacagtgactgtcttcaaatctacttggttcttgaccaaataggagctaatgggtaatgaatacctttttgtttgtttgtttgtttgttttgttttttgtttttttttttaagggtctcactcttttgcccaggctggagtgcagtggcacaatcacggctcccaggctaatgtttttatttttaatttgtaattttttttttattttttttgttgagatggagttgctccatgttgcacaggctgttctcaaactcctaagctcaagccatctgcctgccttggcctcccaaagtgctgggattgtagacataagccacctcacccagcctatgaatatctttctaacattgtaagaatgaggtaatgtttccatcagtctaatacagatatatttcttccctccaaaacagtttattttgattgtttattttattttgattgtaactccgtcataacttgacatggaaaatgctatatactatgaaaacttagctgaaagggaagaattgttttagaaagacaatatttaaaacaccgcactgccaatatattgatcctttatagttatttcctaaaatgctgttttcgaaacattcctttttcaccctgttgtgtggcttagacccatctcgtaatctgttaattggaaagaggctacagacaccagcagtgtgcgttctgcaggtacacgctgccaaagtaattcctgctcatccatgccctgtctctgtctcttttagagtcataccttatttgagtataggttgcttaattttgctagacttcctgaaaacactaaggtggagtatcagaagtgattttagtcacagttctgcgggagagcttagaataacatcctcctttgggaggtggtctcgggtgcgtggatgttggtatacagtctttattgtaagtctgatacaaaatgctaataaatttaatgtttttcttccttaatttattggcatagttcttcaggtagcacctcatttttattaatgatattgggattaactatgaacaagctatatgtagacatttgcatttaaggacattgcagtgtttcaaagatcccatcattgcagcttgtatcctttagatccaatcggaaacttctggagtcttacattaatgctcatttgagctaattagtaatctgtttaaacagatttggcaatactttaaagatactgtagactatttatgtatagatagatcatattacccattaaagtctgggggaaaaaattttttaattttactcttcttatgtactgaaaactttttttaaaaaaggtgatgatgaagtgcattctgtagcagcagcgcagctatgctttaaaccacacaaaaggctgtgtccaggtgcagcctccttcacccttcctgcccacggtgaggattgaataaccaggacttggggatattgtttgttgtcagggttattctgtgtggtaaggaatatttgtttcacatttatacattttctttttccactcacgtaagtttctatcttgagagcatagtccaaagtgcaaaacttggtgtttacaaggaaaattgtcttccagaactccactgtcatcactttcaccaaagtggaagtttgcatgaatatgctcagaatctaatattcaatgttctgttacattgtaagtgaagtccagctacaaaatagatttaatatattgaatttatttgtacatatgcagagtacggtatttctgtatggaatctgctttattcctatttttcccaactctgatgagtagaatattaaatgtgttgttatggaaatacagattattgcttctataggaagataattatgaaaataaaacctgaaactatataaatataa

SEQ ID NO: 736 - DNA, 32744 bp, Homo sapiens
  source 1..32744: mol_type = other DNA
cgctggctgcgggcggtgagctgagctcgcccccggggagctgtggccggcgcccctgccggttccctgagcagcggacgttcatgctgggagggcggcgggttggaagcaggtgccaccatggctagtggcagctgtcaggggtgcgaagaggacgaggaaactctgaagaagttgatagtcaggctgaacaatgtccaggaaggaaaacagatagaaacgctggtccaaatcctggaggatctgctggtgttcacgtactccgagcgcggtaatcacttgaaaataaactgtgcttttatttttgcaaactttctccccctccttacatttgcaaattttgtcctcctccccttgaccctgctcaaacccggactcttaaggagccgcaaactcccatatcctttccttagggcagaaagcagctgagaatttcaggaaggtcttcacctttttgacttttctccccgtttcagactaaaaaggagagggggtgctgtggattgtgactttgcttcttttccccacccacttgttttccagcctccaagttatttcaaggcaaaaatatccatgtgcctctgttgatcgtcttggactcctatatgagagtcgcgagtgtgcagcaggtaaaggcattgttttcacttcaactcattctcccttctgtttggaaggagacgttttactggcaatgttaatatagccgagagttcttggttattcccaaaatttggcttgaggaacctctgactgtgattttaagatgggaatattgttaaatcattacgcaatgtaaacgggatgaagagccccagtatgtgttccctgagtgtctttaagaagtaactttataaaaccaacagtatggatggtggtagaaggaggataaaaatgggttcggttttagtctcgttattggcaagatgaattcattagtgtttagacttgactattccaagtatcttcccaatacagagcatgtcctagatgagaagattatgaatagtttggaaaaggggaataattaatagtgataaaatgcaactttgtcactagcaaactcttgtagagttcagcactttttaaaattcaaagatttctagcctttagttgtagtataccttgtagtatctaaagaaagtgatgtcttatgagaccctcatagtttgcaactgttgtcatataaaatgcatgtagaagtgaaacttttacaatctgtaccataggaaacccagaaatttgctatgtatcttggatttttttttaaagggggccttaaaaatggtaattaagaatgatttacagtcaaaacaaaattataggccaaggtgataacttccttcggagcacttagagatttggggaactgaaatcagttttgtcatctgcatgttaactcatgcagagaaagagaattggactttgaactccttggaggtgcagtcagaaagccaatgtttcttaatggttgagaggcttgacagacatgaggcatctcaatctttaaagtggtgtgggtctatctttatcttgatgtttatctctgtatctagctgtatctagtctgggtgaaccatctagcttctttgatatgaggacatttacatctggaagaaatattttaatttgttttcaactgtgaaatattttccatctgactattatagattttcacgctgctatcaaaccaaaccaagaaaagatggaggcataataaagatgctgttcttttaagactcaaagtcggaattttgcctgtggaatatgagtcactttttgggcactggcctattgtgcttcctgctctgcacccacgtcatcccttcttacttgtctctgctttggtgttcagaagtgcctgattctggccaccttcattccctagactctgtacttgatagagtcactcctgcttgatactgctcaggacagtcagatcctgggtaggcgttttggtctgcagggtctagataaggcagtgctatacttgacaacccaggggagcctggaacatacttcctaattcttaattttagaaattgcccaagcctgagcatacttgtccggagtagttatgagtgtcacttagtatttctgcctagagagtaccagaggcaaagtatgctggaaaataaggaagagtttttttaaaagtaattaattacttttttggatatatcatagttgtatatattttggggatacatatgctatttgatacatgtatacaatgtgtaatgttcaaatcagggtaactggaatatccgtcacctcgaacatttttctttgtgttggcaacgttgcaatttctttcttctagctattttaaaatatgcaatgaattattaaccataatttccctgctatactattaaatattaacttaattgcttgtatctaattatatttttgtacacattaaccaccttctctttatccctccccatcctttcatttccagtctctggtaaccaccattctactctcttcctccatgagatccaccttttccgctcctacatatgagtgagattatgcaatattttatttctgtacctggcttatttaatttaacctaatgacctccagtcccacccatgctgttgcaaatgacaggatttcattttttatgactgaataatattccattgtgtatgtataccacattttcttttatttttagttaagtaattaatttagagacagggtctcactctgttgcccagactggagagcagtggtgtgatcaaagctcactgcaggcctgcaatcctgggctgaagtagtcctcctgcctcagcctcccaggtagctaggactataagcatgtgccaccatgctcagctaatttttttttctttttttactttttgtagagatggagtcttgctatgttgcccaggttagtttcaaactcctgacctcaagtaatcctcctgcctcggcctccatattttctttgttaatctgttgatagacatataaggtgattctgtattttaactattgtgaacagggctgcaataaacatgggagttcagatatatctttgatatactgatgttctttttttggatatatacccagcgatgagattactggatcatatgaaaattctctttttagttttttaagatacctccatactgtgtttcatcatggctgtgctactttatattcccatcagcagtgtaccaccattcccctttttctgcatccttaccagcatttgttattttttgtctttttgataatagccattctgcctgtggtgagataatatctcattatggttttgatttgcctctccctaatgattagtgaagtttaggatttttttttcatgtacctgttagccatttgtctgtcttcttttgagaaatgtctatttggatcttttgtccatttaaaaataagacttttttttttttttttttttttgctaattgagtttttttagttccttatgtattctggttgttaatcttttgttgaatggatattttgcaaatattttctccctttctttatgttgtctcttcactttgttaattattttctttgttgtgcagaagctttttagcttgatataatcccatttgcctatttttgttgtaattgcctgtgcttttgaggtcctaccccaaaaatcattgcacagaccaatgtcctgtagcatttccccagtgttttcttctagtagttgcatattttcaggtctgagatgtaagtctttaatccattttgaaatgatttgtgtatatggtgaaagctgtggatctagtttccttcttttgcacagccaatatttgattctcactgaaatctcactgccctcctggaaatattaccggatgttttactgtcatagcgaagtgagagtaagctgctcactgaggatcaaagagcttgtgacagacctaagactcaagtcttctcacaccttcaaaatctctttccatcatacaatctactagctgctgaattcgcaagctttttgtgcaagctagtaaaaagcaaaatggtttgatacaaatactgtggccatgctaggtacaatgacatcaatttaaattatcattggtcttaacaaggggatgtagaaaggggtctcctactgacattttaatactcacttaaaagtagtatttttccttcagatttctttatattattagtataattactgtaagtatcctttactgctttatatgttgaattagctggaagtgccaaaagaaaaactcttaatgataaatttaaggtattaaggtaaatttctccttcatttaatttaatagtaattcttaattactatttaaaataaagattaaggtttgtttctagatgccatttaacatgatattccagactgccagttttattttcaaagtttgtttcatattttattaatgtttcttcataaatgacagtctttagaaaattgacggttaagctaggtgctttatatttttcttttcctgcctatcttttcactgtgctcctaaattttacatctctttattctcaagggttcaacctttgaagaaggggagcaaaataaatgaaagtggctaaaattttttctttaacccctagactctttcctgttgtgcattaattacatgcttgagtttttagaataattataataaagtaaaactaccaatttaattgtattgtaactgtgcaagatgggaaccttctctcttagagagataagcttttaattgaatagattaatggatcaattgttacctctgctttgctgccagagattctatttaatcacagaagttccatgtagtgctggagagctcagttgcctgaatctttttgcaaagcgtttactgatactgttgcttcaccaaccaaaacaaacaggttttttccttgagtcagctttgtaggtacagagatgagtttggcatcctatgtgacttttttttttttttttttttttttttttaccaccagaagctgttcagaatgttattttcttaaatagttcggaaaaaagtcttgatgtattctatgaaagcacaaaaatagtcagtttctatgacagctggattgtcaacgtctgttcagcttacgtggaggaggatgtcctacttgagtagtataggtagaaatagctatcagaaattgccgcctttgaaagcaatttgaaattatgtaaaaggaagtaatgacaaaataaagcaatttatgtttaatctggaaaagatccaaaagtaatattgtaaagagatcttgagtaatcatttttatcttcctaaaatagccgttgtttactcccgtaagcgagtaagaaacttgtgccattattccttattgggtgcatatagatttctcaccttgtcattcaactccttgcaatattcaactttacttatgcatccagccttatcccaaaatagcctcttccctgtagcagcttccttatcatgtagcagcctactctcctcaccgctcatccgttcttatacaatctggcttaagctctacctcttcatattatattcttctctgagtaatttcaactcacactgagtcttactttcagtatttctattatattggtatttattacacatcacacttagatacttttccattagtctctagagggtacatatatgcactttctctttttttttttttttttgaccatgtcaagtatagttctatagtataatagaatgaattggagatcctttacatttagagagggaggagtctacagtaggaagaataggttaattttcatctccggtttgaaatcaggactttcaatttttttttcagaggtaaagagcaacttagtcaagttggcatcttgtaaacagactgagtgaagatatacttaaaatgcatctataatttcatattttatttcgaaatgtgaaagagcctactaggggtgtctgtgatctctagaccttatcaattcattctagagaaatctggagggagccattgaggagttctacctcctgtctattttatagagctctttctctttttctcctatcagatgtagattcaattgctaaaaatgccacgtttcttgcctctattattctagcttcattacttggggagcagccattctgataacttacattttgctactaaaatctccaacttcacctaatccttcattataagccacttcattttttcctataattaaaattttaaatatgtggaggaaattctgtcaggtagatatgacttaaaacctactaagggccaggtgcagaggctcacgcctgtaatcccagcactttgagaggccaagtcaggaggattgcttgagcccaggagcttgagaccagcctgggcaacagagcgagacccctgtcttcacaaaaaaaaaaaaaaaaaaattagctgggtgtggtggcacatacctgtagtcccagctacttgggaggctgaagtgggtggatcacctaaggacaggagttctaggctgcagtgatctatgattgcaccattgcactccagcctgggtgacagagtgagaccctatctcaaaaacaaaaacaaaaccaaaaaaaaaaaaaaaacaagaaaaaaaaagtactaaggatctggtatagccattcttgcacttaataatcttggtacaacctctaaaactattttttatagtttattttattttgccttatttagacaattggcatgtctatgttcttcataatttagaaattatatgtatttatatatataaattatatatattatatattatgtataaattaaattatatatatatataatatatatatatttgaaatggattcttgctctgtcatccaggctagagtgcagtggcacaatcttggctcactgcaccctctgcctcctgggttcaagcgattctccttcctcagcctcccgagtagctgagattacaggcgcccatcaccatgcctggctaatttttgtatttttagtagagactgggtttcaccatcttggccacattggtctcaaactgccggctgaaatgttgtattttttgtatgtctttctggtatgatttttggagaaaggtgtatcctaagaatacggcttgcttttgtttctgggtaagcattttagggtatcattttgttgtataaccattgtttacaagtgagataagcatctattccactaagattgaagagattcatgtttgactgagtatgctctattaacattctttaaaacatgtgaatatatgtctttcttgttttcaggtgggttggtcacttctgtgcaaattaatagaagtctgtccaggtacaatgcaaagcttaatgggaccccaggatgttggaaatgattgggaagtccttggtgttcaccagtaagtatgatagatatgtaaaacaaatggccttgagtatttatttgtacacatgacaaccttcccttgatacactgtgtttgcaatccaaggctactcctgtggaattctttaaaatacagatatttttccttgagtcaatgatttacatttatagagagctttaaactcagaagtttgatttagaaagcaaacatttaaggtaacatgtcagaagttattattttaataatataatcatataattataaaactggttaagttgtagatttttgatgagtacttttgaattcaaaccatgaagagattttggcttttaataatagaatcgatacaaaccactagttcttaaaaaaatgggaactgagaaaagttagttctgtaagtagtaatttgaaagttgatgttctactgtctttaaatagtacatttatatatatattcctatatatacagtaagtttaaactatggctttcagaaagagttaagaaagaggaaattaactttcagcacatctgtagccaaatcttgatagtaattttaccagctatgtttttgcagtttgcagcataatggcttcttagatgagactacttccttagccatcattaattaagaaaatattttctcaagaagaatgtgtttccaggaaaatacattttggatagctttgtttcttgacagttaaaaaatatcttctaagctactgaggaggctgaggaaggagaatcacttgaacctgggaggcggaggttgcagtgagcggaggttgcagtgagccgagattgcaccactgcactccagcctgggtgacagagcgacactctgtctcaaaaacaaacaaacaaacaaaccttttgtcattaactttaaatcttttttatacctaatatgacttttctttatcacagaaaaggaaattgtgaatattttttggcttccaatggtatatggtttatgaaaatttaatttatgaaaaattttcaggtgtttgtattgctgatcagtgtcaagtagtgctataaatttagacaaattagagctatgtgtttgtccataagtgaacatgtctgtgcttatacattttcccctctttgacaaatgtgttgctcttcttgttttcagtacataaagggtgtgttttggaaagagcatatttacaattaattggagttctcgtcttcaatctaatctctgtaattctatgtatcagttctaaagtatacagcatttgatgaggaattactcaaaatataccagtaattaggaattgtaactttaaatgtcccttggtttgggtgataatttccaggaagtccaaagatgagccagtctataacctcagggagtgtttgggaaactcatctagtcatattcctgtacaaaccaactgttcaaattaaattacataaaagtttatgtaggaaatttcattcactcactcacttactcattcactcactttgttcatccagtcattcatcttctattcattgaatgtttttgaagcctgtcctctgggtcagaaaccatgcagttgtgaagaagatagacacactgctgtctccagtggagtgtattagatcactcccagcaaaaattgattgtaaaacagatttctcttttttcaaggccttttccctccaaagacttaccagtactgaagaaaaatttcttccgtggtaataaagtcaggaattgtgggaatggtatagggagaggtaggggcagggtgattaggaggaaggctggcagagaatcgaagactggcttcattcaggtcctccaattgccaaatggagattatgcaacgtttcttgaatacatacaaaactctagatgtggccagctcagtcttcttccaataatgtaaagccaaacaatgctttgcaggaatagactagagattatattttgggattaataacatagggattaaaatcttatcttgaactaactaaacattattgatatgctaaattcactttttttttttttttttttttttttttttagacagagtctttctctgttgccaggctggcgtgcagtggcgtgatctcggctcactgtaacctctgtgtcccgggttcaagtgattctcctgcctcagcctctcgagtagctgggactgcaggagtacgccaccacgcccagctaatttttgtatttttagtagagacagggtttcatcatgttggccaggatggtcttgatctattgacctcatgatccccccgcctcggcgtcccaaagtgctgagattacaggcgtgagcaacggccaccggcccactactttttaatatatcattaatttctcttttaaaaacagtagcaatcaataatttaaatattcaaatgaattcttaatttatatacacaaactaacatctttattatatctctatattttaatatatcaacatgtctaagataatttataaatttacatcatatataaaaatgggtttgctctcgatgtatataaggcttcatgatattttgaatatggagttgggtgaaaatagtgaatctgaatatttgaatttgaatatttattggaaaataagtagtgcttttaactttttaaatgagacacataatagtcccctgttgatttttttttatttttttaactttattaaagtatagttgacaattaaaaattgtttatatttaaggtatacaattgatgatttgacatgtgtacattgtgaattattcaccacaatcaagctaattaacattccctgttagtttttataagcctggttcaggtttgtagaaagaaacaaacacacatggccaggcacggtggctcacacctataatcccagactttgggaggccaaggcaggaggatcacttgaacccagaagtttagaccagcctaggcaaaatagcaaaccctgtctctccaaaaaagaatgaaaaaattagcctggtgtggtggcatgtacctgtatccctagcaactcaggaggctgaggcaggaggattgctcacttgagcccaggagtttgaggtttcagtgagctatgattgcaccattgcattccagcctgggtgacacagcaagaccctgtctctaaaagcaggcaacaaaaacacatgagcttcactacagggaattaaatacaatgagagtaataaaaaataggtgagcaaaaaaaatgcaaataagcaaacttttgagtatgatatttcattcttatcttgatttctgtttttaactccagattgattcttaaaatgctaacagttcataatgccagtgtaaacttgtcagtgattggactgaagaccttagatctcctcctaacttcaggtaatatgtgtatatgttttttgtgttgattcaaattaaaaaaaaagttgataccattaagtaaatgtgtgtgtgtgtgtttttttttttttttttttgaagatcaggattagggtagcttgatttaaatgtcctaaaattgcatctgtttttagacctagtgatgggacagccataatataatctaaatatcagttatttccaaaattctttctgtttccatctcttctccttatctcttttctctatactttgcctctcaaaaatctcattcaatacattggttttaaacattaccttatatattatccccaaatctctgttggtagtccgatgtttgctcccaaaatctggacctacatctcatattcccccaggttagtggtcattcctgcccttgccattattacttctttctccctatatatctttaataaattttctataatatatgttctggagtatgccataatcgttacattttgaaaacacatagtattacttcttgagtatttgctagatgccaggcttcacaagtaaaatgcttcacgtgcttttaaacacctgaatctgaaaacaccccttgagatagggattttatctcagttttctaagtgacaaacactgaagtgcagagaagttgctttggccactaagaggtagaaacagggtctgattctccatgtcaggttccttccctgagaaaactttggcctggtagataatggacctgaaaacaaaaaatcttgaaatgatgcaacagttgtgggcattgctgtgctggacactggctattatataaggttccgagaagaaaggccgctcacagggagctaatcttgaagggctgggaggagtttccttccatgtaggggagggctttttaggttgagagaagtatgggtgcagaggcctgggaggatagcatgagagaggctggacgtgtgattgggaaggtttgaattgtcctcatcagtcctgctaagagatgtaaagaccatgctggagaaagaggaagatgagagtatgagggaaaaacaagaaggtactcaacatttcactacagctttttatgaccatgttgtatggcatgcactaagagtctttaaccatgatttaatttaacctcacccttgggaggtattttttttttgacggagattcattctccatttggcgatggacaggaagatgagggtttattaatatgaaaaatctaccaacactggaatatattgaagttagcctcatacagtactactactcctattccagtattattatttttattgacagaatagatgctgtttgtgttaagttttggattatgataggaaatgtttggtatagtaaaaggcaagagtgtgacatgcagttagtccaagtacgaagagataccaaaaaaaaaatgtttagtgaggagcagagtttagcatatttggagtgaagacaatgtgcggaaggaaaggagctgatgagatacatgtactatagtcggttgtgtgaaaggtcttgtttttcatactaaggatcatgagaagatcttagtagattccagcaagggatttgcaagaccacatttgtgttttagaaatataatgcaggcaataaaccagttggatagaaattggggactgtagagcaattaagcaactgtttttgcattctagatgagaatgcaaaacacaataggaatgaaggtgccttgttcaaaaggagttttgttcaaaaggaatcttcaagatgtgtaggagatattcttaaaggacttggtaatgaattgatttgttgcttggatagagaatgagaagagaaaggagggtggaagaaggaagatgacttaggagtttctcttgggtagctagtggattatggtatcattgatgaagacagggaacaggagtaggccaggtttggggtaactgtggaatattcagatgttgtctaagaggcataagaatgtatttcagatgtttggggcaagttgtctaggctagaagtactgattgagactcatgaaattatagtaaagtgaactgggagtttatctcatttataaagatctagagcttgataagtctaacatctagggcagttaagtagtttatcaacaaacaaacaaacaaacaaacaagaaaaccatgggtctacaaaccattcacagtcttcatgtaaaaattaattcatgtaaaaattaacacattaaatgttaaagcagctctttactcagagcatattattctctttaaaataggtaaaatcaccttgctgatattggatgaagaaagtgatattttcatgttaatttttgatgccatgcactcatttccagccaatgatgaagtccagaaacttggatgcaaagctttacatgtgctgtttgagagaggtattttaaaatgtcaaattccttaaagtatatataagaaaaaaaggcttatactgggaaaagtagaacacagttataataagaagaaggtttctaaaatcctactatttattaagaagtgggagttgtctgtcaagggtgaggaatggggttaattcagaagtattgcttgttttggtggggtgaatttcattcgtgggttataaatcatgcccctggagtagactttcttcaattgcttaacaaggcataaggtttactttgaaaactggatgtgtgggtgctatgaaagaaaaaataaaactgtgaagccaagcataggttacactgggattatgatgttgagtcatcaccagaaatcatagaaattgcataaagagcctgaaggtttacaaagtgtccttcaggaaaaagactaatatgcatttcatagcctggccctgagattgataactgagattattatgtaattttagagttggttggagtccttgtttagtctttccattgaccttaggaggaagtgggtcacagcagtgaagtgagcatcctgcctgaggacacagagcttgtgacagtacagttcaattagcaattattttaagagccccttttgtatcattatgagagccaactgtgctaggggtttagataagaatgatttatgtgggccctgtgtcagttatcagtttaccagtctaatttcttgcagttcccagaatgggatagatcacctgataactgttgaattccctgtctcctcccagaaggattttaaacagcttatagataattataatacacaagagtaaacaaaatggatgagaaaataggtgaagggacaataatataaagctagattaagtttactgtgtttctaaggtcctgcatatttacaaaggggtgggccagaaatttgtctgtttgcttcctatctgacaaagaaaagaggtaaatatcagtggttacaaagttccttaagataaaagtaaacctattattcaggagaagcaattggtctcatgggagatctgagaaacatcttcccatgggttttcctggatgagacaataaaggacatacattttgcaaggaatacaaagtgtattgcagcgagagtgactctgtcaaaagtcagaatagcatgggcctggtacccagctctttgataatcatacaccgtgaagtagaagatagtttacagcgagtacggaattccttcaggctgtcatgtataaatgttctatcttgcaactaagctttcgatgacaattaggataaagtttgaggttctattgtcttgcagggtctgtaatcttctgtgtggaaggttaggggcacattcttcttcctggaaggagggctagcatcactttatcaccatcgttgtttagtccatctaagacactggaggtagaccatagaatgttacaaagaagaatgttgctcaatagaaaaaccatcagtgctgagagggttatgactataaatgtagagtagaaaaatttctgatttttccaggagtatcaggttctccaggactcaggggtgactataaagttaattttcaaaatttgaaagtgtactgtggaaactagaccataaagtgagaaagttccatgatattcttcacttgttaggaaaacttaactgatttcacattatattatagggacactctggcataaaattaaaaaaaatgaatgttgatcacttagagtgctgtgttttctaacatatttctggcgccattctcaagctagataaactataattttatacatgtttttcaggttgttgcccaataacaatgactccaaatggaacttactggcttgatcaaatgactttaattgtgaaaattaatgatttatatttttgctgtctgatggaaaaccactaagacagagtatttcaaagtctgattacttgccatttgctcaagttgacaactcttgaactgaaacatttagccgagctgcccttcagcagcctaccattaatgcctcccttttaaatattgcaatatgtccagttccagttggccatctttattagtcactgtcagttttctctagaatttcccaaatgaaattgtaaataattttgtttttctgagaactgcttgctgactagcacttttacatttcaaaacatggagtacctaacataggccgaaacaaaattatttgaatctccgtagcttgttttctcattataacattcttaggaagggctgcttcacagaaatatattttttatttaaggagattacacttgatgtatctcacacaactataatgaatattgtaatttttgaataattaaactttcatatcatctttaagcttattcagtattttgtctttcatttttaagtctcagaggagcaactgactgaatttgttgagaacaaagattatatgatattgttaagtgcgttaacaaattttaaagatgaagaggaaattgtgcttcatgtgctgcattgtttacattccctagcgattccttgtaagtagcatttaaatgttatttattttttgtatctgaaaaattacaatatatctcattctgagtatattttaacaatatttttattatttagaaacttgtggatgctcaacccattcattcatttattcatttaattaatttacattcactgacattatactgaagttggctgtgggcttggtgctggagaaacaatcgtggaaaatacagatgtgttccttaccttttcagagcttgtagtacaatgggggacacagataagtacagaggtgattacagtggcagaagtgatggcagatggcagaagtacctagagttaggagatcaaataggaagtgaggcagtgtctcttagcaaagatttaataagtggagcttcctgtgcatgaaggtgtgacctgaagtgagaatgcaggcaaagtggcccaggcagtgggcatggttaatgtaaagatgctggagcaagagagagcagactgccttcaagaagacaaaagtagctcagtaaaggtgtggggttatgagtgtgcgtgcatgcatgcgtgtgtgccgctgtgcatgcacatccccaaatatcctatccgtttgtgtttcattgacagaggcaagggagagcttgataagaggcagtaaatgaggccagagacatggagtggagagcatgaagggcctaaaaagccacatgaaggagtttgaattttattgtgactcttgattagcattttaatgaggctttgaaatttagccacatttttcaccaaaaatattaatcagaagaaattaatttgatgtgtatgctaccaatgattgctattaggctaaaataatggttcatattctgttttgttttgtattaatggttcatattctgttttgttttgtaagtgaccattaacactttgtattttatgtattacttgtgtgggtttctacaggatatacatatgcatttatctagtgatattttcatcctcacacatgtgaagttttgaggattagagttaaacaatgtacctggtatgtaataagtgttctaaaatcactgacaggattattagacaatatgtattttatatgtgtgttgtatactatatgtaattgcatttatggtttcagatatggaaatcactgtgtcaatctgaaggtgtgagccttcggtgtaggcagagtaaaacccaatgcccttgtgaaagaatgcttttttttggtgatgtttataaaatcacaatgttttcttatccacaggaaattaaacactggaaagtgggtggggctgaacaataatagagaaaggccatggttttacatttctctgagacatcactgccaacaaactgaatatgtttttcattatactttttccttggctatatttattcatttatttatttattttgggctggaggtttttggaatccattgttttccacccacattggacataactccagtaaaaatgtgttgattcataatgcaaaagtcaagaaagtagcagctaaaaattaagaaatcaaaagtttttaaaacactgattctaactgaaaaacatttgcttttcagtctttaagtctattgttctgagtcaaagcagttcatttccttacgttgttaattttttttctatgtttaagcattgtaatatactttttgtgaaaacagttgattagttttggttgtgccaaaacaaatactaaaatgttttgcaaacagcctttttttaaacaaaaaaagaacagttaacatttgatgcagagatatacatgttttctccatgtaggttcacacctcacttcctttattgattaattgctttttctggtagagtctttctttcctttctgttttacctgtgtttgtccctaagacttatattttaatattatgcctcctctctttcgttctcccatcttttcttccacctattttggagccttcaggaagcttgattttgctgccttgtacattggttgcccttctggaatggaggaaacaggtcatagctgattttaactgttccatctggtgacatattcttgattttctttcttttggttggggaaaaaaaaacaatgcaaaagtcattctccaatggggttgagcctcgttaagaaatagaccctccacaatggttgaactagtttacagtcccaccaacagtgtaaaagtgttcctatttctccacatcaaaaaaaaaaaaaggtaagcaatataacatgagccatatctaataggacttcagaaattatctatcctatagttccaggatgacgatgatgatggttgtgataatgatgaagattgtgatgatagttatatgggagataaaactttaagcactttacatattaaattctataatattcaccacatctattaaaatatgttacattattgtccctattttaccaacaagaaaactgaccaacaagattaaacaacgtgactaagttcacacaacctgtaacagcagaatctatgtcaatcacaacacaattagcagctatttctgtggcaattttcaataaagatgtgtctggaaaaaaaaaaaagaaatagaccctccaatttatttatctgaaaacttatgaccaatacattacatttccagactttcattttcagtacttttcctttcattttcagtactaaaagtactctgaatttttcctttttttgatcttaaggctttaagccaagaaacaggaataaagtaaattttccttaatgccaaagattagtcctacaccccattatgttattaatgaacagcatagtattttttacagctacttaaagaacatgatgtttaaatttggaaatgcagtcattatgctgccatctatttacagtctatataagacgtctttgtatgcatatttgaaaggagaacatggttaccttattgataattatgatctctttaaattcaggcaataatgtggaagtcctcatgagtggcaatgtcaggtgttataatattgtggtggaagctatgaaagcattccctatgagtgaaagaattcaagaagtgagttgctgtttgctccataggcttacattaggtgagtttcttagttaatatgtcatcacacactgtatgatatacatatacatataaaacatatatatgttgcataataatggataagtagcatattgacatactttgaatgaaaatattgtaaaatcccagaaaaaataaattaaaacaaaaagaaaatactgtaaattaccaaactgttctgctgtgcttagatggacttttaaaaggagtgtcaaaaatagatgtgtagaatgtaaaagaagtattatcttaatcttatttttatagatgtagttctatagatgagtttttttattgttgaggctatatttaaaatataattatgtaagaattgatacatacaaaaatatgcataacatatacaatataaagcataatgcaaataactcactatccaacttaaatgttgtatattcccagtgggggaagctaccctgggcttcttcctgcccttgctttctctatagaggttaacactatccagaattttgtgtttacaaatcttttgtttataaatatgatttactacattttcatgtttctctaagcaaaattgttaatgtttgcctgcttttgcttcatcaaaatgtaatcatactgtatgttgtcttctgcaattttcaaatatcagtgctatgattataagaatcagaaatatttttgcatgtggttgcatgtagtattctattatttggaaataccacaatttatttttccatttttctatccatggacatttggattctttcttattttatgctactactatctgtgttaaaacagataactgaaaaagaacagttaacatttggtgcagagatatacatattttctccatatataaataagggttaatattttaaaaaatatttatttgccattggtatgtccttctttgtgaaatatgcaatctgtcatttatcaatattgttcacaggatagtctgtctttttaaaaccgattcatagattctggataataatgttttggtggtaggttatacgtattgaaaataccttcccttgaacatcacactctggggactgttgtggggtggggggaggggggagggatagcattgggagatatacctaatgctagatgacgagttagtgggtgcagcgcaccaacatggcacatgtatacatatgtaactaacctgaacattgtacacatgtaccctaaaacttaaagtataataataattttaaaaaaaaggagatgaagaggtagctgcaggttgactgagcaagggtcattgtctatttgaagtttcaaaggtatctctgaaaataaacacagttttttgcaagagtgaaaaaaaaaaaaaaaagaaaataccttcccttgacttgtagcatgtcttttcaccgtctttatggtggcttttgtgatatagttaaatttaataatcagttcctttgtgatttactcttttttatgtatcttgtttaagaaatcttaatctgtcctttccctaagataataaatatattgtatattttattccaaatcttactcgtttgttaaactgttgcagtttgtttttgtaaagaacccaattccccctctttttttcagtgtggagagctagttaccatcacagcacaatttattagaggttcacctgtttcccagtcatgtggtatataaatatgtaaacatatatgcttatgtttctgtccttggcgttctgttgcattaatctgatttgtctgaatcagatttaaatctgatgttaaatataacactatttaaattaatagttctgtaagtcctgatatctgaaaagctaataggtcaagtcaccatacattcttttttaggcacagcttgccttttttcttgggcctttactattccatgcaaattacaggattaacttgtccagttccttggaaaacactgttgagattttgactggaattgcacaaaatatgtggatcattttaagaagaactgacatctttacattataatttcttctatacatgtcttgcacatcttagtttttgctacgtatcttattttttattattattgtaaatggtatttctttttaaatcatatttttgaactgtgttttcataaagaaatgcaaatgattttttgtatattgaactaacctacctttctaaactcttcgttaattctgacaatttgtttctaaatgcacttaagttctctacctagcaattatataatttgtaaataatgacagtctgagttcttcctttctgcttcttatattctttatttcatttccttgtcttcttacatgagtcagaattattaatatagtgttaaatagagccattgatactagacatccttgtcttgctctttttcctgattttaaacagaatatttttaatattctcccatccaaaataatgcatcttacaagggtttaaacttttaaaaaaaattttgttaagaaattttattttatttcttctttgcttttgttttttcaatgtgggcttttaaatgtttgcttttatttttacaatgtgggcttaaaaatattaaaatatttaattttatcaaatatacttaaaatgtagtaagtcttttttttccttttcattatgttaatatgaagaaatacatctacaggttttctaatactaagctactgtgcacttcctgataaatttaacttggtcatttattagatttttaaaaacacttctaaaaaatcttctctgtttattttcacatataccaggtgagttttggcagcctcttgttttttcttttttaccctttcttttttgttaaaaacatccttttatttatttaatgattaatacatggctattttgtgttttgtatctgataactatatataaagttctggggagtctaaaccaactgcttctaggctgactgcctgtcagttgcggagccttgttttcttgtatggttgtgagtttctcttttattgagcatcctgaggacttaaattaaagatgctctttcagaggtgtttgccaggagtcagagcacaggactgacctgggagcagtttaggatatgatccaggcttaatatgggagactctggttgagaccttaccttgcagagagtctgaaactggtttgttgaatgcagcgccaggattcatgctttcccacaagactactctggcgttcaactcacagctcttgtttcagcttctttttgaactccctctgcccctcaacacacaccttggaaatttccttgatatttttgtgaggacaacaatgcatttaaaagtgagagtggttgctgaataataaggaatgatcgttaactgttggacattgattctgatgacattttctcaaaaggataaccaggaatattttgtacaaaattaggattattataataggcatttagtttttcattgttacaaattttgaggaaaatcattaatcatttgaaaaaactaattgacatgtctccattgtagcaacttgtattttcacttctagtatcatgattatatcccctgtgtaatttggaaattgattttagcattaggaaatttcctagtttcagttaaaatgaattttttgtaagctgaattctattttacatgcacaactttagtttgttatttctttccttgacaagcatttattgaatgttgttatatgactaaaactgtaagatgataatgttttaatattttcacatttctttcatagcttccaaagtgtatatatatactcacatacttcatatatatgaatctacttatatactgtatataaaaatatgtatataaatatatacacattgtatataaatgtgtatatatatttacacatgtatataaatatacatacaaatgtatataaatatacatatttatacacagatgtatataaatatacatatttatacacagatgtatataaatatacatatttatacacagatgtatataaatatacatatttatacacagatgtatataaatatacaaatataaatatatacatttatatataaatatacatatttatacacagatgtatataaatatacaaatataaatatatacatttatatataaatatacatatttatacacagatgtatataaatatacaaatataaatatatacatttatatataaatatatatattttttgatacgtacaactatcttgggagatgggatattgttattatttccacatttacagatgaggtcctgtggttcatcaatctttgtgttttattcaagattatgtaagcagtaagggatgaaatcaggctgagaacccaaatttcttcatccctaaacaaagtatttcttctaaacatggtatccatttactagtttatctctatcaggtgaccctttattcattatttttcatgagaaggttgtagttgtacaaagtggctgatatctgataatgttttaatctaattcaaagtcgatttcttaaatccaggtgtcagagtagcacactactgtacaattctctgtttcatgttttacaatttaccacagtcaagttacaacttgcacatgttacattaaaatgtgaattcaccttaatttcttgaaatgagccagaagaagaagtggttttgttttgtgatcagggaaatgctacttgactgccaaattgtctagaacagcacattaaagttgcttgattttatactgttaaaattaaataaaacatggcaactgtcatgtcatatgtaacttttgtattattctgtaactttttttgaaaataaaaagtgatcaaattgatcttcaggtaaagaatcttttttctcttgattatctcttagtggatgatgatttgttccatttaatgggtagagaatttattgttgctgttattgtttcaaaagtagctgaatgaaactcttaactttttcttcatagttaaaattaaaacctcaagtaaataaatatttaacgttttgccaaactatgtaatctaattatgggcttaatgcatttaaaggctttgtataatttgctacgtattttcacacaagttacctgaacataagtccagtcttcctgctgttttctgagtcacacagtgattcagtgaccgaacagctgttggcagtggtgtgggtataatagggaaaagagactgatggggacaacccaagtttagacaagctggtaaaagtagaagaaaatcttcttgaaaacactagtgatcactaagggctgtggagaatttttgcttggtgggtgaatgtggaagaggcaacagcatgggaaggtgttggtaaaggagctccatacttgcttaaactgccttttgattgtgaggccgttgatgaatatttagtttgggctttaggttttttatgatacaggatattttccatttctggctttgtatctcagagatcacttagttacacttatagatgaataggagtttcaattccttgttttagaaagaagcttggtaactgttagtgagttacaaataagccaaatagaagaaggtacatatttctgcagtatcaggtaaagtttttcctcataaggatttagactcttggatatcatattaattctcagaagagtgggtataaaaaggtatgggacttcttcctggggtgggttggaggtggtgaaatacctttttttttttttttctgagatcatcatagacaagatcaaataatggtaaacatgccaatgaattttctaagcactattcctttaagtgaaagaagagtgtttcagtaaaatgatttaatattgggtcttccaaaagatggatttaagagtttcaactttaaaagacagaaaaattaagttattttacacaatgaatattgtcgtgccgtgtgtcacagacatgacatgagagggaatcagagaacatacagttaatacaacgcaaactagtatcattacttttgctcaatcacttccattgtctaagtaagataattaaaggacagcataaaataaaatttcaaaactttactcaatcatattaagctattttaattaaagtaaatgttttaatgccattgaatattcatcaccattcaaaattattgatgtaaatagtgttatatgttaaaggtaatttaacttccatggatgagaattcagctaatgtttcacttaacttttaggtaattttttcaatatcctggtattaaacgaagtccatgagtttgtggtgaaagctgtgcagcagtacccagagaatgcagcattgcagatctcagcgctcagctgtttggccctcctcagtaagtaacttcactaaaaaggggattcttacagaggcatttgacatcaaatatgaacattgtaacaagagaatcatatgtacagatggaagcattcaatgccttttctgtcctgtgtagctcattttccagtagaggatactttcaaggaaactaacagttgtgacaaatatacacatctcaatgtagagttttgctttacatcattcttgatttagctttgtcattaagcagctaatctgttttaaaaaaatttttatttgtgcctgggcatggtggctcacgcctgtaatctcagaactttgggaggccgaggcgggtggatcacaaggtcaggagttcgagaccagcctggccaacatggtgaaaccccatctctactaaaaatataaaaattagtctggcatggtggcgggcacctataatcccagctgctcgggaggccgaggcaggagtatcgcttggaactggagggtaggagttgaagtgagctgagattgtgccactgcactccagcctgggcaacaagaatgaaactccatctcaaaaaaaataatttatttgtgttttaagttctggtgtacacgtgcaggatgtgcaggtttttcacataggtagacgtgtgccatggtggtttgctatacctattaacccatcacctaggtattaagcccagcatgcattagctatttttcctaatgctctcccttctccagtcccatcccctaacaggccccagtgtgtattgtccctctccctgtgttcatgtgttctcattgttcagctcccatttataagtgagaacacgcagtgtgtggttttctcttcatgtgttagttatctgaggataatggtttccagctccatccgtgtccctgcaaaggacatgagataattcctttttatggctgcatagtattccatggtatatatgtaccacattttctttatctagtctatcattgatgggcatttgggttgattccatgtctttgctcttgtgaatagtgctgtgatgaactaatcttttcaaataatcctcctctcgtctattaggttttttttttttttggtaccttcttcctcattttattatttatctggataggatggtagcattatgagacgtataatatattaaaaattatctttataattgaccaaggcttctcctaaagcacacctcattctgttggtaatatttcaaaatatggacttagagttggtcaaactgttaagtagataatatatataatgtttttatatatttttcaatttttttcaagctgagactattttcttaaatcaagatttagaggaaaagaatgagaatcaagagaatgatgatgagggggaagaagataaattgttttggctggaagcctgttacaaagcattaacgtggcatagaaagaacaagcacgtgcaggtaggactctcataaatattagagttattcaaaattatgttttccagtcatttatattttgacagatttcttttttctcccctaatccaggaggccgcatgctgggcactaaataatctccttatgtaccaaaacagtttacatgagaagattggagatgaagatggccagttagtagttttgattttatatgatagaaaatttcagttatattttaaatcaatacctataaaataccttaaccgtaacttttattgttagaaatatttttgatataggcatttagttttagatgttgctgcaaaatagtagtaggtatgtagtattttgatctcatcaccttcaggagttagaaaaggtagaatgagagttattattgagagatttggaatcaagggtcatttggtaattcatgaatcatggagaaagaatctttctattttctggctgatcgttttaaaatgccatattaattcatcttgggtgatagaaattgcagagccatctgtgatcttttcttctatggtgactagccagcaggttgtcaatatcagaaattagatttggttagagagcttcctatgatgagttcccaactgatgtgacagagttgacctgtcttctttcgagagggttatttgaagctgtcatctctggataactctttcaataggagtgccattcaaacatcataagaccggcactctctcccaaagatacaagctgtagcaaggagttttgtgcatatcaggtttgtttcatatccgtgagcctttgtgttttatggcaactgattgattatacttgtgctatttgcaatgggtatcctctgggttttaaatagtgaatgacttattttggaaacaaatagtagtattctatgtctgaaatcttgaccgtctatttgtttaattatctattgctgataagaagggaattaataacacagatgctacttaattaaatattttcattttgacaagaaacagtaattcttttgaaaactatgctaaattggcatcttaataatctcatgttgagcaaggcttttggagattagggtaagggagattcatgtcgcagtttataaatttcagttcataggatacctatttttcaatatccataagataactttaaaataaatatattattaaaacaaagaaaatatatttacgttatacatctttaaaacctaccttgcttctttacaattttcagtttttcctctcttgtttccattctcttctcctcactttacctttttcctcagcatctctttacatatctgctgagcttttttatttctctctgctgcatatgcttttgaaaaagcataaaaatactaatttgttaggatttaattaattcgagtcttaaaaaatgaactataattcactcttgtaagtggaggtggcatgaaatattgtttatatgctcttaattgttgttagagatatttgataatggcaagtgagaatttgagatagttatttaaaagattactactaacattttgtttgaatttttgaaagtttcccagctcatagggaagtgatgctctccatgctgatgcattcttcatcaaaggaagttttccaggcatctgcgaatgcattgtcaactctcttagaacaaaatggtaagcagtgggccatgttttcaaataaagggaaacacatttttgtggtatttttaattatagaagctatatactgtgaaaaatttacataatttataaagctatatattgtgaaagatatctctatgtgtagagatgtattgacatatggattatgaatatataggtaaaaggatgaagaataaaataaacatttgttgtatatttttccggacttctatgtgtaaactcacacatgacatatacaaaattttatgtattttgtagaaatgggatcatattatactcttttataaccaaattttatttattctcttttttatgttgatacatgtgtattctcacattatcattttatttttaattttttaaattaatttttgtttttagatatggtctcactctgtcacctaggctggagtgcagtaccatgatcatggctcactacaacctcaaacttttggactcaggtgatgctcccacctcagcttcctgagtatctgggactacaggcatgcactgccatacctggctaattttttgcagagatggtgttttgccatattgcccaggctggtctcgaattcctgggctcaagcaatccatctgccttggcctcccaagtgctgggattacaggcatgaaccactgtgcccggcccaaattataatttttaatagctttgtagtttttcagtgcttgcctgtattctgttttatgaaccaatttcttactgatgaagttttagtttgtgtccagtgggatgtttctggaacccatagtaaacaccagtgatcactttcctcctctgttttcctttatacatggttcctattattttcttgggaaaatttcatagaaatgcaactgggtagagagctattcaccattttaaaatctggtaaaattgtctattataaatttccacactatacttttttaaaaaatcgttctttaatgtaattcttataaatcttatagctttgtataattatgaagagaaaaatggcttgtatccctttagaaagacatgagttttaagattatggttcaggctgctcaaatttcttcccccataaacaggaatactgccagaaatccttaggtgaaaactcatcataaaggcattgggacttggcagcttttgcaggacatttttagagggcaaaaaatagagaaaaacactgaaagtcagagacagagaccagtgtaagcatcagcttttaatagagaaactgggtagggtggaaaaaaaataaagcaaccacctcatgcatgtttctttatattattattgaagtcaaataaagaggaaaatcatttcttcttcctcttcctcctttttcatctcacctctccaatggcactttaataaaacgcttggagtggccagggcactgacagacagacaggggctgctctcaaggataatgagtcaaaggggaaggagagggaatcgctgttctcgaatctctcttattctactgtgcagttaaagaggtctggacagggatttcactcctgaaaatgaggactggactttgtggcttctgttggggcacctttagagtggaggtagacttttactatgtacagacaacattgtgttggtgacatcattcataaccacctggaaatctcctttgatatgcaaatcaaacaaccataactttgtgaaatttcgactgcttcctattgtggtgtctgaggactggttacattcagagtccaccctgatgtctttgttcagttttctgctctttctagttccttacttctttgttcctgatcacctgtcaagtaaaatgtcctcagatccttttgtattgtctttggagttctgccttaataaagcatgaagaacttgagtagctcgttcatcaactttcttgggcaatttctcattgaaagacacttgggtgtctttgggtgtgcagagctgagcatggctttatgtttttagaaaaaatggctacattggcaggcagaagaactgcgtccttggaatcatggaggtcccaaggttgcatacattttgtgtgacatttttcctattcaattaattaactaatatttattgagctcccaagtgtgtagtgtctgtaggcacttgggatgcattcattaagtaaaaatcccaggctcatggagtttaaactgtagtagggaagataataagattaactaaaatatgtaatatttgaggcagttaagaataaaaaatgaagcaaggaaggagaatatgatatgttagacatcagaggagatgaagttgtgaataggcagccaggaaagaaggtgactattgagtaagacctgcagggcgtcgcatattgttttttgcctctgaaagcagttaatttcctgttaaaatggagtggatgagatcaagagtattacgtagatagctggtaaatgcgatagtgtgtaaaatgttctataaagtctaacgtgactttatgatgaaatttcttcttctaggtttattgcttgcaattttcaaaccacacattgggttactgtctaggatagtgattcttaaagtgtggttcctggaccagcagcatttgctgggggaacttgataaacagtgtaaattcaaggaccccatacagaccttctcaatcacaaaccctggagttgagacccagcaatccatgttttaacaagctctccaggtgattctgatgcacactaaagtttgagaaccactaacccagtgtcatttttgtcttttaaagtgtcttcttggctagaagctagccactttgggaaaggttattacaacttctgatgtgatcaagcaaagtaaccaactctttattgtatcttaatatgtgatattctgaatgtgtttaaaaggtatgagtttttcaggctctggcagtattttagaatgtgtatgtgatttctatttatttccatgttttgtcctatcttcttaagatagactacttattttaaaagcagtacttaagttaaaactttttatgtttctttttctgccactttcaaagtgttgaatcacagtgtgtaatgttggaactgatatttttatagcggcttcaagacaattgatatttatgtggaaacttgaagacagtaggtttatgtttagtgaaggaagtttattacaaagaggaaaattggccagttgtggtggctcacgcctgtaatcccagcactttgggaggccaaggcaggaggattgcttgagctcaggagttcaagaccaggctgggcaacatagtgagatcccctctctacaaaatattaacaaaaattagccaggcatggtggcacacttgtagtccctggtacttggaggctgagacaggaggatcacttgaggccaggaggttaagactgcagtgagctatgatcatgctactgcactccagccttggcaacagagagagatgctgtcacaaaaagaaacaccaacaaaaaaagaggaaaattattccttaatcattattgctggaatatagttactttccacaaatagtgaagtgccagttgtaaagcatatctatatgtttcctagactttggcattactttgtgaaaataactgtaattacttatgttctatgtaaatgctttccattcatttgtatatgatggcatatatagaaattataatgtttgtaaagtccactgggataaatggacaaagcagctgaaggctgaaagcaaccaagccttttacagccccttcattccccacactcccaaaaagctgagtgaatggtcgatacctccacatgcttataactcattcccagcccaccagtgtctagcatatctggttagtcttagctttatataagtgcagttatttgtgaacttgttttaagtattggaatacaatttaactttcattcttattttggagaccattatttaaacagatttcttttttcctgcaaaaacactcttttcacaatggacagagacacggtgattacattaaaaccatctactctatgaataaaaatgttaaaaccaaaatcccaacaaagggttaataaaggcaaaaaaaattggaaatgacatgtgttttaaagaaataaacatgaattatctttaagctgtcaatgaactataaattatgtgtgctcttgtatatgctttcctgtaaatttggactatattaatattctaaagcttatggtaaaattatgaaaatatgctttcatatctataagtaacattttaaaaaatctcagttaatttcagaaaaatactgttatcaaaaggaatacacctgaatgttttggagttaatgcagaagcatatacattctcctgaagtggctgaaagtggctgtaaaatgctaaatcatctttttgaaggaaggtaatatagattcattaacttgtacagaatatatcatattgggccaggtagaatatcaatatttcaagcatatttctaacaatgaaaagaaaaagaaaaacataagacacttgaaaactgaagcattttgcaatgtaatctcgtgtcactagtaccatagacttactttatctgaacactgaaaggaatggcaagattgtggaaacatgttgaaggtttgcttttgaacctgatgcttgatgttgactatattttgaaaagtggtaattgtatagcacatagcatacagcagtttttctaattattgtgtgtgtgaaagttataaaagataaaatcagtttatggctaaattttgctctttcacaacgaatatattat

SEQ ID NO: 737 - DNA, 5185 bp, Homo sapiens
  source 1..5185: mol_type = other DNA
gctgtccgcgaaacctagtgctgaagtaggcgcggacgtgcccggtgcctggcgcgtggtagcaggcgcccggtgccccggccggcgaagaccatggcgttcatggtgaagaccatggtgggcggccagctgaagaacctcactgggagcctgggaggcggcgaggataagggagatggggacaagtcggcagccgaagctcagggcatgagccgggaggagtacgaggagtatcagaagcaactcgtggaagagaagtgagtgggatcccttcctggctccaacgacctcccctccccacccccacagctgctcagtccatccccgggccagcctcaggtcccaatcccttctcccctactttcctagacacggtaagagaccgggaggtgtcctctacactgcccccagacccatcctatctgacacccaaaaccccgctccagcatcatgctccggccaagggggagtggggggaggggcgaccggacgagggaccgaccggagcctgggacgaggaagggggtgcacgtgcgtttctgacgaaacgataatcccttaatccgatctggtcccagccgcctatgtcttccaactggggctcctctgaacttgaggctctgaaaaaagtggtgcagccgctcagagtcgcggagacagaccctgagatgggggcactcacaaacattgagcacttgtgtgcccgcagtgctgggacagagtttggggctggactctgctgctaggctacttgggttcagagcctggctttgcctattagctggataactttaggcaagttacttaacctttctgtgcctctgtttccttttctggaaagtggggatggtaatcataatacatgccttgtatatttatgaagattaaatgccaatgcatgtaaactgtttagcacagcacctggcacatgataaagtctcataaatgatagctattatttcgctcaatcctgataacagttttgtgagttgcaaaattttatccccattttacagaagaggaaggtaagtgacttacctaaggatatacctaaaatggtagtggagctgggatgtgaacccaagtttggcctgaatacttttccccacatgacatagcttgtcagtgagggaacagcagaccaagttggaggccatgagggacaaataattaggatctgcagagagagccagacagactgccaccctggttccctagttccatccagtggcagagacgacaaagggcactgtgatgggcagaggcagcagaaacctggatgtccgggttggagcgcttttgctacacacagggaccaatgcagcagctgctaggactcagagaccccttctgtccctccctcgaagacctcaacccccttctctcagccctcgtggtgactctgcctccggtgaccctgcaggatggagcgggatgcacagttcacacagaggaaggcagagcgggccacactgcggagccacttccgagacaaataccggctacccaaggtaagctggccccggctgtgaggcacatctgggaccctgagctctgggttctggactccttcgccccattctgggcaccacagccctcagctatgagactcacagggtatttggttagatccttccttctcattcatttgttcttttattcattcactcactcgtagttaaatctgtgcccaccaagggccagggctttgtgctgaggggaccccagtcctcatgagactgacaggtctgtatttctggagccaatctaggcctcttctctcctccaccccccatatccccaccaagcctgggccaggcctgggcagaggaagacacaggggaggcagaaatcagtagatttgactgcagaggtgagtgttctgggggtttctgaacctactgaagggcagaacttacttaaggtgggggagagaagccctgtgtgtgccaagtacttgaccttcatgtcctcatctaacccccaataatgctgccaggcagctatcacccacagcgacaaaagatgaaactgaggctaagagaaatggagggacttggctaagatcatacagccagtgagccatggagctgggaccagccctcaagccggtgaatatgagcctgcctttgctccagggccccaggctgctttccagagtatggagtctgcccgtagagagccaagtacccccttggccggccaagcagccagagagtatatctcaggagatccctgcccccacgctcccctgggcagtgcaccaccagatgggcgtgtaagtgtgctgctcctgttgtctaaggaggggaatgaagcacaaatctctcccagaatatcaccctagtgcatccagaactgtgctggactcaggggaaaacagcacagggctatagcgctcctgattttgatcttccacttgaattgaatgaccaaatatatgaacatcacattcactcattcaacaaatatttactgagtccccagctgcttctgactccccacagggcaccaatcttttggaaatctgtcacggggaaaaaccggtccagaaagcctgcctcactgcaaactcttctaggaataaaatcattcctcagatgcttgcgctaggcatataagagacacctgccatcagcaaagtcagagttgagcagaagagccaagacttggatgcaactgagtaggacataaggcgccccccagaagaatagtgaagggcaatggtcatcgtaggtgccatgcaaaaaaacacagatgttggaatcagtgacataggtttgaatctagctccccaacatcctgcctgtgtgatcttggataatttaagttacttaagttacttaagttagttaagtaacttaaatttaaagtaagttacttaaatcctgtaagcctcaatttccttatttgtgaagtggaaataacaatacctacctacctcacagggttattgtgagaattaaaagcacccagctcaacgtctgccatgtaatagatataatagatgtttgataaatggtacccatcactatttttggttacacccttaagcataacaagagtcaaaacatgacttagctgactgtaacagtgtgactcataggtattttcattttgtctttactcactgtgctggtccttcagcatctcagagtgaaataaggtaatataaaaaggtctccatgtccaggcatcaaacgcttgatcctgggatgtgggggtgggagctgagctcactggaacatggggctcaagaatctaaggggccgggcacagtggctcattcctgtattcccccggcactttgggaggccaaggtgggcatatcacttgagcccaggagtttgagaccagcgtgggcaacatagggagacctcgtctctacaaaaaaaaaaaaaaagaaaaaatagaatctaggggcctggaacccagtccaagcctcctccctgtcctctcaactctgggtcctcacagacttccactccaccccaccccctcttcccctcttcccttcagaacgagacagatgagagccagatccagatggcaggtggagacgtggagctgccccgggagctggccaagatgatcgaggaggacacagaggaggaggaggagaaggcctcagtccttgggcagctggccagccttcctggcttgaacctgggctcactcaaggacaaggcccaggccacactgggggatctcaagcaatcagctgagaagtgtcacgtcatgtgaccacttccccggggttacccactgggctgggcccccatgagggctaagagtgtgtcaacttccagggacccatactccatttggggctttgtttcccttgccccatcctagttccaagacctttcccatccatgccccaagcctatcttctggtttcttcctctccgctgggagtaaagtccccatcttcactctacccttcaggaccctccccaccagctcagcctgtggaggcctcccaagattgtaggaataggcccatccctctctggccatggccccaagttcctgcacacaggagcacccacagagagacacacacaggacacaaaacccctggcacgttcagagacagaagccacagatacatcccggcacagacagacacacacgaggccagctcccttgcgtgtccagcccctccagacaccaccactcagaaactctgagagagagcatgggcagacaccctcagcagacaggaggcctgagttccagtctccacctttattgttcttgaaagcccctgctctctctgagccttatttcatcatctgtaaaatgggaatgtcctgaatgacttctaaggctctttctggcttgaactgtcagagccaagcccacatccctccttgggcagggcagcagctgctgccacagcctccagcggctgccactgtgggctctgggagccggagcgatgctgtgtgagaggcagagtgccaaggatgaagctggcactgaacagtaagcggctccaggcctcctctgggcccagggcccagccaatttctgttctgttcctgtagaacgctctctggattccatagctggaatctcctctcttagctcagtgaaaaataaaaatcccaaatggtgtgcctaccttcccacttcttactggcttccaggagtcttggagttcatagccccccgagcctgccttaaaggggtgtcctccaccccccacctacagcttcacaggaggggagaaggcatccagtgctaggagtagaagtgtctccagctctgttctcttggggccctgggtgaaggtggggtctggggcttatgaaataggtctgggctttgaggaggatggagcagcctcattatgtggggaagatggggcctctggggcgtcactgagaccacaggtggggccggggctggaccgcagctgtcttgggtgcctgtgcctacacccctcctcaccctagagacggaagatgtgcaaaaagaaagaaggaagggcaactgcattccagccccacactgtgatgactttgagcctgtcctttccctccttgagcctgtcttgcttgtcccctgtaaaatgaacagtccccctctcccccaaatagtaataatacatgtttcaaagggtgaccatttataaagcatatgacaaaccatatcaataaatgtaactcattctttt

SEQ ID NO: 738 - DNA, 32744 bp, Homo sapiens
  source 1..32744: mol_type = other DNA
ggtggcagcgcttgcagtcgggctacggaggccgggttgccagattacgggtaagtttgcgttttgctttgtgactgttactcccacttcgcttctcgccagaacgtctcttaacatttaggaaaatgcgtttcgcccgtccgcgtgcaagcttgccatcacttggggttgcgcctgtgatctttatttaaactccaccagcctttgtctcgacccggcagccccggcgacgctctcccgcggtcttttctcctggggtcccttggccgctggctcctgtgctcactgccctggacttagttcaagtatcacctctctcaggaagccttgctgtgttaaccgcagccctcatgggcacccacgacacctgcattttctcagcccgtgggcagtcggcttcccctgctctgatgccccttacaacttgcccagtggaaagcaccacagctggagcaggagggaggctgtcacgctgaagtttgttctggagagagtgaccaggataggagggccatttaaggagagactgaaagaaacgaaccccgtgggaggatgtaatagctttcttcagttgtcccacaggacgaactcgaggggggcagacagcatagcggattttactgtgttagaaggaagcatctttctagaaactataaaatagcagttaagagctcaggttctgaggttagggggttctggatttttacccgggtcctcaccatggccctgtgcccttaggtcagttacttgtcctctaagacctggtgtccttacttgtaaaatggaaatcagaacagtaaatgaataatattcatataacgtctttcatgatgactgaggcatagtaagaatgtagttaaaagttaggctgtatttctacttgctacgtggccatttctaatggccagagcaggtataattatccccactatgtggatgaggaacttggaggcctgagaaattttaactagtcattcgacattttatttatttattgccctctcaactgtgggcctgacaccaatcgacctgctggcactatagcacagaacaagtcgggagatcacttcagtgatggagtgtcctttctgctgagggactcagaaaataatcaagtaacagttaccgaaataagggaatttcagataacaatcagtgcagtgaagacaatgtaataacatagtatgattgacagtcatgagaagcggtagtaaagtaaggacgttttgaagaggtgacatttgagtttagatctgaacgatgataaggagctacctactcaataacaattccaggccaagcaaaggcccaggggaaggaaagagatagaatgattgaagaacagaaagaaggccactgtgttcccaacatagcagagtggaaagtggtaggaaatggggtcagaacaggtaacaaaggcctggtaataccagccttttaagccatgtccaagggtttggattttattctaaaagtaataggaagctattggaatgtttgacacatacaagtgatgtgatctgactcacatttttgaaaagatattgattactttgtggagaatggattaaaggtagggggaggaatggaagtagaacaattaggaagcaattgcagtagtccacatgagtgatgatggtcaccttgagtgagtaattgattaacttgtggtcacagggccagaaaattgcagaaccaataaaatataaataccttctgacttctttctatactctggcatactgtctcaaaaatttcaggtctccatgattctacaaatttattcatattgtgtgatgacagtgtttgaaaatctttttcatctgcatgcaccttggttcttgtaccagattctcagctcttctaggatgagatttctcaaagtttaattttcttacagcatagactgaaatccttgataccaacagtacatttccactcaccattctgtttctccaggcaccccttctttgtagctccaggtagcagtataaatatatgtcagtatacagtctttgtcttggactccagtatttcattttttgtataataattgcaaaatgaaactcttatgtacagtgatattgatagcaatgaagtggtgttggtctttgtagctttctactttaataaaagaaaatatgcattgtatctgatcttagtatgataatgtgaaatgacagttcatgtttatgaaatacttctgaatgacaactaaatattttggttttttacttatattttgaatgaaatgtgtagaacataatttagttcaatgtccaattaacaaacatattaaacaatttaaaatatttctgcaacataatagtactcaaatttcttgtatacccttcaccaagattagagaatgataaagattcttcagtctttatctgcatacttacttgtttatttcctattacaagaacactttctccttccaaaccacagagcaggcatcaaaatcagtaagttaatatttatccagtattaccatatgtagtcagcttggactaccaatagcaaaataccacagactggttgcttaaacaacagaaatacttgtttctcaaagtgctgaaggctggaaagtcaaagatcaatgtatcaactgattcacttcctggtgaggggtctccctggcttgtgacatctaccatcttgctgtggccttacatagattggagtaaatgagctcttatgtctcttataaggacaccaatcccatgagatcaggttcccacccttatgacctcattcaaccataattacttcctaatccaaatacagctacattgaggggttagggcttcaacatatggattttgggggatatatattaaattctttacatcatgttattcatggactctacataaattaccccatttgtcccaatcatttccattttagatctaggatttaatccaggattactcgttgattttagttgtcatgcctcttcagtcttcttcaatctggaatagttgccagtcttttcttgtctttttctttccttttttatttttatttttatttttatttttgagagacaagatcttgctgggttgctcaggctggtttcaaactcctggccttaggtggtcttggtctcccatagtgctgggattacaggcatgagccaccgcacccagccttatctttcatgactttgacatttttgaggaatacaggctggttacgtgattaaatgtgcctcaatataggtctgtctgatgtttcctcatgtttgtgaccccttgacaggaatatcttagaggagatgctgtgcttcaatcagtgagtcctcttaggcatcacatgatctcaatttattccgtggtttcatgatgttaacttctgtttctttaagattgggtctgccaggtttctctgttacaaggtgaattagcaaatatgtcacattcataaattaataggcaatgtgtgttttgtggggagaatctttgtgttttgtagggagaagctttgagactgtaaatattctgtttctcatcatattttctcctgccagatttctccattgatgcttcttgtttgaatctgttatcactgtgatggatgccaaatgacaattttctaatgttatcagtccttctagatttattagttggcattttactgtaaggtagggttttccttgctataccatatatttcttgtttattcgtttacatcaatatagactcatgacttcaaattttaatcaatttattactattattttttaattctgatttcaaattttcttagacttagccaatagaagcccctttatgacatgtttccatcattctttcatcacttccttattttctggcactacaatgtgccatgcttatcttgtattttcctgacctgccttggaatcagccttctctgccacgaattttggtttctttagtggaaagtggcatttagaaaaaactctgagcactagaagtgttcattactagcctctctcagcagagaccctagaaaatttttgtgtataaacaagtgtgcatatgtgtgttcaacagcaggaaatctggctacctttatcttcagtgtatgtacttacttgctcaattccccccatatgtaagcaaattactgtggctgaaagcttggccctagaaaagtgaattcatctctgcctggtatgtcagcccaaagctgagtattaaatatgctgcccactggacaccatccaaacactcagcaagacaaaagtgacgaggaagaaagaaagagaaaagtgtatttaggaagttcagctccagacattttagaaagggtaggaggaaggaggaaaggccagttaggaagtttggttctagacacataggccctttcacctacccttttcccaagctcagcgcatggataggggaagcaggcttagaatgatgagttaacttgtccaagcctaatcggttgggtagtggcagagctggagtttaagcctggattttttctgactccttacaacttgctatttttactgcgtcttgtagaaagcagctttgcaacggatgacaacaaaacaacaacaaaaacactgaagcctttcttttctatattaggaaatatttctttacttttgtctcaggtaaaaatcatcattaacgtggttagatgcctatttgtaagatggcatatttgaagttatttctaagctagaacaaacagcttagacagagttgagcatagtaggattggggtcagagaccgaggttataacctggatacaaggagttcttatgatgatgaaaggtctgtcaatatgcatagatacaataacaatacaacattgggagatgctgaaatgaatatttttttctctaaagctttaaatgaatgcataagcctgggctgcaatttttgtgagtctgagtgtgcttgtaataatacataaattgttacgataactaatgccaaataatggattataccatgaatggaatgagagctcctcagggcagggctaatccaaccctgttttgtaggtagaggtgttaattacacattttaaatatcaagagctggactgacatttcagatttgacacctttaatttgcaacattattcttcagcaataaacgttaaaccttgtaaactctttctggttagctataatcatgtccaattttatatattaggtaaagtaagttatataagttatttttcatataagccattttgatattcacataatgttttcttatctgattattgatttttaggctttctatggattataaagatgtattattttaaattttggtatttttaatccataacataagttaaggaaattgggacttcagtcttaatatggtggtcgtcactgaactgtattttctagtggttttcctgataaagctcctgaatccatttaacgatgtgaaatacctaacaataattctgacaatactcacaactgtttatttggtagctatttttatcacaatacttgtatctaaaagaataagaataatgtatttgaataaatagtaagtacaaatatatggtgtttgcttaagaaaaggcagggtaatcattgttttccaattagtgcacaataatgccctgaagtcgtctcagtcagttttgataccctagtttcttattttctggcagtggcctctgtgccatctttttgaggaactactccgtttaaaagctcttgattaagtttatatgattgacagataatgtgaaaggaaaacagaaatcatttatcaatagaaggcatttattaattcaagtaatgtttatcaagatcagggccagcttcatgaaaatatgacctgtgcagtcacacaaggccctactcttaaaagggcccctcacttatgatgtaggacatgcaagcccccaaattggggcttagcccaggagggttcttggcttggcctagaaaagaattccagggcaagctggtggtgttaaacagcaacttttattgaagtggcattgtacagtaagcagcagagagactgcttcttgcagaaaggggctaccccataggcactctgcccagaatagcagcttagaggcagttttgcaaactcatagttatacccgcttttaattatatgcaaattaagggacagtttatgcagaaatttctaggatgagtgtggtaatttccagttcatagggtcattgccatggaaaggggtggtaagatctgtatgttgccatggcgatagtaaactgatgtggcacactggtggccatgtcttctggaaaggcttctatccaggaactttttagctgatcctcaggttcgttccaagtcctgattcctaccccacttagataagccctgtgtttgtttaatgctctactgtcagcatcttgaaattattttttgtttttgagacggagtctcactctgtcacccaggctggagtgcaatggcatgatctcggctcactgcaacctctgcctcccaggttcaagtgatcttcctgcctcagcctcctgagtagtagctgggattacaggcgcataccaccatgccctgctaaaaattcttaataattatttaacatggggccttgcattttcattttgtattgggccctgcaatttatgcagccagtcctggtcaagatgtaaatagatataaatatagatagagatgcagatacagatataggcacaatattatatctcaaatgcactgacagacagtctcacatgattcaggccaaagcacagtctaattacgtgatttaattatgtgattaaaggcaaaggcagaaaactagggaaagtacaaaagtggagagcctttagagcctttacttttaacctttagaaggttaaaggtaagagataaagggaaaggcaaattcaggtctcctgagaatagtcaggttaagtgaaatatgatcaaaactccaaacttgctaccatagcccataagaccctaggaaatccagaccctgcctacttctctaaccttatctcctaccactctctccctgttcaccacactccagttgcacttctttcttttctttaaacacctcaagtttgttttactgccctcagaccttttctctgcctggaatgctttgtccctcagcttttttcacagatgacttattatttggatcttagctgggacaccctccccagtctaaattagcccttctctccttagtcacatttgctatcacctttcaatatctgaaatctagttcatttaattgtatcttttttttattgtttttctcccaccactagaatgtaaataccaaaagagcaatgatcttgacttgttcaccataatatcacatgcccttagtgttgtacctgcacataattgtactgagttaaaaatttggtggatgaatgcatgaatgaaagcaaacagaaggcagtccggtagcctaaggaaacttctgagagcagtgagctgttgtgctgatgaagactcctttcaagaagactaagactttctttgaagtagttttctgatgtttcccactgagttgggctgtgtgttacaggcagatgcttatgcatcctgaaataggaccaattgtcccatagaactgatattaatcatttctttgaataagcacagaaattgattctcccattgttaaaacttgagaaagttaaatttgtcttatctgagttactttctcaggaaaccaaccatcaggcctcccagatactatcaagaaactgaaacttaccagatcattgcatctggacaatatgataccagacccttcagccatcatgactgccttacccaggggtacccagtccttaggctgcagactagtagccgtccatggcctgttaggaacccggccagacggcaggaggtgagtggagggcaagtgggcattaccacctgagctctacctcctgtcagatcagtggcagcattagattctcccaggagtgagaaccctattatgaattaggcatatgagtggtctaggttgcatgctccttatgagaatctaatgcctgatgatctaaggtggaacagtttcatctggaaaccatcccccacacccccatgcgtggaaaaattgtcttccacaaaactggtccctggtaccaaaaaggttggggactgctggcctaaccaatcacttgctacctgttgaccaactcctcttccttacccctccctaattcctgttttcccacacatacttacattttttccctgccatataagcccctaattttagctcgtcagggagagggatacaaatttcccatctccttggctgcggcacccagttaaagccttcttccctggcaatactcctttcagtgattggttttctgtgtagtgagcaacaggacctaaaccgaacccctggcattttggtaacacccccaagacaaatgagtagcatttctgaactcgttagattcttgaaagaaaaaaacatgcactagtaaacagaatattgcctttgggtacagaataaaagataataaaatacagttggccatcagtatccgcaggttccacatacacaggttcaaccaatcacagattgaaaatgaacattaggcctacaatggctgtgtctttactgaacatgtacacactttttcttgtcatcatgccctaaataatatagcataacatatttacattgtgttttgtattataagtaatctagggatgatttaaaatataggagaggatatgcataggttatgtgcaaatactacaccattttatatcagggacttgaatatcttctaattttggtatctgcagtgtcctggaacaagttccctgaaaatactgagggatgactataactctttgatcttttatatattggtttcctgaaactttcatgtcatttaaaaatgatcagttaagtttagcccagggaaaatagtcattcctgattttgccaattttcttaaacaaccttaggattatataaatagctgatgttatcttgaggaatctctgctgtgataaggtataaaacaagttaccagtttctaaatgctgtcatttttgtgtctcctcaagtataatacatccaactttataggaagaaatatttacatttttaatattagctttagtgaataaataaatagtaggcatttctaacttgtcagtccacagaaaccagacagattatttactgagcagccaacatcattgtgccctcttcctcttttgaaatgaccttaatgtgaaatgtcactacactagtacacttttccctccactctaatccctcccaaatgaccaactgcagcctaccccatcccattcatgggtcatactgatcttagaggtggacgtatattttaaaaagaaaatcgttccctcaaaaaacattgggagacttgtagtttaataagcctgccataaaatttttgatttgtagagccaagaaagaacctttaaagatcattttatgaatgattttgacatcgtacatatgaagactagggagcagagtaagtggctgctcaaagtcatatgtctagtgggcatctaccctctggactggtactcttcccaatgcaataaaaaaaacatgaaatatatgtactatgtaatatgtactatgagcttctttgctatgagtcatctttctttttaaattatagcagaaaataagtgtatttatttctactgcctgtcaatttgcttacaaaggagttgtcataagaagttatttaaaggatgtagctgaatttctttgtgaaacaccagatctatgttattttctcttttaaattgcaacatttgttgataccttagcaaatgaagatgaaagaagaaaataacataaagggtaaaatgacattaaaggagacataattagaaagagctgatatttagatgccaagaaggtacactggaacatggtaacttttttgatatttttccttctttatccaaataatatatcaaagtatatatccttgttgtaagccattcaaaaaataaagaataacttaaagaaggaaataaaaataacagtaaataaaaatagtagttccaagtgtcagttattgtttacattttatatttttaataaatgtaattttaaaagatgaaattattctacacattctgtttttaccttgctgttgttttttacctagaccatttttgatgattacatagtattgttttacatgattatactgtaaattatttaaccagttatcaatttttacatatttttgaggtttctgatattttataattactaactattctgtaatgatacttatgaactaacagatacttctgtgtgtttgctgaatcactccttgccaaccacaaagtattaaaatgaactggtatcctgcctttggtagacaaaccctggatttggattttcccccattgctgatatcccatttccccaggtgcccctcaaaatgtttttgttctctcactttttctaaccctctttttctttattgttcataattgtttattaaatgtgctgaattttcacttttaagggatattttacaaaccatacctacctagcatttttagatacttctgaccccagccacatcttcctttttgaacataaaatcaaggagtgccctatgtgtccttattgctctatcaggaatctggttactttatatagtgtgtgaacccaagaaagcaattaaatctctcctttatgcccctggaaaagctaacagtgctctctgctaagaaaaagcctcctttagcccctttcttttcttttattccctcactaacaatatacgcataagccctcatactcaatatgaactgaaattctccaatcagtctacagccataccaccctgaacatgccagatcttgtctgaaaatccccattttatcaagataatttagtgtatctttagagacctctagatggccaatagcttctgacaaagcacttttcttatgagctttttaacattattatgaagagactatttggacttagtattaaagcaacaaatcttgccttcactggtatcatactgtccttccctttccttctggtgatcatttcactttagacaaacaactaaaaagacattagagctcttgacctcacagctcattaaatacttcaaagtaaatataaaagtactctggcaaggaaggatgggaattaggcttttgcttacaaagcctttataggtctattctagatgtattattttagactttgcaatgacagcttaataaatcatctacttatttgtttgtgacaggtgtctgtgtgtgtgttgttaagtaaaatgcaattgtatgtaaaccaatatattacaattacataatttttaacaaaaatataacacgtatgaattgtgcctggttttttcttccactgctttattagtaacatttttaaatgaagacatataatcatataatcaagcagaatttggggtgggagggaaattattttctagaagatgaaacacttaaagctttcccaaaatattttttgttatttacaaaatagtggatttttaaaaggcattaaattaacaataaaaaaaaataatacctaggaattaactaaataagaaatgtgcagctgttaccagtgcagggtcttgactacaagtcgtccaggttcttggcaatttgaacaaagatttggacaaaatgcacaaacaaagcaaggaaagaatgaaacaatgaaagcacagatttactgaaatgaaagtactctccacagagtggaagcaggctgcagcaagtggctcaagagcgctggttacagaatattctggggtttaaatttcctctagaggttttccatcgtttccttggttacaccctatgtaaatgaaggagtggcctgcagctaatcagaagtactttccatttttcatctgccatgcagtgcaaagggagtagcctctcatccttttgtggagaggtagggttttccttttgattcagttctaggaagtcagcaccaatcagccttaggctccctgcctccagaccctattctcctgcctcacaaggtcactgtgaaggcaactttaaaacacagtagaaacaggcttgtcccatctgtggcccatgggctgcatgtggcccaggacaactttaaatgtgttccaacacaatttcgtaaactttcttaaaacatgagatttttttgcgttttttttttgttgttgttgatgatttgtttttaagctcattagtcaatattagtgttagtgtatttcatgtgtggcctaagacaattcttcctccaatgtgacctggggaagccaaaagattggccacccctgctatagaagttcacaaaagaagatttgaacaaatagaaagtgataccaaattcctggataggaagactcaaaataacatcatagataacaatacttcttcaattatttgtaaatttagtgtgattcccttacaaatagcattgttttgttttttaaacaagataagaatactttgaatttaatgtgtaaaaataaacaaccaaaaacaaccagggaaacttggttaacaaaagaacaaatgagagatgatcggccttactagatatgatagtgcctctgtaattaaaatagaatggcattggtgtacaaataaacaacctaaccaaagggccagaataaaaattacagaagtagacccaaacacttaagagattttgtatatgatgaaagttgtatctcaaaatggtggggaaaagatttaataaatgtagttgagacaatggggtggtcttcttgggaaaaatatgagttggatctgtgctttatattatgatggattccaaatggatcaaatatttaaaaatgaaaccataagagtactggaagaaaatatgagagaattctttataactttggagtgggcaaggagtttctaatttgacctaaaacctggaaatcataaaagattcataagttagccacaaacttttgtgtaacaaaaagcccataacccagaagaaaaggggggaaaatatatttgcaattcttaatgctgatagagagataatttctgtaatatttaagaactcctagaaactgaacagagaaagacctaacgataaatagaagaattggcaaaagatgtaaaaaaaacacagttcacataaaagaagatactgaatggttcttaaagcataaaaaaactcttctgcctcactccaactaccttgagataccattttcatcaataaaactggcaaaaatccaaacgttatttagtataccatagtggagaaaatttagagtaacaggcactatagttggtgagatagtaaattagtacaaccctgactgagggacatttggcaatttgtatcaatttcattatggcatttttgtaatttcattaaattaatatttactataatttctggcagaagatatttttatcccttttattttctctattttttgtccagtgaaaagaactggttttattgaataccatgtctgagaatataaattactaagtcttactcaaacaccatatgcgttatggacagatttttttaatctgatgagatttctaattacatgggatgaagattgttttaatgagatcataagtaaacagacttatcaaagaaaagctctaatttaagttttctggaatagattcatctttaacaacaagattttttttctccaatgttccactttctctgtttttgctgacctgtttgcctcttatgattcaccaaactagaataacaatatatttgtcttcaatgttcatatttttagtaaaagaacagaatgttttccttctgtgttatttattaattatgggaacttgagggtggtttgtgtgtgtgtgtgtgtgtgtgtgtgtgtgtgagtgtggtgagtatgtgtatgtaacattactggaatccctgttggctgagggccttgcaagtttgtataaagagagagtaggaagcaggcaaaggagagggaaaggacaggcattttatgatatttaaggacatgacaatgaataccactgttgggatggataagattaaacccacttctgtttaatcaatagtgtcatctttatataaaagagataacacattaccactccttactctctcattccacttttttggtgaatcaaactttttacctgaattaattttccagcatactgtagtagaaacaaacagcttgggtttggagcaagaaagagcagggttcaaactctactttacaactagcctgtgacaatggacaagccacatactttctgtatgacttatttttcttttgtataaaattgggttaataatacctcccttgtggggctcctgtgggaagaaaatcctgtaacatggtgcctggctgtattcgtgtttaatgatgacttagatcccaggttacgcagcctttctccatactccctgtgtatactgctgtcagagcacttcacccctcctgatctcatctcatctttggcacttaggacactgccagcatgttaagtgaatggaataaacacctaaattttattttaaaccttaaaatagaaatgttttaaaatgtcttgttaagtatattatatggaatctattgtagagtagcatttatacatcattaggcttgaatatgttcccaggggacctggggacctgtgtccagttagaacaactcaccaaagatgaggatcttactcactttggtaccagtagaaagactgctcagtttttcacatctgcttttgagcaaggtgttactattcttaccttacttaataggaggagatgctaagaggttaggcaatttttctaatgccatattactagcccatggcagtattgccatttgaactctgcatttcttttcttttttttttacttatgtctagtacattttccacaatattaaataaatacatttggaatacatagtgtgtgaaacatagtgccaattaatggtagttgctattattgttattatttgagaatgacctctcttgaggtttgagaatctgctccatgcgtgtatcattaaagcagtctataatgaacttatgcaaacttagttttagaattgaactctcttccatgactatatcagtcttgtggacagctgcagtggctcttgactctgagagactactagtcaaagcccaaggattttaagctcctccctcaggtggcccttcttttcctcatgggtactgaataactttcttacttcatggtcattggacttttgctactgacattgtggcttggtggcttcatttttctggctgctgttgatctgcatgcttccactgttcctgttgcttgctactacagagggcgtgaaagtcgaaatgtgtttttaccacccagaccagtgaatacattgctatgttagggtctcaaaagtagttggctctgtgtttggggcccattcagttaatttacggaagaatctatgatttcttctgcatacagtggttgaagaaaagataggatgatcctcttgattttagtctttaatctctcagttttgttctccctagaactttttgtttctgagtcttcaatttctctgggactctctttttcttttttctttttttttttttttttttttgagacggagtctggctctgtcgcccaggctggagtgcagtggcacggtcttggctcactgcaagctccgcctcccaggttcacgccattctcctgcctcagcctcccgagtagctgggactacaggcgctgccaccacgcccggctaattttttttgtatttttagtagagacgagatttcaccgtgttagccaggatggtctcgatctcctgacctcgtgatccacccgcctcggccacccaaagtactaggattacaggcgtgaaccaccgcacccggccagtttctctgggattctttaagatatgttcctcctgcacctgtttcctaggccagaattttgttgtgaatcagttgctgatgtgctgatatattgattctcctcagcttttcagaggatatcagctttctttaccttagtatgccatacaaatattaccattatgtgtgtgctcagacttaaaaaatgtttaagaagcactgccctaaatttcagcttcttcacccctcttttaccaattatcacccaaccatcttttttttatcttccaaaaacttgttcaaaattttcatccaatggctcttttcccatttactcttcaacattctgagtttgtactgtttgtaactctttaccctaagactttcatattagttggctcttgggagggaaagaatatatgtgccaaggtcaagatgccatttttaactgaaaatcgggttttttaaaagtttaactttattaagctataattgatttacaacaaacagcagatatttaaagtgagacagtttgttacatttgacatgtatccatttgtgaaatcatcgccacaatcaaggcacctactgtacctctgtagaaactgaggcttggagaagcccaaaatttcaaatgagaacccaggcctatcagatctcaaggtccatcctgtagactataacctgagttctagttaggagaagaaaaacaacaacaacaacaacaacaaaaacactatttttcatttgtgagggaaaaccacacagtctctgaatctagctcctcatttcttcaggaagagagttgtactaaatgatcctagtgtctttttcaactttaagttcctttgcttcattcattgttcttatgaaaaggtggtaaatctctgttcaaatacagtttgttttaattaaatgacaccactattctctgtaattttcacagtggaacaatataagacattaaaagcatatttttttctcttcataggaaagccatttaagaagttcctggaataatattagtcagagtaatataggatctgcaggaagtgtctcaagatagttggtaagataataagaatttagtttttttcaaatgcattgcataattatttttctgactataagcttcgtagccttgtactcacaggagacattttccttaatctttaactattatgtgatttttaagcttaccaagggtggaagttgtaatagttacctaaagcttagctgtatgttcacttttgccagaaaatgaagatgttatatagatatggatattcataatgatatagacatagacttatctatctaatgagctgtctttacacttctcggatgttattgtcaatgataaaatgccataacacaaaatacatacaatacatctaacatctatatacaggcttatattatttatgttccaagtgtatataatgtttttatgaacagttggaatcaaatttgacagttctaagacctgacaatttattttctacttcttcaatcctaggaaaagaagaatttctagactcttcatcaagatcttcatttatacagctgttaaatccaaggctactttggtgaaagcatgaataaaaatacatctactgtagtatcacccagtctacttgaaaagtaatttttaagtttaatatgttttgaaatatagtttgaaatatgtaaactattaatgaacatttgattaaaagtttttttacatctagctctctaatgtggtctaggatagcagcaatgagtagtgagtaaagtaatacgttgaattacctttcaatgtaaatcagtgtatagaacaaaatctgcattctcttttaagtcatctgtgcaggcacggtagggcatgcctgtagtcccagctgctcgggagactaggacaggaggatagcctgaagttgggagtttgaggctgtagtatgctatgattgtacctgttaatagccacagcactccagcttgggcaacatagcaaaactctgtctctaaaaataataaaaaatagacaattgtcaaatacatttttaaaaactcttttgtgagatttcttttttaaattttgatttttaatatctagaatattttataattccattaaaaaaatttgataatatatagattaactcttgctgactaacaaaccaccctaaaatcccttaaaacaataagcatttattttttctcatgattcagtgggttggttgagcagttctgctctataccagataatgtaggatggcctcatttacatcttgtgaggcctcagctaggaaggttgaatggcagaggtctctgtagaactggtctgtcattcttcaggaggctggctcaagcttttcacatggtagcagaagcacaggtgttttccaaatacccagtttcctcacatttgctggtatcccatgggccaaagcaatttaaatagccaaatgaaaattcaaggagtggagatacagactttgcttttagtgaaaggaagcagtaaagtcacattaccaagatgcatgcagacaggaatgggaggaattggtggccattttgcaaacgtaaaacatacctttaacaaggcatattaaaaaaaatcttgctgttattctagtcttcactgtgtgccctcattccctctataaaaagttgtttttattcttggtccttttgtagtgcttctttttggttaagccaatgcatatatataaaaataaatatacacatatgtatgtacacatgataattatatatatttggattccactccccagaatattcttaagtaaaaggtgtcatgtatactgttttgaccttggctttttgttttaatgtatatcctggtgatcccttcatatcagtttataaaaatcttccttgttttttgttataacttgtttttgttatattccttgtttttgttataactgcataatattctattgtgtggatgtaccatggtttattcagccactatattatggatgggcaaacaatacatttgcaatttctggtgaatacaaattatgccaaaatgaataacctagcatataagtcattttctattttttgccagagtatctttgggatagattcctagaaatggaattgctggatcagagggtctttttttgttagaggttaccaatttatctctttagaagttgtaccattttgcattcccaccagcagtgtgcaaaaatgcctcttttcccatagctttttcatcagagtatgttgttgaagttctaaatttttattggtctggtaggtgagtagtagtatctctgcagttttaacttgtaattctcttattatgagtaaagttgagcagaactatttttaatacttaataggaaaaaagagtatataatctaaaattttaataagagttttaaaataaggtcctagtcatgtatgtaaattttatgctgctatgaacatataaatttatgtttaagaagaactttcaacaacatagacattgcttataataattctgggtaagaagaaaaacaagatctaaaatggtttaagtagtatgatagcaattcagaaaatatatggatattaattcagaaaatatatggatagatttatagagaaaacgtattagcagcaataaactgctgtgttaataatactttgttgggattagaaaagtaagatcctatactgaaacaataatatatgctggagattgtttgtgcccccagtgaaggacattcacatttggagggtttaagagttagtggagagatctaataaggtagcttacttccctttcttaccttatctttcatttctaggctttactcgtttatgtttttgcaatctaccatcctgtaaagaagggatttattggccaggggcggtgcctcatgcctgtaatctcagcactttgggaggccgaggcgggtggatcacttgaggtcaggagttcgagaccagcctggccaacatggtgaaaccctgtctctaccaaaaatactcaaaattagctgggtgtggtagcacgcacctgtaatcccagctattcaggaggctgaggtgggaaagtcgcttaacctgggaggcagaggttgcagtaagctgagatcacgccactgcactccagccaggacagagcaagaccccgtctcaaaaaaagaaaaaaaagaatgaatttagggtgcattttggacccttggaccctgtcctctctgccttttttctagctgattgactattgccctagaaaccagataggccttcccaaattagagctgaattcagtatacctgtgatacagctctaaatgatgttatatatggagagcaaaatagtcaaaaacggagttctatgtgctttttaaaaaaatttcttctttttagaaattatttttttgaatgcaacagttttcttaaagatattcttagaatttctacggcagaagctaagaaagctttttctaaaaactataatcatgtaagatatgaagtaactctttttctttttgagacagagtctcgctctgttgcccaggctggagtgcagtggcacgatcttggctcacagcaagctctgcctcccgggttcacgccattctcctgcctcagcctcctgagcagctggtactataggcgtccaccaccgcgcctggctaattttttgtatttttagtatagacggggtttcactgtggtctcgatctcctgacctcgtgatccgcccgcctcggcctcccaaagtgctgggattataggcatgagccaccatgcccagccagaagtatttctttttttaatagtagtttcagttattcaatgtatttgaagatagctggaagtcctatattcaacaatggctctaacacaacaacaaagtagattacatatcacattttgcctctgaagtaagactgactgggctcacacttgggccatcaagttaacctatctgaattttgggtcttttaaaaaaataagggtaagaatcttaaggattttataaatattaaattaaatgtcattatttaggtgttgtttagcacagtacccagtattagtaaacaggcagccctaaatcttatttcaaacttaattcaagttttgtttgaccagtaaaagtctctggtctgacccaggtattcagaaatgcaacttggatatcccttttgcaggatgttttgtacagtcccttcttttcaaatggcattgcttttatgtctgacagaaattacagttgaaacaagtactttttaccaagaaaatattctttctaaattaaaaagataaaatttgagattcaaatggaagtcatatttactttgctttaaatggccacagacatgtcttttaaagctacttaaaatatttagttttggaattcttcaagtagtctaataaccaggtaaaagcaaatcttttccgtcgcctttaatacatttttgtcctactccaaagaaataagcattatcattgtaaattcttttgtgttttggatgttttgtagggaaaattaaaagtatatgcaagcaaactcatttaattgttgttatgtcaccatactttttaaaaatgtcactgctagtaagtactaagtattttgggttgtctagatcagaggtccctaatccctgggccacagactggtagtggtccgtagtctgttaggaatcaggcgacacagcaggaggtgagtctagggcaagtaagcattactgcctgagctctgcctcctgtcagatcaatggcggcattcaatgctcataggagcatgaaccctattgtgaactgtgcatgtgagggatctagcttgcgtgctccttttgagaatctagtggctggtgatctgtcactgtctcccctcacccccagatgggactgtctagttgcaggaaaacaagctcagggctccccctgattctacattattgtgaattgtataattattttattatatattacaatgtaataataaagtgcacaagaaatgtagtgcatttgaatcatcccgaaaccatcacccctctgcaaccccattccctctccccccaccttggaaaaattgtcttccatgaaacaagtccctggtaccaaaaaaggtgaggggttgctgctctagatctcagattttgatttaataagtagtttaaagaaaaaaataggtgcagatctctagactaacctgtgtgtgctaatttactttatcttagggatcctgcctttcagatgattacaattgccaaggaaacaggccttggcctgaaggtactaggaggaattaaccggaatgaaggcccattggtatatattcaggaaattattcctggaggagactgttataaggtaaaaatatgtcccatgcccaccaaaaatacaaacaaaaagacccaccagtggtaaagtttattttttcttctttattagtgaatttatatccactgtgaccatacctcagtgaaaaatacaaaggaattagaagataagactattgccctcaaggagctttaaactaagaaataaataggttcttcttctatgaaaataatagatatttctgactgtaagataaggttattatttttaaattacatgctgttcaacttttatcctgtatctgattgagagaaattatatttgatgacttgttatctttctactactttgagtttttattaagttggatcagtagaactttaattacattcatttagcctctactaaatgcaaaacaaaacagaaacagcaaacaaaatctaatttctgaattcgcagttcttgtagcttgagctaatgagttttatcactcattaaaaccagaaaatgtctttttttaggaattagaaagtcttactctcctcttcagtgtaagaaatatataatgagctccctttcactttggttggtaggaagctcagacccaaatttgaaggacaaccccagcagtttaacaaactagttactatatttaaattctcattcttcttggatttcatttgctgtttctgttttactaaagtgattatgtgtcattttttgaaaattgcctccatttgattttggagagatatcagatataaagaatttaataaaattatattaataattaagaattaataaaattaataaaatattctccatttgattgactccatttgattttggagagatatcaaatgtaaataatttaataaaattatattaataattaagaattaataaaatattctattaatatcaagctatatagcatgagaaaggatcttcttattttgttcttgttgtttggttaaataaacagtcctactacttttacccaccgcccatatccctcccccaccactgcaaacacttgtttactaagcagtttatcttttcagctggatttttttgtcttgttagggaaaaattccgttttaccaataacttccaaaatagttgtagtactttcaattgttttatgcttgttcagataataaggcatcttttaaatatactttccgagttctaagtgttatagaggccaggcatggtggctaatgcctgtaatcctagctttggggaggcagaagcaggaagattgcttgagctcaggagtttgagaccagcctgggcaacgtagagagacttgaattctattaaaaattaaaaaaaaaatcagcccggcatggtgttgcatgccagtagtcccaggtacttggaggctgaggtgggagtattgcttgagccccgaagatcaagagcagtgaggcatgatcgtgccactgcactccagcctggatgacagaacaagaccctgtctcaaaaaaaaaaaaaaagtattatttaataagtttaatggcataaatttttggctattaaatttaaattattaaataaatatttaaaagctaaatttaaacaaattcaaaaaaacaaaaaaatgaattttttcttccaagaattgaggtgttactttagtgttaaagctgagaggtgtgtgtgagtgtgtgtctgtgtgtgtgtgttcaatatagtaaggcatttcttaaactacacttgatataatgcaatagtagatcagggtacccaacaagtgataagaatttgcttcctttttttttttttttttttttttgagacagagtctcactctgttgcccaggctggagtgcagtggcacaatctcggctcactgcaacctccacctcccaggttcaagcgattctcccacctctcagcttccctagtagctgggattacaggtgcgtgccaacacacctaactaatttttgtatttttagtagagacagagtttcaccatgttggccaggctagtctcgaactcccaacctcaggcgatccatccgcctcagcctcccaaagtgctgggggtacaggcatgagccaccacgcctgacctaagaatttgcttttaagacaagcatcaatttgtgcttgtttgttacgatgaaaactatttggagttagagtaataagttgatagcggtggtgctgaatgactctttatcttctgtcagtgatagcagattaagaaattattcttatgatatctactttttcttgttagaattttactgaagtattaaaaggcaaaattttctcattgactatattctctacttagcactagagggcagcacagagctattaatgttcttcctacctggtcatatctgaccaaggaaaacaggcaagatagaaaaaggtgtaggagaagaggaccaggggtgatggctcatgcctctaattccagcacttttggaggcccaggcaggaggatcccttgggcccaggagttccaggttgcagtgagctatgattgcatcactacactccagcctgggcaacagagcatttctaaaaaataaaaaaatttatagaagtaattttctagtgcttacattatttttaaatattttctcaagatggagagctctatgcatatgcatattcttcaaatacaaaattgatataactttattttacaacaatgtattaatacatttactatattctaaatactgttttaacatgttaataaatttctagtctgcacaaaatttctacatagtagaatctgtggaataggaaacacaaactcataaggttatcttaatgaagttgctgaactgagtaactgttaatattttttaaatgcatatgaatgctttaactttctgtaattttgttttaacattataatgtttcataattaacagtataggctatctcaagcttatagctagattatatttcatttatattttcaaatcttccaaactgtaagggagttattggaacgcagaagaaattttctttaattattcatggtttgccaccacccaccccaaaagttttcctcctggaaaatatgagaataaaatactggtttagtagaagcaaaatagtatgtttctttgaaaaacatatccagagttcaaatatgggatattatgaatacatcttttcagttcaagcagaaccaagattccctcagctctaagagctagaggcaccctataaattgagaactactgtattaattgctaaagttaaggaaataagagagctccaaggccctttcactgtgtcagctagtcccatatctatctggggtcaatcctagaccctttttctggccaagacactcctttaagcttcatacccatattcagttccctgatcaacatttttacttggacctcttaaaggtatctcaaactcagcatttctgaagcagaactcatgacatttacatcacaccatattctgctcaactcttcccaaacagagtctcttccagtttacctagtcttggtgaatgacagcttctagctacacaaagtcagaaaatttaacagcttcctatttcaactcccataacactgttcaattcattaacacataccattgacttttttactctcgaaatatctcttgaacccatcagtcttcttgatctttattcttatcactggagcttaaactgtcatcagttttgaatcagccctttcagtagcatcgtttgttcttatgcaccatacctatttccctcccaacctacatatcttactaatatttggttgcctgcaaggttccatatagtgtggcttctgccctgtccttctctgcctctccatcactatgcttccagagtagcattttctcagttcctggaaggggcgaatttctcttttttttttttcttttccatctcatatgctgttcccttaggaaacagcactccatttcctttcccccattatttccagttatcaattcaaagactgctgcctaagggttgtgttgcctgctttcccccagtctaggctaggttttatttttttctacatatgctcctaaatcccattcctttcctttgtgtcacctacctcagtttgcaatgatatatttatatttatgattgtttaatcatctctgcctgaaccacaagacagtatgtttcttaagggcaaggatgctatctgattttattcacagtaatattgttagtccccactgtggtgcctgacacatacatacttgctcaatttaaatttatgaatgaacggtcccgtagtcattttctcacatttctgaggattactgatctgcttatttacccttccactggcaccatttgggctccacaccaaggtacttcctccttgggcctttgtgtcagatttccgacaacactttaaagttctcaaatgttcatttttatttctttcttttgttgctggtaacatagggaaagcagacagaaatcaaaatcctctcttcaaatctgatagtatatttcatattttcttcagttggttctaagatatacattaaaacatatacatataagctatgcatgcacacacacatatatataacatgcatatatcggtatgtaatatacttatgagtgtgtgtatgtacgtattttttcctcttctatctctgaaattataggtctcacagtcagtgtcatcatgtaatttgtggcattgaagtaggacatatttaactttcagaggaaatctgttttcatgcggagcatagcactggaaccagggctaaggcttttagataaatatcaggatcaggcctctggatggcaaactatgaagaaaccagtcccactggtgggagctgaagaagtagcagccaagatggttcgctttgcagtgtcactctctttattcctttgccattattatttttgtcatagctaccttaatttcctcagactgtttcttggccccctttaacctattgtggacttactgtgtacctagcactgtaccagggaaataaccatgaaaaggacagagttctagttatgcctaatgaaagaattggtgattctggcccactaaaagaatcattgcccctagactgggagttgctgatttagtatattctaatgtgagggcagggaaaagcagatatgtaaacataaggaccatacagagtaagtgcaatcctttaggtaagtaaaagtgctttttgagcaaaaagacacaacgattaagtaaatcctgggcaactagagaaaacttccagcagagatagtgtttgaattgggctgtgaagtttaagtcagagtttattgcagagaagtggcagggtggatggtggcattctagatgggaattcatatgtgtgaaaacattgaggttcaaaagaccatggctggtttgaggcacattctctgagagtagaatgaagaatatgctggtgtggaaggtggatgatgaagctagaaaaagtaagttgcagtaaatttgttgtgctgggtttgggatgttgaggagtttcaacttttcctaccagttggcagccatcaaaggttctcaatctaatgagtaatataattaaatttgctatcagtatgaaaattgtccacaacagatatggaagtctcattcacttcatcttatttaacacgtataatgtgctataatttacatatgttacttaattcttatagcaaccttgtgttacatatatttatccccattctacagctaagaaaatagaggttcataaaagctgaacaacttgcctcagttcacagtaataactggagttaaaagaaggtcaccatcagtctacatcttgtaaaagtacaggaaaggaatcttaaggcttacagaaggactattccttagtattaggtataatgagttagttaagtcagaattaggctgtatagatggtttctcataatattgaaatgtattatttagaaaactatataccaaagtcaatatagaaatgaatagtactggtcgtttttaacagaagtgtttatgtggtcaggaatatattattatttcaacatctacatgaatgtcaatgtgaaagaattcagatctgaagttcagcatatgaaagtgcttggcacattgcctcccatgtcaggtagttgctctgtaactgctgaattggaatctagactgtgtggaagaggtctcaacatatctctgaagttagtatcttcacatatacattaatccatctggggcagaatgcactcgaatgccagacttacaaaaatagctttgttttcatttgcaggttctgacttttaaacaggttcagaaattcacatgatcagctaagatcttattctaggaggcaaagaaaaaaactaactgctatgaatactttttagaaagaaaaaatatgtaaacaccagaagtcatagtcagaaggcattcttcttcttctcttttctgactcccttcctgccagaaaatgcagcttctatacatcagtgtactttaatacaagatgggctaaattgccttcatgtgaactttttttctgtactaacactgcatgttatgttgtctgactttgctaactatgtttaatcacatatttacataaaatcaaaaattttttttaaattatatatataacataaatatatataatataaatatatatattatataatataaatatatatatattttatatattttatatatatatatattttttttgagacagatttttgcttcattgcccaggctggagagcagtggcgtagtcatgaccttgacctcctgggctcaagtgatcctcccactttagcctcctgagtaactgagactacagacatgtgccagctattttttttttttttttttgaaagatggggtctaactatgttgcccaggctggtcttgaactcctgggctcaagcaatctttctgcctcagcctctcaaagtgttgggtgtacagatgtgagccaccgtgcctggcttatatatttttaaaaattaagttgactcttttggcttaagtattttaaataatgtttacatttcagtaggatagggtcattatgcatctagattatataatcttttacacactatttgagatatgtttctataaaatcctttcatgaatgttttatgtcaattttgttgttttcctatatattctttagtcagtgaaagagatagtacttcatgtctttttaaaaaataataatacctgttgttatttaggagtaaaataactgtgaatcaccattattacaaataatacagcttagatcaaagatcagtatccaagggatatattttagtagataagactttaaagaaagatgttttcttgaatttgtggaagttacttaagtaccatcaaggtgaaaatctccctttttaaccatataagctttttctgtagttataaaaataatggtttctaccactgtactaattaatgataaatagggaaataccttaggaactgtaaaagaagaaagcttatttttattttctagtttgaatgaaaagaaaagacaaaaactgggaaacttatctaacatatctaacaaccacattaactcttgttcctgatatgctctgtcttactcagttaggctagctgtgagcaagccaggccttagcaaaggcaacaccaggcagccagttagaattgtcattattagcaggatatggctaacaatatatgcacagccaactaggccttaatcatagggggatagcaggtatagtaaaaaagattatgctgaaatatgggtaggatcaatataattaaaatccttggccaggcgcagtggctcacacctgtaatccgagcactttgggaggccaaggtgggaagattgcttgagcccaggagtttgagaccagcctgggcaatgtaatgagacctcatctctacaaaaaattttgaaaatttaattttttttttttaaaaacccttgactaaagttttaaaaatctcaatgtgggataaatccacacacacattgaacagtttggtgggaggacatatgtaggaatgcagagaaaataaaataaatgagttttgtattgtgaaatatcccacagttatttggcccactttatcacagagtcagagctttatcagccccatagtgctcagtttttaaaacaggtcccttttcctggtatactggcctatgtcctacctaccatattaagaattctttaccacgtaaatttattcatgcaatacatgaaccattccattttactcataatatatgttaccaaaccagactttaatcaagagattttgctactgaggttgtctaagattttactttttactctttttgaaggcattcttcacgaaaacttttcattgctttaattacatcaattaatttttttttaaatacctcattagttcctttataaatgttactgtttttgttaggatggtcgtttgaagccaggagatcaacttgtctcagtcaacaaggaatctatgattggtgtatcatttgaagaagcaaaaagcataattaccggagccaagttgaggtaactatactatccatgagatagaatgagtcatttagaatgtctccttgaaagcagtaatttaagatgtattaagtactttataataagtattttttaataacatctgaaacattatcttggatttcagttgtactatattcatagcatatccataaagtgatttctttttagtactaggttagaatctgcttgggagatagcattcataagacaaaaatccgacaacattcagccagaaaatctgtcatgtacatcacttatagaagcttcaggagaatatggacctcaagcctcaacattaagtcttttttcttctcctcctgaaatactaatcccaaagacctcatccactcccaaaacaaataatgacattttatcttcttgtgaggtaagtcaggtaatcttaaatttctctatatatgcactccataaattccctatacatttttacattggttatgtacatatagaattatttcagtaaaattgttaacaaattaatatttctttgaaagatttttttctatttaaaatttttatgctgtgttttcaataaacatattttaagtcagcatgtcctgtgtccaggagcatgattggttagaaaataccagcatgacaaaatggttccacaaagatatgcctagatatcactcaaaactatgttaagaatgtcatatttggtttcagttggtttagttatttgccatttctgttctctgcttgactgaagtgaggccatcttcctttttgttccttagcttctttcccacacagtgaggctaatcccaggcatccaatctaagaaggtattgctccttcatgtgtgcatgctatagttcacccaagtagaatcacacaaaatggggaatttctatatcagaattaacatactcaattactaactgctatattatctgaacaaattacagttacagaataaagtgtgtattatttatatctgtgttagctgtaaaataggaaacttaagcttttagtcagtagaataaaattcatcaaaggtaacttcagtctctggtacatgctgaacagagacagagtataagattttctgtcagccccttatactttgtcacttggagctataatacttttaaaagacaagatgagtggccttatattttgttatccttggatgtggtagagctgaaagcaattgttacctttaattctgaattgctttgtttgaagatgcatataccaaaattttagaggtttcatatttgagggataattactttaatctctttaaccattctttttatgttaacatgggcttcaagtgacctactttagtaaatgacattgcatgttcctcattttctttcacagataaaaactggatacaacaaaacagtacagattccaattacttcagaaaacagtactgtgggtttgtctaatacaggtaaatacacatttaatttctatttcctgttttttatttcaattctctctcaatgaggagtgtgtaatgtgacttaagactttgaagaagggtgaattatgtctttgttccttcagtgaacgaaaaagtaaaaataatgtctttccgttgggccctgttaaagtatgacttttattagatatttccctgaacaaagagttgaagtttcaaaagatgcattgtcataacagtgtttatgaagctgtaataattaatgaattgtttaaatcaaataatggaaagtcttctataaagatcaagattaggttgccatgtccttttagtgcaatactgatgaggcatattaaatacacctttcggaaaacacattatagaagggagcataccttaagaaaagaaatgtatcttgtttttttggaagaaatcatatggatatcaattataaagggtgtcagtattgttaattcattattattgattcttaattaccataaaatgatttactgactttttaaaacaataaagcgttaattatctaagccaaatgtaaaataaagatttttatgtggctataaggtgcttacaggatcaatacgaagaaaaaaagccccctgaaattatctcca

SEQ ID NO: 739 - DNA, 1745 bp, Homo sapiens
  source 1..1745: mol_type = other DNA
agtactgaaggtggcgcctcggcagcgggctagaggccactggcactgagcttgcaaccagatccagagacactgaagaagagagaaaggtctgaagcggggctgatttgttgtgggtgcaggggagaggaaggctggaactggtctggggtcttaaacacgtgggggacgtttacagggtctgggggagggatccagccgcgtcgaggggctgcagcagctccaggcgcccaaactcagcagcttctctcccccgcaggcgcacctcttcccgccactcctagccccagcctccaaggatgcggctcctcgagaaactctgttcctcggccgcaggcagctccgcgccgaagcccgccttcgccaaagtgctcacgccgaatcgcatccccgaattctgcatcccgccgcggctgccggccccttgcacgctcgagtctccaatccgggccgccgccgtgccccggcgctgcgccgctgaaagcgacctgtggccccgcgcggcagacgaggacgccggccgcacggactgggacccgcgctcgcaggcagcgctgtcactgccgcacctgccccgtgtgcgcaccacctacggcttctgcgcgctgctcgagagcccgcacacgcgccgcaaggagtcgctcctgctcgggggcccgcccgcgccccggccccgggcccacagctgcggcggcggcggaggcccggacgcccccctggggaccctgtgcggcccgcgaggtccgggcccggccacccccgcggcccccggcggtccccgcctgccccaggacgcgctcgctgcggggccccgccgctgccgcctcctgcgcgtccccgacgggctgctgagtcgcgcgctgcgggctggaaggagtcgccgcctggcccgcgtccgctccgtctccagcgggaacgaggacgaggagcgccgcgcgggatccgagtccccggcccgggccccctcctcgagcccgctgtcatccagggccccgcttcctgagcgcctggaggccaagggcaccgtggctctgggccgcgccggcgacgccctgcgcctggctgctgagtactgtccgggaacccggcgtctccgcctccggctgctccgcgcggagagcctgttcggaggcgcccccgggccccgcgccgtccgctgccgcctcagcctcgtcctgcggccgccgggcactgcgcgttggcaatgcagcgctgtggtggggcgcagccgcaaggcctcctttgaccaggacttttgcttcgacggcctctcggaagacgaggtgcgccgcctggccgttcgcgtcaaggcccgggatgagggtcgcggccgggatcggggccgcctgctgggccagggtgagctgtccctgggcgccctcctgctgctctgagggcccagccctccccggggcgctctgccctggagactccggacactgacagccgcgtggtacagaataaacgttatttatttttttatttatgatactgctttattgacgttttacttcctcaccatccacatttgtcatcgtctattggtaaagaagaaaaagataatgactccctgttctgttcacaggacccccatatctctttccagaccatttttgcattccaaggaaaaatgggttggcttgggactgggagagaaaggaagtacacccatctgcattgtttttaattccttccggttttctatcaatgttacagtttttttttaataaagcaagttattcatt

SEQ ID NO: 740 - DNA, 28144 bp, Homo sapiens; identical to SEQ ID NO: 74
  source 1..28144: mol_type = other DNA

SEQ ID NO: 741 - DNA, 32744 bp, Homo sapiens; identical to SEQ ID NO: 139
  source 1..32744: mol_type = other DNA

SEQ ID NO: 742 - DNA, 19252 bp, Homo sapiens
  source 1..19252: mol_type = other DNA
gccgcgcggcgcatcctgcgggcggcggcggcgggcgaggcgcctgcagccgggcgcaagatgatgaagtttcggttccggcggcagggcgccgacccgcagcgcgagaagctcaagcaggagcttttcgccttcaacaaggtgcggcggcggcccgggcccgggctcgggcgggagggggcgggacgggggcctgggctgggggcccggggtcggagccacgtcgggcccggggggcgggggctggcatgcagcgcggcgcggggcggggccgggccgggccgcgcaccccctcggcgggccccgctctggctcggactctgggtgggtctgggtctccggccgactttccgtgtctgctccccgagtctctgcgggccgctctggccctggctctgccagtctgtgtgtgtgggggtctgtctctgagactctttgcctgtctctgggtctctgtccctctttctccgccgctgaccggctgtctcgccccagttgtgcctgtgtgtgtggtgggggtgtctctgcctctgccccttcctatctctgcctgtctccctttatctctctgcctctcatttctcttgctgcctgtgcgtctctgagtcttctttgcctgtctctccctgcgtgtctctctctctgtctctgtggagtctctcgacctctgtcgctcacttctgtctctttatcctttttcttaggggctccattgcgtccctgctcggcccttgggacagccctggggcccggtttgttttgtgctttggcacccaggagggtgagagagttagtgggggcgaggcagctgtggggggtgcggctgggaaatcccttcaaggagcctctccttccttcccccactgctccaggctctgccttgccctgctctgccctgcccggggctccgagtccaggggacatgcctggctgtgtactacactgcacttcgcatcgtggggcctcagtttccctagctgtgaaatgaggctacttttctccatactgtgggccctggctccctctgccacatgggccagctgtcctgcctttctgcaccaaggtggagtgaggtggaggcttttccttcctttcccggagtgggacactaggggccagggaaaggggccgcctcagcccccgcctccctctgcactgatgttagagcagggcctcagcccactcctggctcactgctctggggacgttggttttgtcctcattcttaccccagagcccactgatggcagagcctctcagtgctcttcgaaattagagttatcttcaaaatacaggtgagaaaattgaggttctgagaggggtgacggcttgcccggagtcagagtgagctgcaccaatatctttcttgagttcttgtgtcagtggggttggattttagccttgaggggcagggatttttccaaggggctgctgtggtcctgggccagtgttgtgccaggcgccctgggctgccttgaggagacacttgtcttggaggaggctctgggacggctggacctggagtagtggaggcactgggatgtctcagggtttccctgcctaggtctgcagtgattgccgatgagagctgccaggaccctcacacggtggctgagaacctgctaggaacctgagaggggcccagaagggaagctggtgctccgtggtccccagatggcacctattttctgtgccggggaggctgtgagggtgaggtgagaggagaatggcccttcagggaaaggcagcaacaggcacagggctaaatgtcacttttttttttttgaaatggggtctcactctcacccaggctggagtgcagtggcacaatcacagtccactgcagcctcacaactccctggctcaggtgatcctcccatctcagcctcctgaagctgggactacaggctcgtgtcaccatgcccggctagtttttgtattttttgtagagatggggtttcaccatgttgcccaggctggtctcgaactcctgggttcaagctatctatccatccatgttggcttcccaaagtgctaggattacagacatgagctgccatgcctggcctaaatgtcatttcttcagccagtgaattggggtgtgcagtgggggctggagacagatgggggtgaagctcagcccactctggctagccttggggtggcggaaagtaagggccctccgctgaggatgaagcgtgggcagcagtggtggaaagtggggtggtcttggggaagggacttagtcacctaagtgggtaataggtgatcgctagggaataggcccctgattcctgagcttagggggtgggagacaggtcaggagtgagcagggactttggactctgagtcttgggttcaaatcccagtccagcccacacatcgcctgtggaatgtgccttctctgttaatactgagccccactgtgtgtgaggtctccaaggtgctggggacaacagtagttaccaaaaaggacaaatacctgttaactcaggtggctgatatagttgtgcaggagacagtgaaaagccaaaacaaaaaagtaaaatagactgtagttgggatggtagccagtgctgtggatcaaataaagtagggcgagggggtgagaggtgtggccagggcggctgctgcagccagggtggccttgggaggcttctctgaggagattactcctgagcgacaggaagtgctggaggaagtgcgttccaggcagaggggcagtaggtgcaaaggccctgaggcacaagcctcccttagctgggagccccaggaggatcctgagcaggggagggacaaggatctggctgtggctttcataggatccctctggcctctgtgggaacagactgtagtgagtaccaatccaggcacgtgacggtggggcctggagcagggagggaggtgacttctgtgtgttttgaaactgagttgatggggctcagaaatggactggacgtggggtatgagggaagcagatgctggacagtgcatgtaacctcctttcctcgtttgtaaaatgggaaggctgtggggatttgcgatgcagtgtcccgtctctggaccctggttgtagcgagggactggctagacaaggtcaggtgcagcaagggcgtggtattattggtgggagagagaagccccagccaaatcgccaactctgtccttaggtgggcttactgtcccaagggcccagatgagagactgaagcttggagagtactgagtcttggagagtactgtgacttgcccaaggccagacagctaggccgtgaccaaaccagctgcccagagggctcagtccccacctggatgggcagaggcaggcagggagggaggttcgcgttacaggctgggaactggggtttcttacaaatgtgcatcttcctgaggcagtgggtcaggaattaccagtggtaaaagtgaaaaataaataacaacaacaagataaaaggagttaccagtggcccacgtgggtgtcctgcactggtgttcaggatggggctggagctcagctgtgcaggcttcccagggagggcacagccaggccaaagacaggagactggtgcagaaagggtgtgctgtgaaaggggcaggggagcgggtggggagctgtttcatcgacactctgggcacacagacccccttaacaccatctccgcccctgatggttatgggagtcatgttgcccagctgttggcaggtggggaggtgggaggatgccttcggggtccaggcagaaagctacccctctctgggcctctgtctccctgtgtctgggaggagtcaaaagcctctgcctagctgatcctggatgttgtcccttgacctctgacctccactcaggcctgtgtttggggagtgtcatggtcatcttgcgggactcctccgcaagctttagtctgtgcctctaaaaatggggtgcagagcccttcatggagcaggtggggcctcatcagtgcctgcacctctgtgagccttgcttcacctgtttgttgctggagcctccatgcagtggggcccacatgagcctgtgtgcattgaggggcacaggggcttggcaaagggcgggcctctgtggactatgcacgcggtacagtcatggtggaggctaggggtttagccacctccccaccaactggaggcatgataacccatttcacagttgaggacgctgaggcacagagcaagtagacctgcctcctacccccagtgtgtcagctgcagaccctggaggctgccttggggtgggcctcagggtgggccatggcagaggtgcctgggagtgcttacccccagcagccctcccctccttgcagactgtggagcatggcttccccaatcagcccagcgccctggccttcgacccggaacttcgcatcatggccatcggcaccaggtctggggctgtcaagatgtatcctttgcaggacaggtgttcagggtctgttcaggaccacctgcctgtagttccctgtgctctggggtcccagtcttggcagtgtccagctcgagaggaggacagaggtgctctgatgggcagtagtgggggcttctgcggaggttggcgtggcttctgtacctgagacaactgtgcagagatgatggggtccttttgctgagagacgggtggtggggggtcagtttgcagtagcacagctgtcccttgctacgtgtcagccagccagttacctaggcgaccctgccatcgtcccagcaactctggggaggccaggcagaaggctgggctatgatacccatggagggtggcaggtgggctgggggccctggtgagctgatgcacacatgtgtgaatgtgaagacacatgtgttcagcaaaggggcctgggggcagtgccaggctcggcatggtgagcacagcacggcccccacctggatactggctgctgcacaatgggctgtgtgagccacacaaagcgggcattttccctgcaggcctggggtgggggtgggggcaggccggcagctcagtgtctccttgccagccctggagaatcccaccccaactgctcttggggaagccgaggtgccagggtctggctgatggcggcttggtgaggggtgctgacccctacccctcctgtgtggccttctgggtttcagtatcctggtttcagacatcagttcccagaaaatgtgtcagtgctgggaaaggggagggtgtgggatgggggtctcctcaccccaggactgggggcactgatcaggcagggatgggactctgagcctgtggtttgtgagctctttgcctactctggggagtgtggatgggctgagatgtccccttctctcccatggccccagcggcctctgttggtgagtgtggcagtgctctgggccccacatgctccgctgcctggcctgctgctcccactcctgtgggtgctgcgctgcgtgcgcacatgtgtccctgcagccttcaggtgtccctcctgtgttggggtctccagtgcacttgtcctcaggctcaaaaagaacctgaagtgcagatgaggagactgagcctcagaaaggaggctggagcccggggtcctcttccctttttcccctgactgccactgcctggagccccttgggttgggaaactgaggctggagagggccagccctggtcactagaagctgcccctccccctgccaggccagccccatctccttgacgaccctggttcccgcccagctgctcctgtcccctcttttgtcccttcttcggagtttctcgccaggctcctgtagggaatctgagctcaagctccaggcaacggctcctgtgttgtcaccggggcaacgttgctgactcctccctgcaccctctgtcatggggccccctcaggccctgctgtccaccatcagccctggagttgccgggactcaggcactgacactgggcacttcaagcaggtcatccaccccctccaagtctgtgtgctcatctgtgaaatgggcaggctggagtctctcctccctcatgatggcagttgttggctgcctgctttggagggaggtgggttttttttgttttgttttgtttttttgagatggagtcttgctctttgttgcccaggctggagtgcagtcgcacagttttggctcactgcaacctttgcctcccgggttcaagcagttctctgcctcagcctcccaaatagctgggattacaggtgcctgccagcatgcccggctaatttttgcgtttttagtagagacgaggtttcaccatcttggccaggctggtcctcaactcctgaccttgtgatctacctgcctcggcctcccaaagtgctgggattacaggagcgagccaccgtgcccagaggaggtgggttttcttacccatggctgaagtttggcctgaagctgtgggaaaaggcagcctggactcttctgccccctggctttcttgtccaggcctggccttgcacctctggcctgcctgatcccatccggcaaggcgcagctcccagaacccatagacacacggagctgaagtggagcggagccccatcctctcaccaggctgaggccaagcctgctgggtgtgtttattctcacttgatctgcaacagtcctgtaaagtgggagtcactggcccaatttacgggaagtgaaggtcctatagcagcacctgacttgcaggagtgagtggagcctgcacactgatcttggggatactgtaggggtgcagagtgggagctttagggagggggcctccgttcttcagggaggactcctggatggtcaggcccatgccggggcccactggaatagtccgggtcaaggaggagccttgggtgtcttcctcactgtggtttgctggtctatgcctatttccaccttgacctgccaccctcagctatggtgcacctggcgtggagttcacaggcctgcaccgggatgcagccactgtcacacagatgcacttcttgaccggccaggtgagcctctgcttcccactagccagctccctgtggcccccatatctactcatccccctaggccagcctagttttcatctctgctcacacaccagggccgcctcctgtccctgcttgatgacagcagtctgcatctctgggagattgtccaccataatggctgtgcccacctggaagaagcactcagtttccagctgcccagccggcccggctttgatggtgccaggtactggagaacttggctggggccagccaccgggcagggaggatctgggggaggctgtgggaacctgctgtgcaaaggcagcatggagatgggcagcggttcagggcgggatgccttgagctgggcctgggtcccaggctgcagctgttggaccctgctttactgaggtatactctgaacttttcaggttaaatgggaggtttgggttgagtccgacgtgagcaggtaattaacattgtgagcagcaggaggtacatgcattatatgccaaacttctaggacctgaggcctggcactacacttactgcaatgatgggggtgtctaggggtttggggcagggcctaagccagttagtaacaggaagggtcccctggcctcttcagttgtgggtgggagacaggcctttctgtgcataggcagggttgagggcaaggagggtcccatgggctgtgcttggtaaggcgctggcagcatgccccagctgagtgagagtgtggggcatctctctccccagccctgcctgaaatagctggaaaaggggagtaccaacccagggatggattcctgatgcctcccagcttctgcagatgggggtatctggggccctcctgcgaagtcaggagatgtctgagcgctggcagcgggattcctaggaggggctcagcggggagctcctggtcctggcttgggcagtgccctggttcctgctgtcctctcctggtgggtgggaggagctgggagcccagtctgcaagacctagggaccctatttttatccatctccctgctgacatcctgatgaataattgagcgggctgatgatgatgcatgtcttcctggggtggctctgtaagtaggccctggtgagtgctgtggggccagtgatgagttatcagcagtggcccagcccctcacaccccacctgagcaggtggatgggcttgtaccctcactcccttccccttgttccctgcagtgctccgctcagccttacccgagtcacagtggtcctgctggtggctgccagcgacatagcagccctgggcactgagggcagcagtgtcttcttcctggatgttaccaccctgaccctgctcgaggggcagacgcttgccccaggcgaggttctgcgcaggtaagaggccggtgggcttcccagcacccactgtgtgcccgggaagttctgctggctcacctgccttcctccacagcgtgccagacgactaccgctgtgggaaggcactgggccccgtggagtcactccagggacacctgcgggaccccacaaagattctcattggctacagccggggcctgctggtcatctggaaccaggcctcgcagtgtgtggaccacatcttcctggggaaccaggtatgtaggtgaggcctgtgtcccctcagcctgggccccttgtgcatgcccaccatggctcatgcctgcctgcctgcctgcccctgcctgcccgcagcagctggagagcctatgctgggggcgtgatagcagcactgtggtcagctcacacagcgatggcagctatgctgtctggtctgtggatgccggcagcttcccaacgctgcagcccacggtagccaccacaccttacggtgagtgctggggacaccttagccagagggtggtgatgggagggggcaccactgagccaagccaaactggctgaggagggacttccccgagggggtggtctgggggcagtgtgtctcccgccgacttcccggggaggcaggaggcagctgtaaggtagagagcagtggagggcagagcaggaatggcagaattgctaagaaccaccagtgagtctggtctgacgctgtcccacccctcaggcccctttccctgcaaggccattaacaagattctgtggcggaactgtgaatctgggtaggtcgagggagtgggtgtccgatgtgagttgggtctggctagggggctggaagggtgggctctccctaggttgtgcagtatgtgctctggacccaagtggttcatggctcgcacacctccctctgcacataggggccactttatcatcttcagcggtggcatgccccgtgccagctatggtgaccgccactgtgtaagtgtgcttcgagccgagacattggtgacgctggacttcacttcccgcatcatcgacttcttcacagtgcacagcacacggcccgaggatggtgcgtgccctgccgtaccctaccctttcccagccccacctggtgccctctgccacctatggctgtgctcaccccatactccctccgtcccacagaatttgatgacccccaggccctggctgtgctgctggaagaggagctggtggtgctggacctgcagactcctggctggccagctgtgcctgccccatacctggccccgctgcactcctctgcaatcacttgctcggcccacgtggccagtgtccccgccaagctgtgggcccgcattgtgagcgctggcgagcagcagagcccccagcctgtctccagtgccttggtgtgtgcggcgatcaggggggtcttacagggtggagtcttgaggagggggagagtttcagttctaagcccggaggtcagaatgtgccatactcggggtgagagggagaagatgttcgtcctaaccttgtgcatacatctctgccaccccctcccagagctggcccatcactgggggccgaaacctggcccaggagccgtcacagcgagggctgctgctgacggggtaggtgtgcgtgcttatgtgggtgagtgggccccttgctgttgggggagagcccatcctgggcctggtgggtgcagaggtgccaggagactcaggcctggcccctggtgggaccaggtagttcctccttgcccaaggtggtttggaatgaaacctccctggaccttggttcaaggtgctgccctgatctgccttttggcctggaactgagctctaccaaaccccagggctccacccgcccagcctgcctgccctgggactggaaaatctgggctggcccacgctgagctgcccagggaaggtgccagagagcccagcgtgggcctggcgggcgctgacgtgcccagtgactcaggtctcaacttcctgccctgcccccactcccgcctgtgctgggaccctcaggcctctgactctggtgtgcccttccctgctgaagagcttgccgtggctttcagggctgctggaatgagtctcaaccacccccacagtcacacacctctcacgccctggctctgggctttcaccaccgcctggggccctgcttggactctgcagctgtgtcccaaggctgcgccctagatttgtctactccttcccctgccccctccctgctttctcccggcctctgtagtcttcctgctcctccacctacgtggctgccttgggccccatgcagctcctcccccgggatgccccatgctctgttctgtgactgccttactcttgatcacctctgatggctgctccagtgcaggcagaacccccaaagtcctctgttctctacatgtccccctttgccacctcctgttaatcagggtggtcatttccaccttgtttggtttaaaggctccaggtgcatatggtgcatgtggcctggcctataacaggtgcacagtgtacctgtgctgtctacagtaggtgcctattgttttttgtaaaagtaggattccggtcagtgtttggcacgtgcagtaggtgcttagtgagtggttatcagatgagtgaatggaggggcgtgcaggcctcccaggaactcgggtagccctgacatctgccctccctgcagccatgaggacggcaccgtgaggttctgggatgcctcgggtgtggcgctgcggccgctctataagctgagcacagctggcctcttccagacagactgtgagcacgctgacagcctggcccaggctgccgaggacgactggccacccttccgcaaggtgggcccctcccctggccctgatgagctggtcctgaccccgcctggactcattactccttcccatccctctaggtgggctgcttcgatccctacagtgacgatccccggcttggcgtgcagaaggttgctctctgcaagtatacagcccagatggtggtggctggcactgcaggccaggtagggctgggtgtcccctgggttggagatgtcagggagggctttctggaagagatgagctggagggtctggtggaaagggagatggactggcacaggcaaaagccaaggtgggaatagggctctgggtggggctggctggggtgaggacagatgggaagtgggcctgtcgctgggggaaccacagtgttgagaggagggaactcatgtcagtgctgtgctccggcactcacatgacatacaggaggtgctcaatgtgtccttattgctaaatgggagatagaggctcagggtaagggtggacactttgccctcagagggcagggactagtgtgtcttggtcaccactgtgttccttgtgctcagccagggccttggtatacagtaggcattcagtgagtgcttgtttagctgatgaactgaagacagtcctagaaccaccttggtggtggctggggctgcttcagaggctccaggctgagtggggcccagggcggcccctcccctgcgctgatgctccccctgcctggctgtgggctcaggtgctggtactggagcttagtgatgtgccggtggagcaggcggtcagcgtggccatcatagacctcctccaggaccgcgagggcttcacatggaagggccacgagcggctgagcccacgcacggggccgctgccctggcctgctggcttccagccccgtgtcctggtgcagtgcctgccgccagctgctgtaaccgctgtcacactccacaccgagtggagcctcgtggcttttggcaccagtcatggctttggcctcttcgactaccagcgcaagagccctgtgctggccaggtgtgtggggtggggccggctgggcagttggagcccccagcgagatggggtctgggcttccgtttccacctctagtgtttggtgtggcaaaggccactaacctccattgccctataagaaataacctggcagctccaagaaggacattctcagtaccacctgcagctgggtccataggactgcgccagaggggctgtgactccctgacctgggtgcctccacaggccagcaggagtgtggtggctgccccaggaggctgctctatagcacgactggaccctgtcttcccccaggtgcactcttcaccccaatgactccctggccatggagggtccgctctcccgggtgaagtctctcaagaagtcactgcgccagtctttccggcgcattcgcaagagtcgtgtctctggcaagaagcgggctgctaatgccagcagcaaggtgagctggggtgggctgcacaggagctgtgcctgtgtcctgtgccttggcctggctctggcctgggacccctggggcctgcttagctcagtgctcctccctcggcagcccctgggccctccagagggatgggtgaactaagctgggtggtagaggaatggtaacagaacgtagggcgcaaagcaggatgcaagccactggggtgctagggagacagtgttcaggagcccccgcccggcagttgcaggaagccaatgcacagctggctgagcaggcctgcccccacgacgtggagatgacgcccgtgcagcgccgcattgagccccgctctgccgatgactccttgtcgggtgtcgtgcgttgcctatactttgccgacacattccttcgagatggtaaggcaggggcaggggcagggacagggcaagggttgggggggctggcctcaattggccacctgggagatgggtggtggcaagggaggtggtgggactgcaccttccaggaggtggctgggcacggtggctcaagcctgtgagtgatcccagcactttgggaggccgaggtgggcggatcacctgaggtcaggagtttgagacccgccaggccaacatggtgaaacctcgtctctactaaaaatacaaaaattagccaggtgtggtggcgggcgcctgtaatcccagctacttgggaggctgaggcaggagaattgcttgaacgtgggaggcggaggttgcagtgagccgagatcgtaccactgcactccagcctgtgcaacagagtgagaccttctcagaaaaaaagcttaccatccagctctcccagggggactgctgggtcacccccagtctctctgggggagctggatggtaaaggatttttgagtgagctgggtgggcctctcagatctgagccaggagaagggaggttgaggcctggtggatgacggtgaggggcaccagccagtgcccaggccccgagccgggcatgtgtgtgggcagctgcccagccacttggctggagtggagcaggtgagggtcgaggtgtgtggttcagggagatactgctgctggccagaggctgaggacctggctttgattctcagtggcctgggagccctgggaaggtcctggatttgttgattgagtcactgattgattttgaacttgtacaatgggagagtttcaaacatacacaaaaatagagaggtgcaaagttgtcccacatacctcacatgcctgccaccagccatgtgcccctgcggattctgcccccctcctccacattctttgctgttttttttgccggggtattttaaatgaaaacccagatacaagtacttcagcatgttcctgacagatgtcactgacagccactgctcacatcatgccctgtagaaccaatgtgaattcctgagtgtcatctgcttggtctacgagctcagctttctgatgccatttatttgtcgagggtctttgtgcagtggattttctcactgtctggatgtggcgggtgcagctgggggtggggggttctttgactttttgttttttttgactacaaagacctagaagaggagagcctggggtttttaacttgttccactggcccgagaaggccgatgggttcatgttcatggccggctggggttcctgttgggcatgttttgagttgtgcagacacttaatgcctcaggatccatcgggtcatcagggagcaggtgccgagtctgctcttgcttctgctgggctgggctctgattctccactaaagcttgtcacccagaggttcagttcacacaggcagagcagggtcgatggatggtcgtcctaggtgtccccaggcttggcggcttcctctggctgccacgtagggagcacactgaagacagtgggggtgaagcagggctaagacaaggcacacctgtcgacaggactagcaaggggacgcaggggtggagagaggagtcggggtcttgtggggcttggggcctgagtgatgctaggatggagctgcgtttactgagatgggggctgagggtgcagtgggatggggctggaggtctggtttgggtgcccatcagcattctgtgcagatgcgctacagctgttcgggcctctgcaggagggctgcatcctgggctccgactgcagtcagcagcatagagctggggtctcaggcctcgaggctggaggtcaccagggaggcatggggcaggagggaatcagccctgagtcccagggtgtcatagttaggaagcagggctacaagagaggcagggagggacctgcagtctgtgggaagaccccaggggagatgcctggcccacagggagcaccctcctacgcgcttgttttctgcaggggcccaccacgggcccaccatgtgggctggcaccaactcaggctctgtgttcgcctatgcactggaggtgccggcagcagcagtgggtggtgagaagcggcctgagcaagcggtggaggccgtgctgggcaaggaggtgcagctgatgcaccgggcgcctgtggtggccattgccgtgttggacgggcgtggccgcccactgcccgagccctacgaggcctcacgggacctggcgcaggcacctgacatgcagggtggtcacgctgtgctcatcgcatctgaggagcagttcaaggtgagccactgtgggctgtgggggactctgggggactcccctccaggccccaacctcatggacaccattggaccctcaagaaacccttcctgcctgtatcccccactgttgggaccctaattcccttgcaccccagaaaacactcccagccagcagagaactcctacccaagaaccctgatgccccctcagcctgctgagttcccctgggagggcaggaatctagtcctatctcactgtgccacacaaggctcctgtactgggcccagacccctgagcccagtccccaggggctctgcctcgaaagaactcgaggtttgatggggataccagctgcataaccttggcataactctgtgattgattttgtcacagatcgagagagggcctgggaggtttctggagtacagtgtgaagtctggagtttagtggggcagccaggtgtacaggcacgggaggccacgtagcatgcagctgggctttgtggtgggggctgttgggtcagcagccacgagggtgaggggccctggggacgaggacagggccaggctttgtgctcaccagccacctgctgtcaggtgttcacactgcccaaggtgagcgcgaagaccaagttcaagctgacggcccatgagggctgtcgtgtgcgcaaggtggcactggccacgtttgccagtgtggcctgcgaggactatgctgagacctgcctggcctgcctcaccaacctgggtgacgtccacgtcttctcggtgcctggcctgcggccccaggtgcactattcctgcatccggaaggaggacatcagcggcatcgcttcgtgcgtctttacgcgccatggccagggtgaggcggggcagaggccgaggaggccttcctcaggcgagcgaactgagtgggaccagtactgcttgggagcaggaagggcactccaggtgggcacaggcccaggccacggaggagctgtggttggtggtatcttctaactgcactcctcattcttctgcccacccaggcttttacctgatatccccatcagaatttgaacgcttctccctaagtgcccggaacatcacagagccgctctgctctctggacattaactggccccgcgatgccacccaggccaggtgtgtggaggggcagctcctagcctgggggacctgtgcccagggccaggtctcatcccacccccgagatctgccttccctgggctcaggagtgggagggcaaggatctagcgtgccagcctcaagtcatccacctatggtccccatcatggccccatctctgcagttacaggatccgagagtcacccaagctgagccaggctaacgggaccccaagcatcctgctggccccacagagccttgatggaagccctgatccagcccacagcatgggacctggtgaggggggcatgaaaggggtccagaccctggccccacggtgccctgggggagggagtcgggactcacatagctcagggatcgggcaggcttctgtaggagatgggtggttgtgtgctcactggtgccacccctcaccatgggctgccttatgggtctgtgtccctaggcccccaggtgcagagggtgctaagggtcctggtaggggctgatgacttgctccctgtagacaccccggagccacccgaggctgcactctcacccatgtccatcgactcagccaccagtgctgacaccacgctggacacgacaggggacgtcacagtggaagatgtgaaggatttcctggggtgaggctggtgggcaggtccacagggggggctgccctgtcccctaggcctccgtccccagggctgccaggggctcccccgcccccacccctgagcaccatccccatctcgcagctcctctgaggagtcagagaagaacctgaggaacctggcagaagacgaggcccacgcctgtgccatcctgatcaaatgaggtgctgcaggggtggggccctggtcctcaccactggtgacgtccacccccttcagcccgtctgggtaccatttggccctggtcttctacctgagaccctggcaggcccatgtgatggcactctctgaaacctggctgccttccatggagtgcctcaattggggacttctggtgctcacacagacaccagtgtcatggttgggtattagaaaagcagggccagcccctcagcccttgcatgtgacaggtggtggttaggacaagaccagatttgttttgttttgttttgttttgttttgtttttgagacggagtcttgctctgtcgcccaggctggagtgcagtggcgtgatcttggctcactgcaacctctgcctcctgggttcatgccattctcctgcctcagcctcctgagcagctgggactacaggcgcccgccaccacacccagctaattttttgtgtttttagtagagacggggtttcactgtgttagccaggatggtctcgatctcctgacctcatgatccacccgcctcggcctccctaagtcctgggattacaggcgtgagccaccgcacccggccaacaagaccagattaaaccacttagaggtggcagtagtttggggcttgggagctggtttggccagcctgtttcatagatgagatcactgaggtgcacgaggtcaggtctcatcggttgggcccagcaagtggctgacttacccctgcctgagtctgtggatcctcacctagatgtggggcccatagatctgcccagcgcatttgctgcctcatgttcccaggcacctgactgtaggccatagcctcaccctgcacaggacatggacacctcccagctctttgtctggtgcctctccctggcctcagtggggcatatgtggcctggcgcttggatacccatctggagactcagcaagcccatctcaggtggtcactgaagggccatgcctgccctgcagaggagacagtggcagcacctgtgtggtctggccgctgtggcaatccatctgcccttttgccctccctcaccttctgctgatacctcttctctccctcttccaggaaggccagaactatcccgacctccacctgccctgctcggagctggagtgctggatccctggcacctgcctggccccttaacatagaaccacgcctgctaacctgtaggctccactgggacctgctgtcctgtcccgcctgaccctgggccctggagcagcaccagccccagggtgtgggcctgggacctgggccagaactgagccctcctgcaggcatttggctgccctgggggcccactgcctagggaagaggacaggtggggcccagcacctgtgccacctccccccctccacacaccatccttccccctcactttgcagagtatttttccttttttttttttttcttaaagacggagtcttgctctgtcgcccaggctggagtgcagtggccccatctctgctcactgcaagccccgccttctgggttcccgccattcttctgcctcagcctcccaagtagctgggactacaggcgcccaccaccacgcccagctaattttttctgtatttttagtagagatggggtttcaccatgttagccaggatggtctcgatctcctgacctcgtgatccacccacctcagcctcccaaagtgctgggattacaggcgtgagccaccatgcccagccctgcaaagagtatttttctagcgcctgggctggacagttgtttctaaaactaaactattttggtacctgcttctgggccagtccccagcctgtcatgagtgtgtgtgtgcgggcatggatgtgactgggagctctgctgggcacccacatctggggcctagtcaggtgtgtgtgtccggcggggggggggggcaggggggggggtcaagatgagtttccctgtagattgtaccttggggtttttttctgtcgttttgttaaaattagcgccattttaatattaaaaatactgatttttaatattgaaaataaaagcatttaatatctcttaa

SEQ ID NO: 743 - DNA, 8858 bp, Homo sapiens
  source 1..8858: mol_type = other DNA
gagcgggcggcggcggcggcggcgcggaggggccgctcaccccgcagcccggcctcggcctccgccgcttgtcgtcgcgccccgcccgcgagcccgccccgcacgtcccccgccggcggccaccatgagcacaggcctgcggtacaagagcaagctggcgaccccaggtgagcccagcgcctgcccgcgtgcccgcgcgcgcctttgtccccgccgcccgcgcgcctctcaccgtgtctctccgtctctcccccgcccgccggcccggacccgctcggaaccggacccggactcgaccccgaccccgaccccgcagaggacaagcaggtacgtgcgcagcgccgctcccccgccgggagacccggccggctgtcacccattgtgacactagcgccttgggcgcccaggcgcgaccccgcccccgccggccctcacccagccctgtcgcgatcaccgattgtcagccgggcagtgccgccgcgcctggggcttcagaggagaggagtgggggccctggtccccggacccgcacagcagggaccctgcgcccctccccaggatggggggatgggcagagtgtccccctcccacagggccagtgccagcatctcctgctgacctggcctgtaggccatgagctgggggtcctgggtgaggccatggtcgtggcaggccacgctgggggaggggagtcaggctccatcagccagcacagtccctgaacagccctacagcagagggcctgtggtcaccacccacctcccctgcaccttcatgcccctttccctccccatacacaaatttgagtgttcaggtctgcaacagggactcttccccagattgggaacccccagggtctggtctgagtcattctgggtgcccagatgggtcctgggaccctgtgggtacaaataggcttgtggcttctcaaaagggttggccccaccctccaggaaagcaagactggacaggaggctggtctaggcacctgggtgaaacccagccgagctcagggttaaacaatgctgtgaggcccctggggtggggcgggggctgacaaccaggtgggctgggggggctggggaaagcctgctggtgtcctctctggcttgagctcagccatctttggaggaaaaaagaagagcccaattctggcaccagggtggcactggcagcccccatcagggatggagtttctcaggagccatggatgctgagtggaactccagagtcctggcccagggtgcagcaggcagggcaggagggcgggcaggggggccaggagctgggggagtcactggctgaccagtgccattctcctggaagggacacaccccacccagaggtggatgaggctctctgggaggggccccttggggagccaggctgggagctgcctccccatcacagcaggtcagacaaagcctgagatgcagggacacatgcgtcaggctactgtttgagggaaatggaaggaactgaggctgggaaagccaggaggccaggcccctgaggcttctcctgtgcctgcaggtgtccccagcttgacccaagggcactctgagaccctgggctccagccactgctgttgggtgcagccaggttctcttgcccattactgcagggtggggaccccctcctgctgaggtgcccatcgtttgaggtcaaccgggagtccacctcaccccatcccaggcctcccaggcctccaagcccagaggaagaaggcactgtgtggccaaggaagggagccccggagcaggagccaggccaggtgtctgggtgaccagtgggtctgggggagctggaagcacatggcagcttccctgctaccaccgttgctgagcctcagcctgtccaagcattctttttgctctttgaaagggggctgtagaggcattgggggagttccgtcactacgctctgtgcccccacctcctcacaggcagcaccggtgatctcttggccctggctgctgctcccagagctgactcgggtgattctaagaatggaagtgccagagaggctcaggcattgggaggagatgggcgcagctgtgtcatatggctcaggaagccctgggagtatcttttgtcacttggggaccagagaaagggggtggcaggtacggccccttccttgaggctcccccagggaatccacaggccctgactgggccccagtgggtggcagggcaggtgggttgaacgctgagagtgagattcttgccctcctgacctgggcctccccagaggctgtgccttaccaatggggaaactgaggcaggcagtctgagagccacacactctgttagacacctcctagcctgaggcctaggcccagggctgtctgtcttcctggagatgccctgggcctgagatgccagcctgtctgggtgggtgctgggcttcgaggtgtggaccctcagttggaaactgggtgggactcagcctagaggcttcctgcaggtcagggccatggaaggctggggccagtgaggaggctttctggcagcaaggactgagggatgcactggtagagctggggggcctggagctgccccctttccctgggatgaaaggctctcctgttcccagctgtgggcctgcccctcctccccaggtgccagtggtccaggccccacaacaggaccagggcctggacaggaagtggaggaggtctctcagccaggagagcctaagggagggctggtggcgggtggggtggggtggggttggggcctccagcttctaatgttctaatgtgcaggggcttggcctgaccagtcctaccctggaacctttccaggccccatgtcctgctccgctgggcttgcctgttgggattctactggggtcatggaggtgggtggcccacagagcggagctcgggagacccccgcagtccctggagtagccacatgggagggaggcccggctggcaggagctcccagtccctccaatcctgtgggtcagagctggtgaggatgctcagagggcaagggaatgtccacagaagcacgtgggagatgggtcccatcccacccccacccctgtctctgagggcagggccacctgagggctgcagggcagcgcatgggtggccggcgtttattcagcaggctggcgggggcttccaagttttgcagggacctccagtactccggcagcctgcacccttcctttcccttcccttcccttctgtccaccctaagcctcctaggggacaggcaggctggacttcagaaaaggtgggctctgccctcctccggtcccccgaatgtcttgggaaagagtccaccaaacacacatgcacacacccgcgcacacgcacatacccaatgcatgcacacacgtacacacacacgcatacacgcatgtatacacgcgcacacacgcaggcattacacacacacacattacacacacacacccgcacggacgcgcacacacaaacgcgcgcacgcacgcacgcacgcacgggggaggtcagccccaagcagggctggggaggggtgcagggcgcggcgtgtctgtgggcacttggggcgtcgagacgccgccgggaggttttcgggcaagtctgcgagaagacggcgggccctgaactgggcgggtacccgcgctgttgcgcgtgggtcccgggagcggcctccggcgccctctggcgggcggaagccgcgcagcacctcttgggggcgggacgcgcggtggctaccgactcccggcccgccccggcccgcgtgcaggacccggtcgtcccctcctgctgtcctggagcccggactgaggccccgggggcgcggcagggctcccggtccacgcgagccatggcccgaccgcgcctcggctcagccctgccctccgcagccgctttcgggtggctccgcccgcggcccaatttccaggcgaccgtttcccggcgacggcgggcggggccgtctctgccgccccccgccgcgcgctccgcgggcgcctgcgacgccccgcctctggctcgggtgcgggagcggggcctgcccggactgcgacgccgccacagcttggggccagttcgcccagtcagggggatggctcggtcggcctcgggggtcgacgatcccccgggtaggcgacgtgccctgtccaggcctcacttcccgcgtccgcaaaacggggtggacaacgcagcctaaggcagagccgcgccaaggtccctcgctgtcgccgggctctggcggcctgaccgggcctggggtccgagcgtgcccccgggcctgggggggtcgccgcgatggactcgctggcagcgccccaggaccgcctggtggagcagctgctgtcgccgcggacccaggcccagaggcggctcaaggtgcgtgtgtggagagggcggaacgtgggtctgtgaccccgcgggctccgggactcggcatggggtccccgtccccgcgcgccacggcccgccagcgcctaggctcagcccttccctccgcagcggcctcgcaggtccgcggccccacggtggggcgacgtgccctgtccaggcctcacctcacgcgactccaaaacgcggcggagaatgcggccgtgggacccctccaggggccccaagggtctgcgggggctgggcgcctgggcgcgcgggcgggggaggctcggcgccgcggtctataaataggcgctgctccgccaccgccgctgccgccgcccccgcggctggatccgggccaggtggggcctcccgccccctggcactctccggaggggtgagtgtcgaggcccccagcttctccggcttatggagggccttgagtgtgtcccaggggtcccaatcctgctgccctctgcccgaggagggaggacatcgcctgtgcctgctgcggcctgacatctccccacggaataaatacagtgtcggtccctgcagagccctccctgggattggggccaggggtgccttctcctgccaccacctcgcctgccttcttatctccaggcttttgcccacgggccctccccttatttttgccaacgaaatgccccaccctgggaaccgtaccctctgctgtctcctcataccgcatttggtaagagacagggtattgggcttctggagaaacctttgtgtccctaccctgttccatcctgtccccaggacattgacaagcagtacgtgggcttcgccacactgcccaaccaggtgcaccgcaagtcggtgaagaaaggctttgacttcacactcatggtggctggtgagtgggccaggctcctcgggggagtggctggggtcactggccagccaagctctgtcgttggagccccagacctaacgcagctccttctctgtacctgtgtgcaggtgagtcaggcctggggaagtccacactggtccacagcctcttcctgacagacttgtacaaggaccggaagctgctcagtgctgagggtgagtggcccccaggaggccctggcactgatccccagtccccttccatgggacctctccaaggactccctttcaggtccagctcccactgttctgttctcgcggtgtgggtcccctgggggtagggccaaggcaccaagatggatgaggacgagggtcctggctgccaagggtgaggggctgagggttggagaggcccttccagtggccccttccccgtagagcgcatcagccagacggtagagattctaaaacacacggtggacattgaggagaagggagtcaagctgaagctcaccatcgtggacacgccgggattcggggacgctgtcaacaacaccgagtggtgagtgaggcctgctgagaaaggccttgcctaggcggccacagcactcgaggcctggcctcacctccctcctgcccacagctggaagcccatcaccgactatgtggaccagcagtttgagcagtacttccgtgatgagagcggcctcaaccgaaagaacatccaagacaaccgagtgcactgctgcctatacttcatctcccccttcgggcatgggtgtgtggctgtcctggggccaggctcgggagtgcagcccctacaatatggccccctggctgtgcctatgcccacccttggctgctctcggcaggctgcggccagtggatgtgggtttcatgaaggcattgcatgagaaggtcaacatcgtgcctctcatcgccaaagctgactgtcttgtccccagtgagatccggaagctgaaggagcgggtgagcctgccgtcgcacaggggcctggccagggccctggggctgagagtaccagggggacttgtctggcctcaaatctgatggtccttgccccaccacagatccgggaggagattgacaagtttgggatccatgtataccagttccctgagtgtgactcggacgaggatgaggacttcaagcagcaggaccgggaactgaaggtgaacatgcagactggtggggcaggggggatggagctggtgaggggcagaaccagagggctttgtctccttcacattgagcctgctggaggagggccaggtcagcccagttgggtgcaagagtcatttgttctaggagtagaggacctgtacccccttcatccagggctagaaggtaaaggtcaccatgtctttgcctggctggggtgggtcatgtgggccccgtgtggtgcttggcaggtatggagcacttgcccagatccagaggtgcagcagtgggccaggcccccaaccccaaccctcttcccatgggtcaccagaggaaggggctgccccagtggcacaccctggctcccagatttctgagctccagggttggtggctttgggtgccccggcagctagagtgatgatggagaccatgccaggggcaggtggccaccagggcaggggcatcagcatggggagacataggctcagccctggggagggaaggggcagctggagggggtggttcttgatgagggaggagatgaggagggagcatgcctggttgggcatagcctggaaaggccctggaatgtgagccacatgggctctggctccagccaggggcagagaggccagaaaggggcaacgccaggatctctttgaggagagatagttgatggtgatgctggaggggtgccccgggagttacatgcccgtttcccatcagtaaccgtgcaattacgctcaccgggtgtgagcctttctccctccttcccccaggagagcgcgcccttcgccgttataggcagcaacacggtggtggaggccaaggggcagcgggtccggggccgactgtacccctgggggatcgtggagggtgagtagagtcttggggtaccaggtctggtgggggaaggctgtcctgggccggcgccagcccactacccacccccaccccgcagtggagaaccaggcgcattgcgacttcgtgaagctgcgcaacatgctcatccgcacgcatatgcacgacctcaaggacgtgacgtgcgacgtgcactacgagaactaccgcgcgcactgcatccagcagatgaccaggtgcgcgccccagccgcgagccagacctcgcccctctggccccgcccacgtctccataactgagggccggtcctgtcagcccacccagacttgaactttgcaccattccctaagccccccccctcccccagagcctggtctccctagaaccaagtccagggctgtgagggctccggagggcagggcctcagcagtggcggggatgggccaggcatcgccagcccacgctgagcctcccggtggcgccgccccgcccatcctcccccccgccccgcgcagcaaactgacccaggacagccgcatggagagccccatcccgatcctgccgctgcccaccccggacgccgagactgagaagcttatcaggatgaaggatgaggaagtatgtggggcggcgggggcggcggaggcgggcgtcagggatgctcctccgcggtgctgctcacccgccgggttgtctccgcccgcagctgaggcgcatgcaggagatgctgcagaggatgaagcagcagatgcaggaccagtgacgctcgccgcggacacaccgtccgtctccgggacgccctcgcacccctggacaccagaccggactgttcccgacccggagacgcggggccacagcccccagctgaccctaatttattctcagcaccaccccctcccaggtcattgtgtctgtttccgaggggcctggaccgtagcccccgcccagctggccctctctgaccttgggggatcaggagcgaagttgggcgggacttcagagatccgcctcccttgcccttcccccgcccccggacggtcacagcacccaaaccgcaggccctgctctggcaggcaggcaaagctaggcagaagaggattcccaggatcctgggtctgttccctgccccagtgctgcagaacggacttgggagccctcctttgcctgctcccgcgggtcacccagcgagtgctgagaccccattttctgtcgaggcgggccgagtcttcccttatccccagacgcctagcgggcagggttgggctgaatcaaatgggagccctccagacataaggaggccagaggctgcaaggagcggggtcgtgaccgcttacaccccttctccacagcccggcccgacctggagggcccccggggcactgggcggtgagccacctcctggcaactctcggtgccgtcccctgccctcgctcgaggcctcttctccccagcaccgctgtggtgtgccgggatcctgagcctaggcctcccgatgttcccacccgcatgatcccttcccgccacacgatgctccgttttcttccgttgtgaatgccgcgtcctgtcctggtgacaggagaacaatgttggtgaacgtcgca

SEQ ID NO: 744 - DNA, 32744 bp, Homo sapiens
  source 1..32744: mol_type = other DNA
gcggccgcgggcggctctgaggagcccggagggaaccggcgacgaggggaccatgtaccgggacccggaggcggccagcccaggtaagcgcggccccggcgggctggggcgccccgcaccggcgggcaggacagcggcagcgccggacgccgtctcggagccccagcctggggctgttgtccgcccggagccgcacgggctcccccaggggtcatcccagccccgggggcgcgggatcgagcggcagcggctcggaccccggtcccccgcagtctggacactgccaggctggatgtctgggaccggcttcgcagtgtccccacaaggacctctcccccacccctcaacagcccaaggacaacgtgtgtggcggagcgaggagccgctgcccctgtgggagccgggcagtgccctcagaggcacccgaggctccccagcaccggtgccccgggggtgccagcgctggcggaccccagggcgaggatcccggcagctcttggccaaggttgcgggcacaggggagcggagtggcatcgcagtgccaactgtgaattgagagggtgccagggggcaagtgggaatctggtgcggcagctgggcagggaggttctggggggtggggaactgcaggggcgttgatgggtgagacgggggtgcctgaagggaaagagagcaggggctcatgagaatgggggtgccaagagaatgttctcctaggtttggggagggggaagcaaacaaccccaaactctctcccgtcctggggtgggggagggccgaactcctttgccttctgcttcgcccgccaggggagtggcctgggagcccactgtctgcttggtatcctctaagccaaagccgaagaatcttcccgtcttcctcggaaattgctctgccatttcctccttggctcctgatgcctcctcacccagtgcccacctgtaggcaggtcccctgcagctcctgcccaggctccatccccgctcccacctggggtgctccacccagtcccagcacccccagtctgccagttctggcatcagggtctgtttctgggcttctctctgatgctaaaagcacgactccccagcccaggatgtgctcccaaacgaagagcctccaggctccctcctgccagcctcctgggggcggcggtgctgtagggaaggaagggctctaagaccctgcacagaaggagcctgcagccctgaggctcctgaaggcagtccagtgggtgctggctttgcccactgttgccctagccccacatttgctctttcccctctaggggcagcctcagcctgtccctgcctcctgaggaatcggctcccaccccccatcgattcttttcagtccagtcgatattgaggacgacccactgggcgccaggcactgccctcactcagcacttggatatgagggtgagagattcagtctccttctctggaaccttgcgcccttctctgaatgtcctctaggtgagggctgaaggggcattgcctgtggagagccctcccctcatctgtctggacctaggtcacctaccctggcatcttcgtcgaagaggccgccggcttccagcccatggcccgtggcaggagtattctcttgctctgctcaccttcttagaagccagtagcttagttcagaagccagctctggggtatgaggatggaaggtagggaagaaataaggacactatccatcccctcgcccaccaggctggcagcctcccctctggcctgttaggccactggcctggggctgtgccctctcccctctccctccctcctctttcctcccatgcctgggcaccatgacatcaccactcctccaagcacctctgccctcaccacggaggccagcttgacgtgcttggcatcttctaggcaaagggtctggagtccagtaccatccctggtgtgctggcagccctcaactcttccctcaccccctccttgaatgggcctctctggctgcagttgggacctgtcttgcccaccccagttgcagctgcgggacccaccagtgcctgtggtagggcagctgtgactgggaaaggggctggcctgaggctgactcctctccggtgtgggcattgggctgggtggggtcagacataggctggagagggcacagtctgcctttgagcctagtcatctggggtccttgaggagtcaaagatctcattctggcctctgccctctggcatccctgcccacctttgtaggctctatagttccaggtcagatttcccttccccccagctcccccaaggctccctagactcagctccccaagccagggctctgtgtcccccatttctgcctccccatctccccttggctggtactggttggtactgagatatgcaaattgatttatgtgtaactcaggccacccctcccctcccctctggtctcccaggggccagtgccttttatatcctgatcctctcatcccactctcaggaacacctgcggcccaatccttaaaaaaaaaaaaatctgtcctctcctgctcccctttgcctcatgctggttccagaagatccctgtggtactccctccctcatcccacttactatgcaggtccctaagggctcagctactgtgaggaccttacctgacaggtgtggttctctccctacttgggcctcaggcccccaggcccttggttccctgatctattgtgaatgaagaaaaggactgtgggaaataatcggagtccagtgaagaacccagaccagccccctcccatgcacacccaggctccagctccacactctgtccagcctccctagaccagacctgcagcctcccttctgccccctcccagacttcacggcctcttcctgccctcagccttcaccctctggttcatcctgaagtccctgtttctctcggactgcttgtccccaggccaggcaggccccagcaggcctgcaggggtcagcgttgcagtgggcaggcaggacagcggcaggaaaagagagagggagggagaggtgaccttgcagtgagctggtaagcaaggccagagagggaaccactgggacagaggttaggtcctgaaggctgcctgccctgcccccagccctctgtgagcttgtccctgggagtagtagtgcttgaagccttcttttgtcccacctgttagtgggctctgttccctacagacactccactaggcaggtcgtgacttgggagcatgcagggcagggggccttggcacagcgggcctcttctctcaaggtgaaggatccactagattgtccaggccaaccctccagtcactgggcacaagttaggggaagaggctgatggcgggtgagggaggtgcagaagttaggggtgtggctgaaagggcagatcaagggtatgccctgaggaacacctgggttagaggccagggctggagtgtgggaaggtccaaggaggcctgactgtgtccacccatttcaccaacaacctctctcctcccacctacctccccaaagcctgccccatcggcacatgcccgggcctccctggcctgcatcctgggcttgagttagagtccggactgaagatcgaatgatctccccacaggccaggacacagtggaggacctgaggctgggcaagtctaaaacccagagggggtgaggatgatttcaatggggcatgggccagggtagccagtgcccccaagctgttgtgttaccatggagacaggccccctccagggccctggttcacactgttctgtggccttgcagggaagcttgatcaacaagctgcccgcttgagggctggggcatagtggggagggagatagccccaaagcccctcctcatactggggagggggttagagcaggccggattgaggtgggaacgtacaggccagtaggtgacaggtaaggggacagctggaaggcaggtcaataggtgggtgctgggtgagcaaagacaggccctgggcagctgggttctgctcctggctgaccccaagctcaggcttaaggggcattgagggcaacatggagtgccagtgggggctgtctccttgttacaccctctagcccggccattgcaggatgttgtgtggaacaggcagaggagccgtatatggttccctccccctcctgcccctcctgagtccccccatcctactccccacccaccccctattctctcacggactttgaatccttattgaatctgatggaccgttttcgttttcaataactggttcccccaggggagtgaggccaagaacagaagaacagcagggagaagagctgggaggggtcacgtgggggcgggaggcccagtccggagctgatgacccccagctggagaatgagttggcttgatggctcctcagagcactgtggcatcacaggtgggcatgggcagccctgtatagagctggtcctctgctccacagacagtgcccggcaggtggcatatgtggccgagaggtcaactttctctcgtcggggcagtcactggtctggccaggtgccggcaccagcctgtgccaggcccagcccgggtgcctgcctgccttgccagggaaccccagctggtgatgccaggtgaattctgccagttccgtgggcatggaggtccctgaccttccaggcagcaggggcagccctgctgggccctgtccaactagtgtctgcagggcagggctttggtctcacccagcagaattccccaagggctggaacagagttggcagacagcatgggacttgtggaaagggctggactgtgcccagagctttggcctggaattccaggtccagttggttggaaggcgggcaggtgcatccggcctgctctggggagtctctgcagcctccacctggaaggaccccttgggatagaatggaccgggagctgaggtattgtgagctggaacccctgcaaagctgcatgtttggggaattggtatcttcatgtgattgagcccacgggtggaaggggagggcggaggcagggggagaggcactgtctgtatgtgtacctagtgtgtgtgcgggtggcagctggatggccataatatctgtgcttatcgaagtgccaggaccgctgtaaacagcagctaatgagtgtatttgtagcgaggcgcgttgaggtgcgtggggagctatgacggaaagctttaggggagggcccctcccccggccctgtacctggccaggcagggcctgtgtgccagggaccctgcctaccccctgccacaccctcccacctgctggcatggccatgaaggcctcgtctgctcggagcagggccttacctggctgtgtggcatacatgggtgtggacgggggtgatcatgggagctttcatgtgtaagatacaagcatttccatgacggtgtggggctgttagtatgtgtgtatgtgtctgggtcaaactgatctcgcctgtgtgtttgtgactaggtctggtctgtgcatgtgtgtatgcactgcttccccaggccctaagaggagggctgcctatcatctctgtagtgaccctgatagtgacaaaccctaatagtgacaaaaccaaagatgctggtaaaacaggcatatgctgctggccctgctccttcggtgtccttcctggagtgcagaaggctggtggcttccatggctgactgaaggagaaaggggggtgactgttctgcccattgtaggagacgggagggagaggtctgaactctagccccagtgggctgccatagttgctgcttgcatcagagattggggagaacctgggacctagagagccctctggttctagagcccccaggagccccaggaatgagagaggaacggtgcctacctgttagtcctagctggttggtggagcatgcaccctgccaccagccagggcagggtggcatgaggggtgggaggcagaaggggcgcctgcatgaggctctgcacgaggggagtggaggagagagcatgcagctaatgtgtccaattaaattacttcaaaccctgccgcggcagctgctcccggcggggccctgggtacaaattggatccgtctcattaccatggggtggtgtcagcgaggccagagagcggcggccagcatggctggcacatagcaggctctctcccgctctgccaggcctgggcccgggagggccccctcaagcatttgcttgctccagcacccctcagaggaagtgccccgcgtccagatactgggactccctgcacacctccttaccatccctgacccccatccaaggatgggggtcagggatggcagccaagggacccttggaaacactttctccaggaatgggggttttgtgctttgcagagggaccagcttaaggaatcccgtctcaggtcaccaaacacatcctgtgtcctcccctgataataacaatagtatgataatagcaagccttgtggagcactcagtatgtgctgagcactttacatatgtgcctccagggacagcttgcttgagctagggctctagtgtcaaacagctattgatttgaatcctggcagagacacttgctgctctgtctctggagcaggtcagcccacctctctggccttgggtttcctcttctgttaaatgggtatgatgatggttcttacctcccaggcggttggaagatgaggtgagataaggcagaaaaagtatttagcagagagccagcccatagtaaacactcagccagcggtagctgttctcaacattgtcctgtaccaagcaattgatgtgtgggatgagggttctggatcctccaaggagaacatgcctgctacctccatggtggaggagttggggagggcttcatggaggcagtgtcagttaggttaccatcagaatagcagagacatgttgtgtgctcactatgtgccaggtgctgttctaagcacataacatgcgttagcgcctccatcctcagaaccaccttgggaagtgcgaacttgcagttagaagtaggtctgggattccagccacgctgccagacctaagggtgtgagcttcagatacagggccttgagtcctgaaggaagaataagagctttgccatgtgagcgagcagaggtgaggcagttggtgaggtggggacagcacatgcagtggctcagaggttcgagggatcttggccggttgaggcagcagggagtgcttgagcatggccagaagggagacctttggggcacagtagcaggaagtgaggcttgggaaggtaggttgggccagattatgaaggagttggcattttgaaataggaaaactgaaattcttttaaaaagtaaggcatggagtgccatggatggcttttgagcagatctctataaagaactttgacagcacggtagtgtggagggtgggaagtcaggaggcaggtgggtagatggagctagaatctcagccattaacatatctgtccctacctctgccaggagatctgcagtgtccagccagcctggacccctgcccttggaaagcttgcagcagattataggcagtaagggggtagccggatgcaggtgggcatgaatgaacaccctgagggggcttcccaggtgcctggggtatcagagaaagcctccctagtgagggatatagagccaagatgggcaggcccagggccctgtggacacagttagtccttttgaggatttgttctgtacccacataacccccccaggcatcagggccaggcccaggaggggccacacagctcctgctccagctgccaggcctgagctccagagccccaccaaagccaacctgtctccatggcaactagacgggccaccccccctctccatgcccacggccactggcacagggacccattcacagcggggcctggttatgtcttcccacttcccttgggggtcatcccaaggcaaacgccctcacactgaggcgctggcagcacacatgcatgttggcatttgggtatgtatgcacacatgatgtgtatgtgtgtgtgtcctgcagcaggaagcagggaggtggggaccatctgtgttgactacccaccttagttggaaatttgttacccctgagtgggggtcagatgggtgccaagggccctgacgccaggatgaactgtgggctcctgtcttggagattgcagtgagaaagccagcccagagaaggggcagctaggagaaatggaaggtcagggaaagctgcaagggagaggctcccagtggtgcctggtgggtccacagaccaccttgttctttccattcatcatgttatgtcatcttcacagcagtcttgcaagggagatatccaattcactgcagtgcaaatgaggaaacggagactcagagaggttgagtgtcttgcccgggtcactcagtagagcaggaataagattgcaagtcggcctcactccaaagcctgggtcttaaccactgggctacgttgcctggtgcctccttatcctactaggctctaagccagcccgtctctcagcccgtctctcagaagggagcactacgagttggtactggctgcagagctggactcaaagggtgtcccagtgcctcttctaattctagggtatcccctaaagcctttgttcttcctggagtggaggggagtctccttcctaccctgtctccattctctctactggcaaggtggagggatcctctcactcatgggggaggctctcaggagaaggggaggaacccctctctccctccttggcacctgccagccctggaggagcctgatgaattgtctgtgtgccccccccccaacctcattcctccctctccagcccccgcctggttggggaggtgcgaagggagtgatttcacagcctgtcagctgaggcctaaaaatacccagaactctaagatgcttgggcagggggaggagagagcagggaccggggatagggtggtgaagggtgcaatggtaacttggtcagaggagcccaggtggcaacacagtcctgctcaggaatgatgggagaccctctgtccccagggtccccatctgaccccatacctggcaatgacagagagggccagtgtctcgagggtcttgagagctcagctctggcactcagacctaagggagggcttagtctcagataggagccattgtggaccccaggccccctggagcctccagttgatgcctttctctccctctccacccccaggttggctggcatctttgggccgtgggagccaggctgtgcctgagtctgcttccttcctggagaaggtgcccgcttctgctaggggagaggcgtgaggaaggcagtgtggatgggggtgccggcaggtgcgggatgtgacgtgccagccacccaggcactagaaggaagcagaggagaaggggtgtggtggcccacgtcactgccacatggctgtgtgctgcagcatggcacatggcccccacaagtcaaccactgctcagagacgggaacacgtgtatatgtgtgtgtgtgcatggacctgctagagtcagcttgttctggtgctgggatgcttgtggacatatgtgacccagcctggctacttcaggtagaaattgggtggaggcacaggagtgggtgtgggagcatgagctaacacacctcacttcatgcagatgcatgactgtgtgtgtgcttcccatgtggaaacacgatggtaggtgtgtctgtgcagaggcacatgggcacacatcgctggggcgccaagcaggggctgagagggttcttagggaaagaatgcagagtggtggccagggcacaggggctctggatcaaaagtaatgaggctcaaatcccagatgtgccttgtgctgacttgctttgtggccttgggcaactgacttaacctttcagtgcttcatttcccacctgtaaaatggagggaataatagcaccgtcatggggctgttgggaaaattcgatgagttaatatctgtaaaccacctagaactgtgcctgtcacagttatcactatgtacgtagtagttcttcttatctggtcctaccctttgatggtacaggtgggaacatgaaggcccagagaggaacagtgacctgtccaaagttacacagtaagttagtggctgaaccaagactaaaaaccagactctaacgccataagacagggcttgttcaagtcttggacctcatggattgcagtcctactggagtttggggcttagattgtgccagggctgttctgggaccttgggaactcagggacctgcacatcttcagataatgttgaggggtcttcagggcagtggcctcaaaatgaccagttgcatgagtcagaaccatgcctctggctagctgtgtggacttggccaggtcacccaaccctcctgagtctcagttttttccctataatggaataatagtgacacatacttttagggttgttgggatcaaatgagatcctgcatgtaatgtcttaagtggctggcacactgtatctagtaagtgttcagtaatgtttgttacaattataacccttgcagaaccctctcaccctgtgctccacaaacgtgagttcctttggttcccttccagcctctggccaccctcactcccttctgcctgccaccccacactccagagggctttgatcaggactgacttgctggcagccatgacttgtctttgtctcctgttgttgcccatcgcccagaagggaacaggacccaccagtaggacttagcccctgagccctctgcatctggcctcatcactcacttgaccttggacaggcactgtttcctctctgtgccttgatcctccctctgaaaagtggagaggctggacacagccccagaagttcctggtcgtgttgctgtgtggcccaggagggcccctggctcagcctactcgagggggtggcaggttggcagggagggaggtcagctggctgccccgggtgagtggagcatctggggcctgagccggctggtggcctgccatcatgcccgcccgcacctgtggctgcgtaggagggtgtgcaggcccagctggctgggcactgacattgggggaagctcaaggacaatgacgtagagaaagcccttcttggggctctgggagctgccactccaagccgtcctcccccgctctcctcccccttctccctggggttttccttcagcaattcctccttcctccctgtccttcctctccccttccctttcctggagtcttccagtatctgtctctctgcctctgccccttctgtaatcttgaccgttttctggggcaccttctcacttcctctctctccatagaggggagattcctaccccttcctgtctctctggctcctgagattcctcctttcttcctgcgatgtgtccctgtttttctggctcctcctggctccctctgctgccccagagcccaggtctctctcacttactctgcatggacatgttcaggctccttccagctttttgtccccttgctctctcccacttcagagtccctccctccccagcatccctgcctcccttcttccagttctgtggagctctttgctcctccatcagcatcccctgccctgacagaaccctgacccaggcagtttctgtggctggagctgctacccagtacctccacaacccccctgccctctgtgggttgagaaaagggtcagtccagggccgagggactggcagccctgcctcctaattagcaggaggtaattgcctggaaaaaaaaattcatttagaatgagactccgagactccaagttaaagctgagccaaccaatggaccccggggagtaggagtggggaagcagcccaggtcatggcctcaggaagcccctcaggagatgaaagcccctaggactccctgcctggcttgtccccagcaccccagccttggggaagtgggaagagtacactggactgggtgtcccaccgtctttgcctgagttctggttccacagctcactgtgtgacttggggcaagccatttattccttggagccatactttgctctcctacaaaatcagaacagggccatccctgcccacttcacccctcaagatcatgagggtcaattcagacagtggctctgaaagcacttggcaggctgtaaagtgctacagagttcaaggtgttactctcttccttcatgtggctctcagccaagaggtgaggatggtggggggctggagtggtcttggagaaacctgaggcatagtgtggcctctagaacatggaaggatgatgaggtagatccagctgaatggcaagagtaagggcagatggatacactctcccatgcccgtctcagcactcgctggctgcaccagcctgagcggtcacctccctttctgatcctcactttcctcatgtgtaggaggctgagcatgatgctccctcctggggaggcagggtggctggaaggctaaatgagatcatgtttgcacagctcttagcacagtgcttggcatacagtaagtgctcaataaatgatacataccagctatgtctactgtaattgaaggctattatcttgactcccttgactccagagaagctgtggttttgggtgctggcttttcacgtggtattatttgttttgctttttgtttttggaagggggagaatctctacaacccagtaaggttcatatcaagcagcccctagaaacaccaagcagatctgcctttcaaagagccccacctgtagggtgggggaacaggagtgggctgcagttatggcattctcctgcaacccctcactttttcctggggcgggtatgggcaaagttcttgtttgggtgggggagaggtgtggagcctctgccctgggggaggcctttgtgttcatcttggcgggactggccctgccacagaggaaaggttggtgtttgtttaaacaagccttccccacccaccttggaggagggagcaggaagttttgcctgccccaggtctggccagctgggttgaggctgcactgtgacccaggcagccccaaagcggccaggatgcagtcagacaggctggagtgtgcgggtgtcgggcaacgccgcaagctctgagcgccagattgccccgggagcggtgagggggcggcgggggccggagaaccgtctgccgctgcttcgccgctggcccaggccgccgctggggaccgtctgtgcgcccgccggggtgcagtgcccgcgccagccaccaggaggcagtgcggcgggcccccgggagggaatggggcgtggtatttaccacgttcgcggggcggccctttttgtcctgagtcaggactggggtcttcagcatccgaggacctaactcgaggaaagggggctcttgaggtcactgggtgctgccatagcttcagctgagggttgatcagggaggcattggcagaggaaggcggaatcactatgcacagtctctcggatcctgctcgctgggagctgcgcaaagggcgacctggaagagggcgcagccccaggactgagttctgtttcagcaccaaggacaaggagccgcgtggccgacagctgtttcagcaccttggacagctctggggggcggggcgctcaatggctccatcctaatatttgccgtgtaaatgatacccctgaatatgatagaacggcatctcgtagagggaatcttagaccctgcattccagccaggaggcttaggaccagagagttgagtgagtagcctgaggtcacacaactggaagtgacagaacaggattcagatccgcagtggtctctctatccatttctcccgcccctggattcccactagttatctctgtcctgaaacctttctgggagcttcacattatgttgcatccccaggagcctttgagcttgcaaaaattaaatgcactcccctccccaaccataagccctggccatggatttgaatcccaggatggaagatttctagctctggtggccttcacggctccaagcctcaggtggaagggcattcgggcaggtggcccgtgaggaagcctatgactcggggagataaagttgagtcatcagcatgaggagcttttaagtgctctgagatcctcaaatgaaacatagcatacagttccaaccccagcttctttgcagcgtgtattattaataacaataagatgctgatttaggccaaggcacaacaatgcattattcataggagtaactagtggtcaaggcccacacttaatcatcacacgtccctgatcctgcctctgctccgcattcccggtgaagagccccctccccattctgagcccctcctttcttgggctcctgctgctctgacagacgtgatcattttcacagctgctcaggtggctcatcagctttgggatcaaggtgggtggggagtgtgtcaggttccgagctaactcctggctagccactcttcagtctgggctcccagctcagagctggcacctggccctttccatcctgaatggctttggccttgatgacttctgggcttagcagctctctggggtctacagatggccagtctccccttcctcctcttttgaggctgaatactgaagccagatgcaccaggcctccctaggccaggaattgtgggaggtaggggtggctgtggtgaggtgaggtgaggtgaggtgagggggtcactgagcagaagataccatcacctccattaaattcaataatgcatgtgaaaccctcagtaaactgtggaacactttataaactgctctgcactgtacagatgtgagccattattaccaaggccatgtctcgactggaagagacagcagaggtagggaaggcatggacaaggtcctcatagctcaccaggtctcgctctctgatgaggagtaggagtgcttgtggatcccgacatgtccctgtccaatttcttgccggaacggctgctggcccatccagataatccttcattcactgtttactcacttggcatctcctctgaattctaaaccgtctgcatctagccggcctctgcggccccagccagcgcactctccctagctcactcacacattatctgtttttattacagtcaaggttgaggaagcttgctcgtgctgagcccccattttcagctacttgtaactttccaaaacaattccccttgggcttcctcttttgctagcctagttcccaccctgggtgaagcccaaggggttgtgggcacctccagggctttccaaaggacactcagagaatgtccggagggcatggggtgggggtaggtccaaggcccagcttttctgggaaataggtgctgggtgttctcccttccttattcttttttccttctcgcctatctcaatttgtttttcctcttgcaagagaagagctggccctgttccccaggtgggtggcctggaagggagagtcttacagtggaaagaggtcaggaaattctgcaagatggcaagacctggagctttgcctggttgtctggggtgcagggtttagctcactggctttctcttcctttatccccaactctgcctctttctggctttcttgtgtgttttgggttgaggggagggagggaagcaggataggcaccaaaaatgtccccctttccatgcccagatcaccctggagctggtaagctctgcccacttgtaaatgcctgccatcttcccccatttccatctgctcagcatgcgcatggagggtgcttcctatggaaacctgtgactccagctttcactgtttcccaccttgaacgtcatcgggagccaccaaaagatgggggtggggaagtgctggggcttgacgtgtattgcagaatcaggtgggaggaggcaagctcaggatggggacgtgctggcagatgtagccccaaccacccccagcagcactctgctttatctccggagtagtggttgcaccctgatcagtaccagagatagagccctgggcaagtccctgggacaccccattgtcctcctcttcccactcctagactgtccagtgccagatacccagcccccaacctgtcctgggaccctgaggccagctgagactctatctattgagggtgcttctctgaggccaatgcctgggccagtggatgggggaaggagccccagaaaaggtgtgtgtgtcagaggagtctctgaagtacctggggtaatttgggcatggctctaactggtaaaattcttgggagggtgggagccctttccgtaactgtcgtttgtgtccactcaggttctttcttcttttctgtctattctcagagtgtctgatttcaaggcgtggctcccctagggtggaacaagagtaagagccacagggtttgaggtcttatagacctccagtctaatcctggctttacttctcttctgctgcgtgttcctgggcaggcatttaaccctcctgagcctcagtttccttctttgtaaaatgggcataagagtatttaccctcagaggggtgctgaagtctgcagacatgattcaatgccaagcatacattcgttactgtaatgaaagacacttgggaagaagagcagtggcctgggacctgtcaatgcctgtgagagcctccaggagcagaagcagtctaggttgggagggcttgcgggtgatggaacaactctggaagggctgggtgtggggagtgtgcatgtcaccatctgagagtgtgagcacacatgcacacatgaattctgggggaaagagcctataggcacagattcccagcatgtccagcagcttctctgtaccttgacctaggctacaggctgtgggagaccctgagcaattgggagacaggatattatcctgttgcccctgcttgtgggggtcaagtctatccccaagaaaagggggttgacaaatggatccattaattcaagtttggagaaggaagagactgctatgagtgcctgtcattggggagggcttcttgggggaggtgggcttatctgagaccttgaatgatttcatgaatttgtttagcaattacttctccaacctctcctgtgtaccagactttggtcttcaaagctgagtgagctgggggtctcaatcctctaggtgctcccagttggggaaggacacagaaagagctaattattaacccaaaatagttaattgtcatagttactagggaggcagaaaggattgtaggaggggagaccatctttgtctagttgccttgaagatagagaaggaaaggcgttccaggaagaaggaacagcctaggcaaagcatcataggtgtgacaagggttggcctgcttgtgggaaagaggaaagtgtggctaggttgtacagtctagcacattatagaatgccatcacattcatcagctcaaagggaggccactgtggctgggcaggaaaggatgggctcaagcacctattattccccatgccttagtttcttctcctgtgaaatggagataataatggtccgaggttgtggagatggtgcatgtaaacttcatggcgcagtatctgccacattgtgtgcactcaactaatgttagctattatttgatggtgacctccccagcaggggaggttaggggtcatgatcatcatttgaaggtaaagtgttcaggcccagcatgggccttgccctgggtaacgtagttggccaggggcagggctggggcgtaaacccaggtcatctgcctccatgtctacaatatatcccactgctctgcctcagaaggacagacagaatctgagtagacaagtgatggcaaattcatggggagagaattccaggctagaggaaatgcgtgaatgcctagaactcatgaatggcggagctggctgggcatctgcttgtggccacagccatgggtgtgtgtgcatgggtgtctgtgccagggtgagtctctgtggcttgtgtctgtggcctgtgtgcatgtgcccactgctcctgcggcaccccctcccgttcccctctgggcagctggtgagcttgccctctgaaagccattccctctcctgcagctccccagggcatcccagcagccagcagccctgtttgattctgttcatccataaatcatcttgctgaggagatgagaaggagttgggagtcggggctgagccctggtaagggaccggattgggtcggcagttcacacctgaggcccagcctggcttccagctgtcacccctgatcccatgtccccatgccttagccctccctcttccatactgtaggtgctcactgatgcttgctttggtcaagccctgcaggtcctgggagggttcaggggtgcacaaaattgagtaatatgtgacctctgacctctgccatcctgtggagaaaactagagtgtatccaatccagtatttcatttaccaccattgagtgccaactccgtgccccagatatcactaatccagggcacgatgtgataatgctatgataatagctagcatttagtgcctacttattccgtgtcaggcactgtgctgagttcactgtacatgctaattcctttaaacctcaccatagtcctatgagactatactattatcagccctcatttacagatggggaaaccaaggcacacagagattaggttacatggcttggaagaatcagagccagaatttaagcatgagcaatctgacttcagaggcctggcactaatcactattctctaaaagaaggatgtaggcccagtatgctgggaactcagaggcaggagaaattaattcccactgggcagactaagggaggcttcctggaggaggtcttttcatctgggcctaaaaaaatcaggagtttgtcaggcaaagttgagcatggggaaagaacagaaggggtcctagtgtatgtgtgtgtgtgtacgtgcgtgcgtgtgtgtgtgtgtgtgtgcatatgtgtgtgcatgcatgtgtgtgtgcatgcgcgcacacacacttgtaaaagagagctctcaactcatcactgcagcctctcccatctcatcactgcagcctctcccatctcttctcttccatcttatttgggtgacaaatgagataacatatacaagcattgaacattcaacaaatatttgctgagcaccccccgtgtgtcagacgccgagctcgtcatagagtatactggagtgagcaaagcagatacagcccctttctttgtggaccctgtagtgtggcatatagtaggtgcttaataaatagtagcacctattattatctttgttcctggaggcctgggattcttcctccttcattctttcaataagcatttattgagcacctattaaatgctccaccgttggtgctgggaatacagtggtgaacaagagaccaagccctgcccagatgctagaagggaaggctgtgcatggacatcttgtccaccctcagaagcaggccgcttcctggggtacacagacctgaccctgagatctccttggggggtggcatggccaggagcataggctgtgcccacaggacccagcaaagcacacaggactcagttagacccttcatcctgagctgtagtcagctgatatgcctaccacaggcctgggtagaggggcagcagcctgccccagctcatacctcactcccaagacatcccggcattggacctaggagatctggctctgcctagctcctggttcaccctgccttccaggtttcctgatgttgcctgtctgcccttgtctatgctgtgccttacccgccgggacctaggatgtctcctctgcctcaggataggttgtggcactcaaccctgtcaaaaggctgactagggctccaaattttctttcccccagtgttaatatgctgacagtaaggggacttgaaaccatgcatgtcatctgaggaggggttagagggctggggcggctttgcctggagaagacttgaaggggacattagaactgtcggcaaggatttggaggcctgtcatgtggtagaggcagccagctcgttcctggcagctctggagggcaggctcaggaccagcagggaaagttctggggagacagattcggctctgcgagaggtacagcagccctccctaacaatgcccgtccaggaaggacctgcttcctgccttctgctccctgcagaagctccctgtcaccaacagggctgcccatgggctttgtgcatccctggggcctgacttcatgactttcaaggtcccttctagctggagacacagtgactccatatgcagggaatggttcactctggctggtaggcgagaacatgcttgcaccccttgatggcgacatcccccttaggatctccttaggatgtcggcatgctggccgaggacatcatgtcactattattcacaacatcaatgcaatttgcagtggcaagtgtttgtttcaccctgcctttgagggctgtccgagggaggctgaagggtctgggaaatctgtgggggccgtaccaactgcctggaagatgacagcagccacccacactgtaggggaccctggggccactcatccagaagagttcaactttccttagcaacacaaccccttctccaaatggaatattctgcaaaagctcaagaacacagacaggaacagtgctactgtggctgaagagggcttgagggatcacagccttatctgctcagcctccactccccagagccccagagagactccaggcaaccctaggggttccaaagactacctcttgaaaactaaccacgtacctctagttggtgtgatgtcaaagcaaagggtatagaatctgagccggattgcctgagttcaaaccccggctttcaacttggacatggtatttgacccctctgttcctcagtttccccatctgtaaaatggggacaactcataatgcttatctctgttgtcgttgtgactgcatgtggagcacctggaatacctggcttgtcctctgagtggggaagggtcagggtcagctcttccacagatgaaggcactgatatccaagagtcaagtgtcttgctggccacatggctggttagcagctggactagggtctcagcctagttctcctagaccccaaacctagggcttattctgctgtgcccacagaatgctaattgcttaagatgggtgttttgttgggtttctggggacctttcagagtgtgcccactggactctgggatcgacaggcttctgtccctagggactctctgacctgcagcaggggttgaggatggtttttgagaaggatcttgtttgacaaaaaaggagggagctccaggaaggtgaccttttggagaattcccaatggcaaagaggtgtatgggggaggggggagtgtggagagggcatcagagcagaggagcccacctggagtgtggctgtgacctccagctgcttcctactgtagctaccagatcatgagcttgtgaaacacccctctgatcccatccttcccctgctcaaaagcctatcatggctcccatggtctacagaacaaaacaaacccctcagctggatagacaagccccttccccatcaggccgtcctttccttccaggctggtctccctgaattcactccccataccctaagtccggctcctcacgccatgtgcctgacacttttcccacctccatgcctttccctctgcctggaatatcctactttcgcctcacttccatcttcagactacaccaaacaccgcctcctcagggtggccttcccagatagctccctagtcccacaagattgataaagtcctcatttgtgctcccagggtcctttgtttatgcctgagataaaacaaacaccaacaaccatactaatactacccatctattgagtgctaacagcaaccccgtgggagacactgagtggttaatacacttgtccaaagtcacacagctgttaagaggcagaggtggggctgggcacagtggctcatgcctgtaatcctagcactttgggaggccaaggtggatggatcacctgaggtcaggagttcaagaccagcctggccaatgtggtaaaatcccatatctactaaaaatacaaaaaattagccgggtgtggtgttgggtgcctgttatcccagctattcgggaggctgaggcaggagaattgcttgaaccatggaggtggaggttgcagtgagccaagatcatgccactgcactccagcctgggtgaaaagagcagagctccgtctcaacaaaaaagaggcagaggtggtactcacacttgggtcttttttctcaggtcttttggagtctggggccccctggctgggtgtcctgctgtttgatggttctggggcacctagcgtgctaggagataacttaattctaacctgtcttccccactggagtggtagttccttgtgggcagggcctgttccccaacaaacacacaccctcataatttatatatatatgtgtgtgtgtgtgtgtgtgtgtgtgtgtgtatgtgtgtgtgtgtgtgtgtatatatatatttttttgaaacagagtcttgctctgttgcccaggctagagtgctatggtgcaatctcagctcactaaaacctccgcccccctccaacccccatgccagagttcaagccaagcaattctcatgcctcagcctcccaagtagctgggagtacaggcacacgtcaccatgcccagctaattttttgtatttttagtagagatggggttttgccatgttggcctcgaattcctgaccttaagtgatctgcctgcctctggctcccaaagtgctgggattacaggcatgagccaccatgcccactcataatatattcttaatagatagttgccgaggaaagctcagcgtaagaatggcgtttactttatttcaaagtgagttaaacaaaggaaagtgtgggctcatctgctttcagcccacacagctcccctagcccttccagtggggctgggcaggttccatggggagagctgggaaacagatctcatgtccagaaagcgcctttgcccatcccttccctggagtcctggccatgggccgtggggctgtggtggagtgccctgctcctattctcccttggaagcttggagatcaaagtcctagttctcccatttggcctgagaactttgacaaatgtggcccctccagccttgcagagctgtgctcctcagcccaggagagggaggggcaggaccttggtgattgcaggttgtccaggtcagagctcctgggtgccgtggcccctgaggttgaaagtgaactgggtgcaggggcttccggggggttgaggctgcagacttggtacaggaggaggctgaatttgcctggcaggtggacaggtgggagcctcacaagtgtggtctttccccacaactaggaggctcaggaagtcaggaagggagaggtggggcccaaagagggttctagtagagcaggtagagaaagggctgcccagggtgctggagtggaggagggagggagcccagaggcccctgagagctgatgagagtcatccctgagggtgactgctgggccttcctcaaccaggctccatggccaagcaagagagactgggagaggaagaaaggcagaagctaaaaccgcaggaaccagaaccagacagatactgtcaactcttaattaccatgatcactggcaccaaaaagcccacgcaggctcctctgtaaataaacagcatctccttggctttaggatgcatcccagcacacacaacagattgatagcgcatgtgtgatctatgcgggtctccactcactgccccacatgagaatttgtcctcaaagtttttgccttacttacatttggtttgggctaatgtttacaatcacccatgaggagggcgggggaggaggtctgatctgcatttacagaggaagaaaccaagtgcttctgtgactggcagaagccacacagccggggaaggggtgggattcagacagaggcctgagattttcctcccaggacatctttgccaagggtgccaaggtttccacttctgaagtttatggcacctcggcacttgggatgagagcatttaggaattacagatgggctgcagccatggtgtggtgggggtgagcttgggggataggaatgtgcagaggccagtgggtggacttccagaccaatgaaagctgggctaaagggggcaacagctggccagagggttccagagattcctttgactacacatatggctggtgagtcttgggaagcaagacgaccggctagtgccatgaggcagatgtcctcagaggggctgtcagagctaataaggaccctttggacaaatttcactagagttgcaactcagagtgtgtgtgtcatcagggcagtgggtggaagagtgctgtgtgaaaaggccatccaggagcagtggcctgtggagggatttgatggacgggtgaagtctggctgaactgaggggcacatttggcctctccctttgagggtctcaagtttggaggccggcacagatcccatggactcacacagggtccgtgcagggagagacagagaaagatgccaactggcacagtttccccattttacagatgaggaaactgaggcacacagagaggaaactacccaagttcatccagcaaggcagaactgggagtagaacctgggttcagagctcccagtgaaggggccagatggagggtagggtggtggttctggagggctctgggctgagggagggtggcaggccctggccaatgagggtgtgacctgtacctgtcctccccaggggcgccctcgcgcgacgtcctgctggtctctgccatcatcaccgtcagccttagcgtcactgtcgtcctctgcggcctctgccactggtgtcagcgcaaactggtgaggctcctgagggccccttggagggtggtgcctagccctgcacactgccccccctccccacacacacacacaattacaggcttgggaattttcccaagggtgcacacaggtgactcacctgtccgcatagtcaggggcacttccatagaaattcagaccgcgtgcatacgcatgcatgcatgcacaccctgcgtttacccgggtctcagccctatacttctgtttatatacccaaagccatgcatctagggacacattcggggacagacttaggactcacaggcattcgcacgcgagcagctacacacacgcgcacacacacacacacgccctgcctcccgcataaagcaccgcaggcacacacgcgcagactgagaatagagcccccactctaagcaccgcgccccctcccctctgcccgctcccctccatgggcgtggctgagccggtggccaatgcggaggcgccgcccgccccacccccgcacatccatcctggctcttgggtttgtacaagcacaaacggctccttttcatttttaacgagggctggggaattaacgagcaggattagtccatcaataagtaaagagaccgtcaggagggacattcatcccctgagggcgccggtagggggagcggggctgagccgcccgccccgcatcgcgccgccccgcccagcccgcagcccacagctccccgagccgctgctccgcaagacctccactcccgtccccactcctgccgcccggcccagaagtgtggtgggactttgggggcagcagggggcgaggggggcgacggtgggcccgggggtgtccgaggtgctacgcctttggcggagtcaggtgaaggagggtcactagcaagcatcccccatctccccgggccgagaatggtgggagtgggagcagggcaccacctctgggaaccccattctcttcctgcgcagccaaaggggggccttaaggacaaggggggagcactgtggctgtgggcactgggtgggtagaggcttcatgccccactcctctggaggaagaaaaggggcagatacccctgggaaaaggttttggggtcttgtgagagacctgcgggaaagacctgagagtcccagaacccaacatgcctccttcaagaaaggcaaactgaggacttgggagcatgcggctccatcctgggtgttgaacttcaggcagctccgacccctggggaggagccatagtggaggccagctctgctccctgtgcgagtgtgtgtgcatgtgtgcaagtgtgtgcatgacccgatccccctctgcctgcagatgtgtggaaccgggctggctgccctgctttgttcctgggtcccctgtgtctgcgtctgtctcagaatttcaggaaaggtggtggaggaggctgggccatgtgcctctgtgtgtgagtgtcctcggaggctgggggagtggctgagcgtacctgcagcccggagcatcttgttgcagggccccttaggctgtcttgctgtctgtctggatttgaaggctagggaagaaggctgcatgagcaggcgctgatggcgaccttgtgtgtgtgttccatgtggagtctgtgctgaatgtgttgactttgagggtattggtgcactgtgtgtgtgtgtctgtgtgtgtgtgtctgtctgtctgtctgtgcgtgtccgttcacccctcagtggtgggatgtgcatcaactcatcagatccctgtgtgagtcaatgctggggtctgccccaccctcctggcctcctctgcatatgtgctgcagtgtgtgtgtgtgggtgtgggtgtgggtgtgtgtggtgagagatgacttccaggacccaggtacaactgtaactggtctccaccccacccccatgcacctccagtcaggggcagggcctggggacaggagttcaaagacaacagcttttgcagcagatggggggctgtcagcacaggaaggaccttgggagctgagagatgcagaagcagcctcttccctggtcccagcccctccccacaatccccagccaggaaccctcccagggtccagaccgcaggctgtccctcttgacttgctgtggatagaatgctactctccccagtcccccaagccctgccaccccctcccctccgcctcaggggttccagaagccagggagctcgttgatcaggctgtctccttgctccatggaagggactttaaaacgctgtcccctcccccaacacacacagttgttgggctctccttgcctgcctgtcccctcagcagcagtgacgtgataccctgacagcccagatcccatttccaaacattaataacttccttaatctccagctggctttttccggatcagcctggccacccctccctgagaagcaggctggtggtgttgggctgctttggagctgcctaatgtcacctggaccctgcctggtttcctgttaacttgggttgtccccctgccctccacatcaagtcctggcctggttcctgtcccccatagcacctcggctcctgctgcagagcaatagtcgaagccagaggggaaggttctcggagttggggaaggagaaggggcagacagaggctcccaggatgtctgtgggggcgctgctcggaaagggctgaccgtgcccttcctggcctcggggaaggggcagcggccctgccttacgagagggtgctggccagggcaagctctcctgccaagccagaaagaaggaagagaagggcgaggggtggcatgggatgccctcagcagccccactcttgacccacactgcctgtgtgctggagaatagtggggcggggctcctgcctgagggtcctgccaaagggggcctgaggtcactgtggcacagccgcataggatcttcccagttggaactgggaattgtttgagatttggacctctgggtagtgatgggagggatcggagttggagctgtgagtggcagcttttgtgaacccagggtgtccggcatctctatatttcaactcttaaagttctgacttagaggtcgctgctgggggcccagactccagggtgggcggggccatagaagggacacttccaggtgatgatttctgagaactgcccagtaccaggttccacactaagtaccagaaacccacagccttgcctctgtgggagcacgtgccgggagataggagctgaagtaagtgaacagaaatactcatatatgtgatgagagcctggagggatgaggagtcttccttctaggggttcatatggcgacaccatttcagaaaggaggaaagaggccagagaagggaagacacttggctaggctgacgggggaacatgcagcattgctggagccaagccccaggcaaccctgaggtgtagggcactgctggtgggatgagggagctttgctgctggtctccctagataggtggctcccgtgcctgggaaggggctgcccctggcaggagcatcagggagcatggctgtgacaggaatcatggcagtggcagtgacagctcttactctgctttagagaggatggaataattgactgttgtggctgtggtgctggtgcacatgacagggtgttgggaagcatttgtgcgcgcacgtgtgtgtgcatgtgtgtgtgtgtgcatgtgtgtgtgtgtgtgtgcagccggggaggggcaggccagtgcccagtgggagaatgggctgggagaggcagccccaaaccccgcacagcccctgtcccccgactgcccatatcagccctggacctggcccaggtccgtggcccatgggtgcgtgtgaggacgcttggtggcagccaggaatgttaatggggctaggctctgcatgagctaaatttagaaacccaaactgagaaggtgaatggtgctcaccttcccggcagcaggcccagttgccgctgtggccacggcccttcctttagctggaggacctggggtacccacccgctgccctgctccctccctccccctgctagtgtgagggactctggggggcaggggcccaggctgcctccccgcaactgcctctgagtcagcgggcagtctctcttcctaagactgccttcctaaaacagccttgctcctgccttacagccccagggcacaaggaccccccagagaacccccagacagtggtggacacagccccgagcaggactggggacatggccttctccccgcccccactgctcacatcactggccactgccaaccttgccctgcaggatgccacccccaccatctgggggcggtgacgtggacagtgtgacgtggccaggcgcctgagagccgtctgtccgtggcagagggaactgtgtttctgggagctaggccagagccccaggagataggcagacaggaggggctgatccctgggagtcagggatgaggttcgggtcgaggtgggtggggcaggtcctagagcccgatggggcccaggagctgccaaccggggagcaggcatccaggggattggcccccaccgcggtgacagcctcgcacactggtcctggccttgttgccacggcccgactccagtctatctccttcccctccgggtccctgttctggggaggtagggagggtacagtcctgttccccaggagtgatcctagtgctatctccacagggcaaacgctacaagaattccttggagacggtgggcacgccagactcagggcgtgggcgcagtgagaagaaggctatcaagtaggtgccaggctgctagtttgggatggggccacacaagcagcccaggtgggaggagccccttctctcccccagccccacagacctgaccacacactttcacttcccccacaccccgatgccatgctctctacaccctccacacacccccaaaaactcaggggccccgtcttttctgcctgtgcccaagcccctcgtagtgctccggagtccctggcctccgtttccgctgccctcaccgccagcaccttctgcgcccacctcaaccctggttgccgctttctcatcccaccctcctatcacacacactgtgcccaccacccgccggcttccctggacctccaagcccctctcatggggcccctgctgctaggccggggaggcccctccctagtgggccccagcttcttttctcagatcctgccagtgtttgaggatgacctggaagtggggaggcagacacacctgtgtctgggccactcggggagcagagcgctggggagcagtccctccctccccgtcaaccccaccggccgctgtgtgtctggctgtctctgcctcacccaggtctccttgttctgccgtagagccctcttcaaggagtctgccctcccactgcagaccaccttggccagccctctgctgaggtcactgggagacaccaagagaagtcccccacccacctggcgggggactcaggccacctgggctctggaaatggaggcttttgctgggggggaggcctctgtgcccactggccagtggccccagccccttcctctttgctgagcccagaggtcaaggtaggggtggtaaccccacatctcagcctggcctggaccaagcctgccagccaaagggctctgcctagaagccgagcgccccatccctccctacctccactcttcctccctctgaaggcccagccaccctccccctgccctctggcccctgcccgctgctggtctcccctgccttcccctgtgtgtctttccccttccgttcccttccctttcctatttctccaccttctcttctccactcctcccccaccctccaccccgctcctgagggctccctcccaggtcctcttctgccccattttattcatctcttgcactgatcctgtttggggccttggtagaagctgtgtgcatgtgtctggggtggggcaagaggaggcgtgggccaggctgaggctaggggagggcgggaggctcaggaggaggctgtgggagactttgaagctaggttggttgcccagactccggtcttcaaagccaagtgctggcagggcccaggggctcttgcagagtgcaggcccgggctttctgaaggcgagggagcacgtgggggagcgtggccagcccagcacctgtgcctcctccaggacaggccgtttacagccgcgggccagggctgggggcctgcctctgccaggtgatcataaccttcctggataggggtgcgtgtggcagggcccagagtcctggaaagggcccacaagaggagacaggattcccaaccagggggagggcgggcagcaggctgtgccaggctgggaccagtgcccatgagggctctctaagacaaagtgaggcagcagcggccgtccagcctgcctctgtgtggtcctgcagcccccgcactcacaatcctagcctgcccccgaagctgctgagtggtcaggccctctgccccgagggacagaagccaccgtgtgtgtctgcatgcacctaggcctttgcttctttccagagaacagaaaggtcccaagtcagtggagtcacaggtggcggagcctccttcctgcacagcccttcatgggcttaggacccccaacagaggatcgtcttatcaaggattctgggaaactgtgttctttagcagtgctttccaaactgtgttcgtcagggcccttgtgccccacagatgagtcatagctattccacgaaccaagggtctcacggccaactaagtttggggaacactgcacactctgtctccctcttggcgatactgatattcatgggcacgttaaaggctctgagaagtcctgcggtaaaggaatcagtgtttcccaaatttctttaatcaaagatccttttttccagtaccgcagtggaaaaacctgagagaccctggagctcttcagaacacagggtgggagacaagtctggcagtggtgactctgggtggattttttttctgggacctcgggctggatggccctagattctggagatctggagggagcgggaaagagaggctgctacctgctccatctttgttatacctgacgcagggaggccccatccataccctcgtgtgaggctctgctgggaagggacatctgtggtgggaagggggttttctgtcaagggattaggttcccctggggcctgtcctgcctcctccatacccaccacttactgcccctgtgagctggctctacgctttggctttgaaccctgtacacagagtcccctgtgagacatttccaaggtctactctggacagagaaatctgtctacagcagggatgcccaacgccaccatctcatctgggcctatggtggcagctcagcctctcttcatctttctcacttttgtgcctgagtctgaggttgagaaccaaggtcaaggtcaaattctaaatggaggaaaaagcaggtcccgcaagaacatgtttgcttgatcctggggggtggggtgtgcccccgctggcacccttccccacactgccccaccttggctttggggagcggcacagcctcagtcttccccaggcccaccccagcgctcttcctggggccccttccctagaaacattcccatgcctgaaacatggctgccttccagaatagtcactgtctctattccccctgtactcccagtcctgcttcttggggtcccagtagcctgatgagctggtggcgccccttgtccttggctcccagggtttccaggccatgccctccaccggccaaggcttctgccacccaccccacctgcaagtccccacgttctcaggagaaggtggagagtccagggtgagggtcccttccagacccagcagctccaccttggaaagggacagggacccagggaggggctgcaccagcaggcaggccagggacacacccagagaaggacaggttcccgctacacaggccccagaacaaaggaccgaggggccccctggttaccttagtgacatcctcagcaaggtcagaggcccaggaatgctcccctt

SEQ ID NO: 745 - DNA, 32742 bp, Homo sapiens
  source 1..32742: mol_type = other DNA
cctctcgctggcggactcagcgcgtcctccgccagccctcgcgtctgctgcccccgccatccagttggtgcggtccatggcgagcgcatcatggcgattgaaggtaagtggaggctgacagcggggagcgaggaccgggaccacccagctggcggggggctcggaggtgcgccggcaggccgaggcgctgacggggccgcctcctgtggtctggagccggctgaagacgcgcgggggtcctggccgcgtctcgggaggcgggtgggcggagcggcgccgctgggacgccgggcccgactggctcgctcgccccggccttcgtggttttgccggcctcccggcggccgcacgcggggcaaagcgggctggcgggcaggtacagcgtccgggccgccgcctcctgccggccgcgcggagtggaggtcggggtgaggccctgcagaccccacgggacgggctgggaggagcgaggggccacggggggctcaggctgccctttcttttctttccccggccgcggcaaaccatccttccgcaatacccaccttcctgccaaactgagagtccagttttttgtcccattcctaacccttccctgtgcccgctcgggctgatgctgggttacactctctgcccgttccccttctgtttgctgttgtagggggtccaggaaatttggggttaggttaatttcctcctcaagtggttttgttccccgccaacactcaaaactgtttttctccatgaaaagaagtaaataacgtctttacaacaagcacacattcttagaatcctgcaaataccagtctatgaagtgttatagtgccacaatgctcatatttcgaaaaacagcttaataaaaattaagttcctagataaggtagttgacactaaagtgtatttttctcttgttccagaaacatgtaactgggaccaagtgtctatattttgccttgtttttaaggaagagattgtgagaattaatttcacacgtctaggatatttatgtgaaagattacatcttccaggccctgtctcttagattaactcaaacagtgaaagtaatttgtaaattttccctgtgtgtgtatattcatctgtgcagctgtgcaaggtacctatagctatatcattatttctctacattgaaagtgtgttcctaagtaaaactttttaaagcgtttcccttctaagtgatcaatcactggtagtatgcatctctggggacttctttttgtcggatcatgtggactccaaagtagagttagctgtgtgtttacatgtagcttatttatttaagagagggagtacctattgtatgcaagacacattcagacagtttcaaatgtctgcttgagttaaaatggtggggaataagatctacctataatctatgatgttcctgttatctgcagcagtactttcaacatttgtttccctcactgtccttttaccaaaggttaaaaatcaagaaaccaaacccactgatttatgttgtgtactttattttcccaactagtttgtggtagagtttcttgtgaagccgtgaaactctaccacactaccacactaccacaccacgtgaaagtagaaaggtttaggcagagcatgaggaaaatccttcaggcagatgccattcggatatgatgctataacttgtaatttcttaaaatcttttcagttttttccgttttttcttagttcttcctttctttctactggcagttaagtgttactgattcattttccatgtcacctgatggcattttactctgcctactgcttaacatgtttgaagaataagattttttaaatcctcacattctagagattcttctgtgtttgagatactctcataaatattttcatactgaagcatttgcttaagttttcataatacaaagatcaggaattatatcttttctagtttggcaaagaaactgtaattaatattagcacttcagataaagatggcagttcgaattagcctaactgtgctccttatcacatagtaaaatagattcattatgcacacccttcctaggctgtgttatgaagtagaatgagttctgcatgagactctgtactaaggacatcttaaaaatttaggggcccaaaagggcgtctcatcttttcagtaaagtgtttcttaaaacattcagtttcttcattcacctattaattcagtagaccttttttttttttgtacaatagctgtatacaatgttcattgctagattccatggggccaaaaagataagtaagactataacccttctctcaaagagttcatgttctattcggagagacagataattttaaacatgcaattacagtgtagtgtgaatgctaagagatggatcatctttcctttgtataaaaacattcaatgatgatgggtctaacactgttttttggcagtaattcttatattcataaggtctttgtatttggccgaatatctgccattcagtaacgtctgtctacccatcctagttttgctttctgtagcaataaattaaaagcccactattctctctatatatgatatcccttctgccatttgaagacagctctagagtgttttctagataaaatatccacttccctcctctggatgatctgtagttgtatgttttaaaatttggaatatagtagtgggccatttcattccagttatactgttgaatagcatacatcaaaactgttataccactccttcacttatgtgtaatcctattaatatagcttaacattagaataggtttttttggagcttcatgttggcacagagcgaggctgtaatcaactaaaaccacagtctcttttagcttgactactcccttgcttagctaaccaatgttttgaactgaacagatcgtttatatctgttaagcatactcttattagctatggcccagtgttttagcccttgagtctagacttttaagtactaaggattgttttcattttcttctctgtgtaaacctattttataacacaaaattatttctactaagtaatcattcatttcctccttttatcagtcagatgtgtaactattaatcaaaaaaagagacaaatataagatgatagagttaccacatggagctaacataattccagtcagcagtaaagaagttaggctatattaggcaaagttacaatttttgaaaggcattttgaaatattgacaatagttacacatccttactgttggcccagtgatctggcaataccaggttgggaatcattgttgtagcctagcctatgaagtgatgtaattgctatccagcatattaattcttctagtgttggcctctgttaatctgatagcgttgacacttttttgttgtatttgaaatttcctcctctcttgattacatatttctcagttttgtcttaatttacctgacctaatgttctagtggcttccattcttgaccctgttgccattgtctgctttatacacattgccgtaattgcacgcattgaacaatttagtaatcacttatttacaaatttgtttctcctgtccgactgtaaatttctagaggttaatgtcttattcatttttgtaccccttaggttttgtatagtacctgaatacagttgtcccttggtaaccgtgggggagattggttccaggtcccctggagacactaaaatttaagaatgatcaagttctttatatcatatggcataatatttgcatataacttatgcacatcctcccatatactttaaatcatctccagtctacttgtaatacctactataatgtaaatgctatgtaaatagttctttagggaataatgacaagaaaaaaagtctgtacatattcagtacacatacaaccactgtaggcctaactacgttttccatgcacggttagttaaatccatagatgctgaacctgtggatatggggggccaattgtattttgtatgatctcaagccaagtttctatgcattgtttcgtggaattctgaacatcgtcatcataaattatgccattgtccagaagcgtatttctaacacagaattttcctgacttatatttccaaatagtagctagatactttcacatggatgtcctcggcaatccaaaatgttaagcttaggatattcagaatgtcccaaagttgtcatcacagccaccaaatccagcctccatgcaaatttacccccccccccccgctctgttgtgcagatttaccatctgagaggcatttttaagtaaccaggaatctgagttaaaaacctggacaacaaccttgcattatagttcacctcccacatctgttgataactaagtcctgccaagtctacaattcaaatcaatttgtgctgcttggtgtcttcactttagtttatgcccttatcgctcattaagagacttgcattaatttcctaagtagtctcatttccagtgttaagtttccttccaattcattttccaagttagtgctagttatcttcatattgcaaaatgcaaatctgagtttcttaaaacctcaagataaggctggtccttaatgatctaacttccttccttcatccggtccacatttttctttctcttccataagggtatcagaagactctgcaaactgttttgccaaagtaaaaaataaacacttgttacgttgctgtattaactttacttaacttctctgggtaacattttttaaaaatgtagaataaggttaaactagtgagaatctatgtgtgtgtttgtatatgtgtgtgtgtgtatatagtgcatttacttctattaataatgtaccttatagtttgctacatacatatattgtatttttaaaataatgagaagaatactgagatgttctttaaggtttcttttggctctaagatttctaaggcaaaatttagactttcaaaagccatttgaaatattcagttaaaaaacccaatagatttacttttgaataatttacagtttattcaaggttacttttctaaccgactacacaaaattagaaacacttagcgaacattagagacacagtggtattttattttttgttgttttaaggttgtattagaatgcagcagtgtactttggtaggccgaggcgggcagatcagttgaagtcaggagttttgagaccagcctggccaacatggtgaaaccttgtctctactaaaaatacaaaacttagctgggtgtagtggcgcatacctgtagtcccagctactggggaggctgaggcaggagaatcacctaaacccgggaacccgggagactgagcagtgagtcaagatcgtgccactgcacttcagcctggacaacagagcgagattcaatctcaaaaaaaaaaaaaaaaaaaaaaaaaaaaagagaatgcagcagtgcatgccaatggggaaagcagagagaaccatatactggcttaatttatacaatttgttatttgttgagtaatactatttgcattatcagtttatttgaaaatattatgttcgcacatagtatatgtgtggtagtataatagattgttttcatgaattttatttccatttagctgactttattcttttattcttttcctctgaatcctagtcgattactacctaatatgaaagtgcttacatatgaataatgtaagaatgaacaaactactatatataaaacatttcacgcttttgagtaaaatgattatatgcatattttgtatgtatatatagtaatagctaaattggaacctatcaaattagaacccttgatttaccatttttttagaagggggaaatagtgacaactcaggaagctgttattaggagtttatgaacaaatttctaagagccacacatatattcagaacaatttcttattttcacatttttaggactatattagaattggtattcaagatattattttgagtcatcatgagatagaagttttaatgaatattaaattatcttcagtattctgaacttaatgcagtaatgcatattagtagctttaaaaaatgatctggtgcagaagtaaaaaaaaggttttgttttattgtcagttgactagaaaattcacttaagtagaattttttgtgagcacatacttaaggttttattgtgttacgttaatgagcatctggcagtcaaaaacgtaattgactaaacggattgaattaaagagtagctcaaaagttggaaaaaaggattaatttgtgaacagtaatttaattttataagataaaatttatacctcttagaaaagactattgaataaattcataggaacttatgtggatcaaatgagataccatatttagcatgctttgtaaattataaagtgctctgagatattgttgtcaataagatctagtttattttatgtgatgctggaggggtagtatgtgtttcaaagtgtaggctgctatttagtagaaatatcatagatgaaatgagtttgtaaaagtatagaaaggacttgactttttcagactattttaattctacagtaattgcatagcaacagcaaaaagtaaaggaattccaatttgggaggataactcccagagggttggaggcctgaagttttttgttttttttttccctctcttttttaaagaaaaaattcaaaaaagaggacaggttaagaagtatgagaaagttaaacatttattttggaatatttacatgggagaatgcttgaaattcaatgataactgtagaagagaagaaaacatctccagagcctgaatttctttgaattttatgttctacttggtgaagaatgcaaagggaattaaccttttttgggtgcttgccatgggccaggcaacatatattcattttctcaatcatgaatagcactgcttctccctctcttgtctgcagcagacatctgttttattaagacatcttttttcctgccagttgtggacttggtttcagaatccttggcaaccctaccctccacccccactccagcagctactcccaatccatcagaattagtatacaagatgaaagctattttctgtcctgaggttattattactattttataaattactttagctattatttttacttactccaaaggttaagtaacaagcacaggtttgcaaagacagtactaggtgacgctgagtttagaattgaagtctgactcaattcagaagcaatgatctttatgtaacactgtgttttaaattggtgaccaaaattggtattattccttgaatggtctaattagggacaaaactaaaagatgtctagagggtagtgacgatggtctaagtggattaaattggttggggggagttgcattagtagtttcatgcttacgatgtacagtgtaggtgtctgcataaggattagctataaaagagtttataaatgtaagctaggtgatcatttaaaggctctgactaatgcatgtgctttggagaagaatctttagatgagatggaatttaagacatttctaaagtagcctttcagtgtttgaccaagaagaaataagtagaacctgtaaattgtggtgatttaggctaatgatcagaataaacatggtagacaaaaaaatacagttgattttgaaaaggactcttagatccattttaaaggaactaaattttgaggtttaattccatttttgtgtacaggcatacctccttgcacttcattttgttgtaaattcacaaatttgcattttttacaaattgaaagtttgtggcaactctgttgaatgaatctattggcacaattttttcaacagcatgtgctcaccttgtgtctctgtgtcacgttttggtaattcttgttatatttgaaactttttcattattgttatatttgttatgatgatctgtgatcagtgatctttgatgctactattgtaattgttttgggcgctacgagccatgccaatataagatggcaaacttagttgataaatgttgtgtgtgttctgattgttccaccaatcagttattccctcagtctctcttcctttccttaggcttccctattccctgagacacaacaattaataaccctacaaatgttcaatgaaaggaagagtcacatgtctctcactttaaatcaaaagctagaaatgattaatcctagtgaggaaggcatgttaaaagctgagactggccaaaagctaggccttttgtgccagtaggtgaagttgtgaatgcaaaggaaaagttcttgaaggaaattaacagtgctacctgctgtagtgaacacatgagtgacaggaaggcttaacagccttattgctgatatggagaagtttgagtggtctggatggcagatcaaaccagccaccacattctctaaagccaaagcctaatccagagtaagtccctcactctcttcaattctgtgaatgctgagagaagtgaagaagctgcagaagaaaagttggaggccagcagaggttagttcataaggtttagaaagaagctatctccataacataaaagtgtgaggtgaagcagcaagtgctgatagagaagctgtagcaggttatccataagatctagctgagatcattgatgaaggtggctacactaaacaacagatttttgttgtaggtgaaacagcctgttagaagaggatgccatctaagagtttcatagctagaggggagaagtcaatgcctggcttcaaagcttcaaaggacaggctgactctcttgttaggggctgatgcatctggtgactttaagtggaagccagtgcccattgacgattctgaaaatccttgggttcttaaggatgctaaatgtgctctgtgtgtgctctacaaatagaaaacagagcctaaaattttggggttttaaatgacagaacatctgtttacagcatggtttattgaatattttgagtctgctgttgagtcctactcagaaaaaagatgcctttcaaaatgttactgctcattgacaaggcatctgctcacccaggagctctgatggagacgtacaaggagatgaaggttgttttcatgcctgctaatacaacatttattctgcagctcatggatcaaggattaattaagactttcaagctttattatttaggaaatatattgtgtaaggctgtagctgccatagatagtgattcctttgatggacctggcaaagtaaattgaaaactttctggaaaggattaatcattctagatgccattaagaacatttgtgattcattagaggaggccaaaatatcaacattaataggagtttgggagaagttgattccaactatcatggatgactttgaaaggctcaagacttaagtgggggaagtcactacagatgaggtggaactagcaagagaactagaattagaagtggagcctgaatatgtgactacattgctgaaatctcatgataaaacttgaacggatgaggagttgcttatatggatgaacaaagtggtttcttgaggtgaaatatactactggtgaagctgctatgaacattgttggaatgacaaagggtttagaatattatatacacttagttgataaagaaactgtagggtttgagaggactgactccagtttttaaagttctactgtgggtaaaatgctatcaaacagcattgcatgctacagagaaatcttccatgaaagaaagaatccatcagtgtggtaaacttcattgtctaattttaagaaattgccacagccaccccaaccttcatcatccattatcctaatgggttcacaatcattaacatcaaggcgagacccttcgccagcaaaaagataggacttgctgaaggcctagacaatcaataatttttttagcaataaattatttttaaattaagatcatacattttttaagatacaatgatattgcacacttaatagactacagtctagtgtaaacataacttttgtatgcactgggaatccaaaaagtttatgtgacttgttttattgcgatatacactttattgcagtggttgggagtcaaacctgtcgatatctctgaggtatacctgtacctggatgtatttcgatggggctgccatgtaactacatattttccttctgtaaacatgtgtaaacatgtacatatgttgtaatgatcctcttgtgtatttttttaaaatcccagtttccagttacagtcacacttatgtgtatattcatacacaaacacacatgcacacaatcacagcacacgtgtgtgcccacacacatctattttctcttacaccccttatgccaattgtagaggattatgccagtttgcattttgctcctgcatgggtttgcctgagggaaaagatggtaactttgactaagcttgtcactttctatctgtttctcctttccatgttgctgagatgattatttcaaaagcaatgctagtattatctccgcaagtatagtttttatgcagttctatttaaattaccttaaaggattggaaaacaatttcgtaactttcataaaaatgaggaaaaatcaatatttactttccaaaatacattaaatataatgttctatttttttttctgacaattaactagtgaccttgagcaactttaacttttgggcgtctccatttatctataaaattatgaactagacaaatgtagttctgagttctagtgtctcctgttctgtcattctaatatggtgtcccagtcttcattttcttgaataaaatttgatgtgtggaaaattgtatttatacaggagttcattttgggggtgattatttattttagtggaagattagtctcttcccaaagatactggctaagtgaccaagtaagcattccctcttgtgcgttacactgttaaaagcagtacaccactttttggataaccaccacatctaagtcaaggtatgtctgcagtgtttttcttgcctcctgattacaaatttaacatttcttttggaaacttttcagatttacttttcaagacaaaatagacataaaatttgtacaaagttcaacatatctctaactgaaaaagtatttaagcctttgacttccaaacagacatatacattaaaaaatttacatttaacctggagaatgcatgtttttttccttatactcctcccagtcttaggaaggattggggataaaaggaacactaggctgggcgtggtggctcatgcctgtaatcctagcactatgggaggccgaggcgggcggatcatgaggtcaagagatcgagaccatcctgggcaacatagtgaaaccccgcctctactaaagatacaaaagttagctgggcctggtggcatgtgcctgtagtcccagctactcgggaggctgaggcaggagaattgcttgaacccgggaggcagaggttgcagtgagctgagattgtgccactgcactccagcctggcgacagagtgagactccgtctcaaaaaaaaaaaaaaacactcaatttcagtttccaataatgtaataaatttatatgactttttaatatttcttcttttgtgtttttaaaagcagggttttcttgaattttattttattgtctggaatgtatccttagtattcctgttcattttcataagaatagtgattgcttttgagttccacatgtacatcagtgaagtcttattcgttggttagaatttgggggacaaataccaagaaaggtcatgcatagtcttatttgcttgtttgacttttgtgggtacttggacaaatttggcagctaattgactgtaaatttgaaatatagtgattattcgagtaacttaaaaaatttaagaggttcttttatataatatagataaattgaatgcttttaaaagtgggaattggctttcattgtcattctgcagttctgataaatgtcttagaatgtagtagtttttattgttactgtacatactaagccttgtaaaaataatgctgttacagttaagattaggtgtatgtggtaaaacctaatcaatttatattaaatacgggggagagtttagttctaattacaggctttaaaaagtacagcctttttacgtgatttaactgtgtaactcaaattaagttacgtgtgtaacttctagagaataagccttaatatgtatggagaatatttctaagttacctatgaaaacatcataggcctcaatatattaatacattatagttatgttatttttattacatgacccttctaatgtctcaaaaatagctttttgtcataatttggtaaatatccagtcattggactagtatctcctcaattggaaagaactgtagtatgtaggtgtatttcattctagcctttcagcaagtgatctgtgggtaatactccagttagcactctatttttcacactggggttttgctgaataattcatttataaccatagttttaagttaggtgtttcttcttgcaaagcctatcttcctgataatcagtggttattctgtatttttaataagaaagaagcaatgccattgttacaaccaagtcagaatgaagatctaacctactttggtgatagaaatactattttctagtttttttagcttgcttctcagatgacctactttttttagtggatatcatggtttttacttctcatgttatttctgtaggatatttctgtttcttataaccaagctgtttgtaataagcttctatgctaaactgaaatgattatttaatattttcattatggaaagtttaaaagtaattcacaacataattataaggtcatacatatatggtacactacaaaattttattcagcttacattaaagtaatgacatgattctgagtgaaagaaatatgtctacatggtagtaactaatagagaaaattactcttataataaattagaatattcaaagtatgtatttatggggtacaatgtgatgttttgatatatggatacattgtgaaatgattaaatcaagccaattaacatatcagtcacttcaccttttttgtggtgagaacatttaaggtctattcttggattagcaattttgaaatatacaacacattattaataactgtagtcaccatgctgtgcagcagatctctaaaactcctcatctatctgaaactttgtaccctttgcagtatctccccttttcctatcctgcccctctccattcccttcttctctcccacctctggtaaccaccattctactctacatctgtgaatctgacttttgtagattccacatacaagtgagatcatgcagtatctgtccttctgtgtctgctttctttcacttagcataatgtcctccgggttcatccatgttgttgcacatgacagaatttccttctttttttagactgcatagtattccaccacatatatttaccacattttctttatccatttccaccatgtgccattatcttttaaagttaaacatgcacttgccccataaacccagctgttctcctcggaatacatttagaagaaaggcacgcacagcacacatgtgggaaacagagacatatgttatataaaaaggttcatagcaaaattagtcacagcaaacccaaatcaatccaaatgtttatgaacaatagaattgaaatttatgcatatgtatgcatgaatatatgtgtatatatgtatatttatacacaatggaattctatatggaaatgaaaaggaatgagccacaactacaagtaataaaatagtttgatcttaccaacctaatattgaaagaagtaggactcaaaaatgcccacttaacaattccacttgtataaattttttaagcagacaaaaccaagctgtaatgatagcactcaggggattaggtacttctggggcacaaagtagtgcctaggaagatgagtaaagggctcctggaatgccagcaaagttctggttcttgccttggtttttagcaactcgggtgcttactttgtgacaattacatgaaagttttatatattagtgcacttttctgtatttttggtttttggcccaataagtagagattttttaaaaaagaaacattacgaaagactctttccaaaaaagaataatcaaaatattttttaaagttaagtttgtttttatcatactattaaatttgttttacaaatttataatagtgggttgttggagaatatataatgtgagcatatatgataaaatataaatagtaactttacaggattgacctttcaataacttaacctgtgtatgttaaggctcagatacaaaagtgggtcctctcttacagtctttccttctagacgatgtgaagagatgcttgggaaatattgatgtgatttctgctgttgagaagcttgccattcaaaatcacatacttgaatgaagtgtcttcattccgagacttcctaagacctaatttctgggttgttccagaaaattctgatattaggctataatattcatttagttaagtataaagagaagagttagggaaactttttttgaggtcacttttaggtgctaatttaaaatgattctttgtaacagtcagattcatgctactttctatgtttttaacttcccataaactttttttaataggtggagagagaacctgtggagtacatgaacttatctgtattagaaaaggtaagtcattgctctgcatggctatttacatactaaatgaatacttccaaagtgtataatagattttagtaggatggcggataatttgtatttatgaagtgtaaattttagtaaatattaacatttgtcttacagacttaagcattagtaaagtgcatattacttattatgtgattattgagagttgttgctttatatttagttttgatgggctaataaagcctggtttctagcatattggttgttagacatggtgaagaggcaaagaatggagggtttgatttttgttccctttcagaatctggaatctgagtgcatgctgatctcccattgacttctgttctattactgtaccccatcagagagatgtgaggagttggttgaaattcaaatcgggaacatatccaaagaccacaacatcctttgacaccaacaactgtctatgcttccttagaaggagccacctgacaactgggtggttcaacaaagtggccccaggaaaggtaattcagttactaggtgggaggcaaggaatcaggtattctctagatttggaagaatcaggagaaccttgggagtccccacaactccttataagtaatcacaaatctatgaaatcatatgaaggaaagatattcctggggaggtcaggggaagaaatcctcataaatttactactcttgtctctttttaaacttggggcactttcttttcttgcatctctcttcagactcacttgcccctcctgagtctagccaactaacagcactcctcccatccctaatatttcactttaaggaagtttggagcagtgtcattatttgtgatacctgggtatgagaggcatggcaggaaaatatcagcatgttttcagtaagtctttaacagctctgaaaagcctcagcttctttagacttgaaaaaatttttaatcctttttaggtgaatttatgtgactattgttgacatggtcatactagtttatctgtgagtcattgcatacaattgctgttcatttaaaatcttcttcctttattaaagtatagtttttccatatacctttcctctagtaccacaaaggaggaaattgaagtcagtttcatgaaatctcaaatttaggattgtgattctcatgctataactattgttgatttgtgcttcttacctaaaatggaggtaggggatagacaaatttatgcattgttttatttctctacataaacatttgtagttttctgctgtatacataaatccagaattactaaaaatgtttgaaataattttatagttattatccagtcccactaaaactttttaaaacttttaatttgctgggatagccaaagacacagtaaagcttagttggagtcaaaagctattaaaggtgtggtcaggtgaaaagagaatcaaaacaagagtagagacagctagaagcaagaaaaggaaaatgtttagagggtcttttgtggctacaaagggagcagaaagctacaatggagaaaattagataaggatagaggatggtgtgaatatatctttttttttcatggcttttttattgttgttgttctttattgctgtctctattcctatccgggtagttctcaaagtatgctttgcccagatttctctatattagtctagcttttttgctgtcttccgtttatctacagaattttaattctgcatttaaaaatttattcacaccataggcatgaagtggaaaagtatctgaatctctgtttatcctctcagcattcagtacagtgaatatttcataagtatttgaatatttttggaattaatgctctgagctaaagctttttgcattttatcctagacttccatagagtagatcatatgaaagttatgtagagtaattataattagtatcaatgattattctaatgaaatgacatctctgacatcacaacctcctttattctttctctcttttttttttttttccagagacagattctcactgtctcccaggctggaatgcagtggtacgatcttggcccactgcaacctctgcctcctgggttcaagctattctcatgcctcagcctcccaagtagctgggattacaggcgcatgccaccatgcccggctaatttttctatttttagtagagatagggtttcaccatgttggccaggctggtctcgaattcgtggcctcaagtgatatgtccacctcggcctccccaaattctgggattaccaccatgagccaccgcactcggctagacatcacaacttctttttacctctttgactgtttctgtctcttttgctagcctctctcccctgtcagacctctgattatatcatgtaccaggggtttggtcctgggcttacttcgtttttccatcttttactctgtttgattttatctagttctgttgttttaaatgccacacaaatttataaatccagttcttggctgtctgagctccctcatcttttatcaaatgagttacttgatgtttctatctggatgtctgttacaataacaacttgacacgtttaaaatgcaagtcttgattttcttacctgagcctataccttcctcagttttctccatctcagctaataaatagcactgtctacccagttacgcaactcctaacttaagaatcatcctgtatttccccattattattgtccacatttaatttattagtaagttcaatcagttctacctgcaaagtatattttttaatttatcctcttttttttcatcctgctgctgtcattgtagtctagttctctgtgttttttcctagatcactgtcatagttttctaactggtttccctacttggcatttttatctcctttcactaagtattagtgattttcaaaaatgtaaatcaggccaaccactttgcttgttgaaatttttctatggattctcattatacctcaaataaaagtatcttaccctgatctacaaagacattatagtatcaactcggagtccaaaatgtcatctgaatatcatcagttcaaaagtctcattatctaaatcacttacattatgtatgggtgagactctgggtgtaatccattgtggttcaaaattcctttctatctgtggacctgtgaaaatagaaaccaagttaccctcctatgcatttcttcaaatctcatttccctaagttgtgtttcaattttggttaagtcagttttcagaacttacatttttataatcaatattgtttgcagtaaagccatattatatcataattatatttccttttttatatagttttcatcttaaaatatcccttctttcagattgtaagcacccatcttaactcctcattaaccatggttcagaatccactttgatttctctgtcattcttatttttcttctgctaccacccttcccgctatattgaagtatacgtctcctatatcatatatccctagaaaagatttttctgcttccctaggaaataattagtcaatatattgtattactcaaggtactgttagctgctgcactgaacaaaccccaaataatgactcaaacaggatagaggtttttttctctcttttgtgaagtttaaatcaggtatttctagttgccatagaacactccttcagcagtgatttagggatccaggctcctagcttgtggctctggcatcttcagcacatggctttggaggttactatgttcatcttcattaagcagggagtgtgggggaaaaaaaggggaaaggaagattgtgtgtaggagatttttatgggataggcctggaaggaaagtacattccttaagattaccatgtcaataattcagtcacagggctacatctatagtaacttcaaaacaggctaggaagtgttagtgagtcagtgagcccaagaagtacagcaacctatagtctgccatttatcaattaatctaccctaatatgaagtgctttccttgccatagtcttacatgctctatatatgctaatggtgaccatctggataaatttcttctagaggcaggtatataacttaaaggtgtgacttcagtgagaaaatttaaggctaggtagaaggggaaattcatatggaaagatgtaatagggttgttttgttttgttttgttttggaggggaaggggttgtgaatcctctgattttgtgattgtcttttttgtctcttaggaccctacaccctttttttttcatttccccttcaccacccgattgctgaagggccttttcccttctgcctttttttcttctgcagaagctatgtacaaagactgcctaactaccctgttaagttatgcttgaaactaacttatgctgactgagttatgctgaaagtaactcacatgtactttcagagttccttccctgtaggctgtgctgtcatctacccagttttgttattgccgttgttagtattttcagatttaacatggactttcctttctaactttagcccccattgctgtcttctctcttctctctctctcgtagcttttctcttcctttgtttacaccaaagcctttcccttttgtttgggtggggtgggagcacgagagattgcaccttatgatttggtaagttttctgtttttactgatgtttattttgagatattagcattctctgtattcagattattctgaggatatagtttttatgtggctttactttttttctttttttttgagacagtctcgctcttgtcacccaggctggagtgcaatggcgtgatctcggctcgctgcaatctccacctcctgggttcaggggattctcctgcctcagcctcccaagtagctgggattacaggcatgcaccaccatgcccggctaatttttgtatttttagtagagactgggtttcaccatgttggctgggcttgtcttgaactccctacttcaggtgatctacccacttcagcctcccaaagtgctgggattacaggcgtgaaccaccctgcccagcctgtagattttttccttcttgttttgtagatttactttttccttcttgttgtatccagttttggggaggtaaaactgggagacatggagttaggcagattccatttttttcagatactcagaaatgtctatggtatgttcatgaacaaaaattttaatgttaatttagtctaacttcttaatattttttcttttcattcttttctctttctccccctccttccttctttctctctgtctttctagtgctttttgagctgttttggggaaatccttccttaaccctaagatcatagcaattccgttactttaagagatttagtcttgcttttcatatttatgttattaatccatctgaaattgattttttatatggttaagaacctaatttcatttttttaatggttaagtagtagttccagcacaatttactaagtattccaaacatttcccactgaaatgcagtgccacctctgctacctctgtcaagtttttatcaagttggtctatttctgttccattaatcaatgtacctattccctaacagtgtcactatcttaattattgaagtgttgtgattcttgttatctattaggacaaattcttcttatttttcttcttcagtaatgttatagctatttctgggcctttgattttccatataaagttcagaatcagcttgtcaagttccttaaaaacaaaaagcctttttggaattttaataggaattacattgaatctctagatctatgtggagacgatatctttaaaatactgagatttcttattcttgaacatggtgtatctttgcatttgtttaatgcctttcaataaggttttgaaaattcctctataatgatcttgcatttttttagatttatgtttagataccttatattttttgttgctatactaaatgaaattcgttaagggaaatgcaattaacttttctaaattagtgttatatgtagctatgttgctaaactatttaactatttccatagatattttgggttttctcagtagacagttatatcatcttcaaataataagttttttaatcttttctagttatactttttatttctttggcagcttcctggggaaaataaacaaaatagaactaaaaggatactctataatcctcttccaactgcttgactaagcatgatcttataaatggacaataacaagtgttggcgaggatgtggaggaattggaactcccatctattgctgggaatgtaaaatggtacagcaactttagaaaacaattacaaagttcctaaaaaaaaatagagttaccatataacccagcaattaatactgctaggcctatacccaagaaaattgaaaacatatgtttatacaaaaatttgtagatgaatattcacagcaagattattctttttttaaatttattattattatttttttgagacagagtctcactctgtcatccaggctggagtgcagtggcgtgatctcagctcactacaacctccgcctcctgggttcaagtgattctcatgcctcagcctcctgagtaggtgggactacaggtgtgtgccaccacacccagctaattttttgtatttttagtagagatggggtttcaccacattggccaggctggtctcaaactcctgagctcaggcaatctgcccgccttggcctcccaaactgttgagattacaggcgtgagccaccacacccggcctggcaacgttattcttgatagccaaaagggaaacaacctaaatatccatcaactgatgaatgaattaaataaaatgtggcatattgacacagtggaatattattcatccaccagaataaatgaattattgatacaagctacaacattggtgaaccttgccaacagagaaagaaaccagacataaaaattgtttcactcgcaaacagtgaaagaaaccagacacaaaaggccacatatcatgtatataggatttcattcatatgaaatgtgtagaatagacaaatctatagagacagaacatagattagtagttgccagggctaggggaggggagaatagggagttactactaataggtatgggtttttctggggagtgatgaaaatattctgaaattagatagtggttgcacaactctatgaatatattacagaacactgaattatgcactttggtgaatgttgtggcatatgtgttttatctcaataaaaaaagcgtctgcttacatagtgagttttattcttaaccagctcctctttttatgcaaaagtttccattacctgaaattctattcctttgatatttattactttagattttttatgtctttatgaacctaaattaaaataatgatatgcctgagacaggtgaatgtatatactaatatatgttaatatgtccaagtcatattaacctggagggtggtttgtagttttatggcacaggactctctattgtcctggcctattagtatttttatatactaaatctatctttatggcattactttattgggtattcacaaatcaacatgtaatatcccagtatgaatggcagtctgtttttggaaattgtagaaaaaagtctctgtagtggttagagaataggagatgatcagtggttaactttgttttttcaatttaggaaaaataaatatatgcctttttttaaacattgaaaataaaaatgactttactgaatccattgggaagatgtatagaatgtttaaatttattaccttccatgtttttccttgactagaaggaagtcacttatttaaaccactaaaatataaatatctgagcatatttgagaaatagtagcaaaaaacagctttccaatcttttctcccatttgaatcaaagattgtcttgaagctaggttggccacctgtggttttttgaatgctgctcatcactagtctaggtagcctttcaaatatgatccgaaataataaacctcatcaattaacatcttaaagtgagtagttgtaactcatctgagagcaaaggcttgtatgattgttgacataggatgtgcatggtagtggtaggtttacaaattatggggctacaatagatatcctatatctgttcaattctgatagtttcttatcctaatacataactgtattagaataatacacttataagagagtacaaggtgtgagagatgaaaatttggagacaacaggtagattactgttactaaagctaggggagaggctgaacttggtgctgcttttccaaacttatggcaattaagggaatgtttctgcatgtgctgttcttttcctttgagttggctgatgtcactttatggacaaatggaaatccagttaggtgtttatattttactgtctacaccctcggattctccctttttgctgggtagacagatttgtgctttctttctcttccccctcaagtgcatcgtgggctcttccttcttttggtagtgtttcagttatttcttttgggaacatagtagaaaagtgtctgaaatgtaggtgacaatttttcatgtagaatttgtgaaggtgtagaactatattctgactttttgggggctgggataggtacagatttcttgcttagtgaccaaacttgactttcaaggcttttatagttctaattgtccagagtagaagaacaataaagtaacttttcttttttctagtatttattagagctagtatttagtagaaagagtacatgattatgaaataaggagatatggattaagtttcccaatttgcttcatccaggctgggtaactaaagtcattaaattctttgagtctcagtttccccctctgtaaaatggtgacattattaaggcttatctgtactaatctcacaagacttctctgaggatcaagtgaaataaagtgtatgaaaccctttgtagtcagtaaactggtatgtacatattattattatcttactgaagaaggtagggacagtcttggaacttgtagactcttactagagatgaatcagatgtattttttttttgtatgaattctggaaggcatgacctgattttttctattgtttattctttcagtggtttgacactcaggactttgaatgtatgagacctacctactgagttactaatgttagccttctaaaatgtttctataattcatttaaataatggcatatgtctataggaaacagtttgctgatctctgaacaacgaagtggctcctagtatgaaaaatcctgatcatgaatctttgggtgttggcatataagcagacctccatcttcaatttctatgcaaatccagtaaaataatttttctcttattgttagatcaacatgcaaattctaaaatgagaaattctaaaaattatgtaaaaattataattgtcttacttttctttctttcttgtgactaaacagtatgtaatgaataaagtgctctttttctcagtgtataatttagttttaattattttaaaaaatattgtcataatatgattctcttatttatgccattttcgttttttctggttcttagcgtagatatcttttttttatatatatatatagctcagtgacttctagacactactgttaagggatattcttgaattgaggggaccaatagatttttgtaactgccctgttggtgtacattgtaagctttttttttcttctttaacctggctcaagaaatttcaattaggttgtgaatttatagagcctcggtagtagcagagaatagagctttagctactatgattaacatgacagtttcatttacaatttagtagaaggtggagatcatggagctatattttctttgattcgttctcagcttctttgaacttcttaatgagaggtttatgtgcacccagagggagggtgcctaccgcattgactcatgcttgttatttttaattttatattccaaattcaggctgccataaattaacatatacgctaagagtaaagcagacccccagtctttgaaggggaatgaagttcaagagataaagggaaagattatattatggaggtcataggagtacaagaatctagagtaatccaaataaaaatggagagcaaatgggtgatgaagactatgagagcccatcctgtacctcactaagttctcctttactctgaaaaagccatctaaaagtgtcattttcttcttcccttatttcttcctctaatggctgtatgagttggagttttgcaagtgtaaaactaaggtgtttacagaatgatgtctgtggaccaacttcagaaatttaaagcctgtttgtttttcctaacccttctgcattattcagttgagttatggacttaataaatcacattgaaatggaacagaagttcatttattgctaccggaacagaaagactagaatgttgtttatctgcctggcccttggttcaagggaggtgatctaggcattcttttactctgaatagacattatagttcagatgcccagggtgtgtgtaaaaaagaaaatctttttttattcttgagagaagaggaatagagatggattgctgagatggtcctgacagaattggtgtcatacataccatccactatagtttctttggtaagggtccaggtattatacaaaatgtcccattgccaatttagtttagatttctctctcctaaggtcttttccattggaaggagggtagggaagagggaaattttcttgttttatcaacctatttcattctaagacttaggcagaggaatgggatatatactaagtaattttggcttatgtatttgttttacctaaatgaattatatatgtaaaaatatgtatggctgggatcttttgatcaataaaattaattttctggttatttattctggcctgtcattttcatgaggagaaaaaatatctacagaggacagttttcatacatcaactgaaatatgactcatcttttctacatttcaaccccagaagttaggtaaacacaaacaaacctttaagaaatatatctacaaaatgagagtgatgaatctgatgaaatgacagatttggtgatgatttcctcaaagaattggttgttcacatcagtgcatctctaattactgtaaaatatgggcttctttaaacatgtaagtgtttacatccacttgtaatttatttcagtcagaggtgtgagggaaggatccagctttatattaatctctaactgatcagccagctatacaataccagttattggataattcattttccctgacaatttgcaatactactgttttcatatgctaagttgttatacacgcttgggtcagtgatatggtttggctctgtgtccccacctgaatctcatcttgaattgtaatcctcattatccccacatgtcaagggagggaccaggtgggaggtgattggatcatgggggcaggttcccccatgctgttctcgtgttagtgagtgagttttcacgagatctaatggttttataagagttcggcagttcctcttctctcccacctgccgctgtgtaagatgtgcctgcttccccttctgcaatgattttaagtttcctgaggccttcccagccgtgtagaactgtgagtcaattaaacttcctttctttataaattatccagtcttgggcagttctttatagcagtgtgaaaatggattaatacagtcagtttctgtagttaagatttttttctttctattcatctatatgtgttttctggaaccactattacactgcttttattattgaggcttttgttgcctagtagaaaagggtttcttgcattagtgttcattttaaacattttctggttattcccttatgtttatttttcgatgaactttggaataaagtatcctctcctacaatttatattccaaaataatcctttttcccagaaagaatcctaatgcaattgagtttccttgtgctctctccctatcatgaggggtcacacagagcacacttcctcagcaatgaaaatgcagcaacatgtataccatcttcctgcctaggaaagtccattagagactcagagcccaaggttttcatggagggcttgccatgtaagcaccctcttcctagcttgcaaaaaaaaatgcagatttccaaaaggaatatatgagttcagcataaaccatagtatttatacaaacagtctaggcacaataaactacttttatcaattaatgttgactgggaccactctgagggtcaagttcccagatgccagccaagggccaaccttataagcaggcttttctaaggatagcagtctcaggtctgctatgttcactttttttctgtacagaaggtcagtgccaaagaagggcatgttttgacgaaggctattttaaaataaaattttagattcaagaggtacatgttcatgtttgttacatggatatattaatatactgtgtgatgctgaaatctgggcttctgttggatccatcacccaaagagtaaacagaatactcaatagttattcaacccttttccccctccctttctcttctcttttagagtccccgtgtctattgtttccatctttatgtctgtgtgtactcagtgagaagaagtgatgtttgattttctatttctccattaattcacttaggatgatggcctccaactacatctatattgttgcgaaggacatgatttcatctcttttgtggctgcatagtattccatgatatatatgtaccacgttttctttatccagtcaattgttgatgggcacctagttgatgccatgtctttgctattctgaatagcactgggataaacatataagtgcgtgtatctttttggtagaacagtttgttttcctttgggcatatacccggtaatgagattgctgggttgaatggtagttctatttttagttctttgagaaatctccagactgctttccacagggactgaactaatttacagtcccatcaacagtccgtaagcattccctaaggaagacattttgagttagtttttatgtatgatgtgagatacatatcaaagttcacctgatatggatatctaattgtttcagcctcattttttgaaaaaaactatcctttctgtgaaatgcctttatccttttgtatcaaatcaatagattatatatttatcggtttatttttgaacttctttttttttttttagatagggtatttctctgtggccaggctggagtacagtggcaccatcttggctcactgcaacttccgcctcctgggttcaaacgattcttctgcctcagcatcccaagtaactgggactacaggtgcgtgcccaccacacccagctaattttggtatttttagtagagacggggtttcaccatcttggccagggtggtctcgatcgcttgatctcatgatctgcctgcctcaacctcgcaaagtgctgaggttacaggcatgagccaccgcgcccgttctatttttgaactttatcctgttccattgatctgtttgtctgccttgttgccaataccaaagtgtctttattactatagctttataaccattcttgaagtgcaagtctataaattttatttgttttcagattcattcgctcttccagaccctttgcacatctgtgtgaattttggcttcagtttatcaatttctacaaaatagcctggtggaattttggatgggactgtgttagaaaaaaacacctgtagataagctggataaaatggacatttattttaatattattgagtctacagatccatgaacctagtgtatatttctatttagttcttctttaattttctttagatatattttgtaattttcagtgtataagtcttaaacatttgatcagatatatccctaagcatttcatattttttaatgttgtaaatagaaattttaaatttacatttttagtggttcattgatactatatagaaatacagttacgttttatacattattttgtatgctgcaaccttgctaaatgcactcgttctagtagcttattttgtagattctaaagaaatatttacgtagatgaccgtgtctatgaataatgacagttttacttcttcctttccaatctggatgccttttctttctttttcctgccttatttcactgactagaacttctagtacaatgttgaatagaagtagtgagaatgagtatctttgctggtggtctcaagggaaagcatttagggtgatctcaagggaagagcattcagtcttttgccagtaagtatgatgttagatgtttttgcctgggtgaggaactccctttttattcctagttttctgaaaatttagaaggagtgattgttggaattttcccaagaaaatgctttttctgtatctactgatatcatatgattttaaaactttttttagtttgtttacatgatgaatcacatgttaaaccaaccttacatttatgagataaattccacttgttcatgatggattatccttttactatattgttggagtggatttgctaaaaatttgttaagacttttcgtgtgtcagtagggatgctggtttattttgttttcttttcatgcctctttctagttttagtatcaggatgatactggcctgagagaatgaattgggaagtattccctcctcttgaattttgtgagagagtttatatatagttggtattatttctttcttaaatgtttggtacagttcactagagaagccacctaggccttggtggcataaaccttctttatgggaaggtttttaactgcagacttaatttttaaaaaaatatataggcctcttcaggttatctattcctgagtgagcttttattatttctgactttcagggaatttgttcatttcatctaagttgttggatttatttgtctgaagttgttaataatcttttttatcctattaatatctgtagactcaaatgaagataatctatttcatttctgatattgataatttctgtcatctctattttttcactgatcattataggtaaaggtttattggttttcttggtgttaaagagttaggtttttgtttcattgattttgcctattgtgtatctgctttctagttaattgatttctgttctgatctttattatttcctctcttctgctaacttagggttttattagctcttctttttctggtttaagatgtttttcaactcttatcaagtagcacatatcatgtaatgcccactctagaattctgaaattaaattcatagaaaacattacctgctcctacactaaattttttaaaaaaatcagtatattgaactaactataatataactgaggaataaaaggaaaggaatttataatgcagtgttagctatttcagtatgtaaacaatcaggtgagactgtactatggcaagaaacagtaacacaatcaggtgcttatatctatgcataagttcactgggactgtgacagaatgtagcctcatcttaggtcattgactgagaccttgttttctaaaatagacattgagtgctatgcatagtcctatactgacatatcactattgaccagagttcatagttttacattaggggtcactcttggtgttctacagtataagggttttaacaaatgtgtaatgacgtgtatccaccattatagtatcatatggagtagttccatactccatatggatagtactccatatggagtagtatcatatggagtagtttcatatggtagatactatatgatattatagtatcatatggagtagtttcatatggagtagtttcatcatatggagtagtttcatcatatcatatggagtatgctccgcatattcatccctttcccacctccacccaacccttggcagccactgaattttgtactgtctccatagtttttcttttccagaatgtcatatagttggaaacatacagtatgtaggcttttcagattgggttcttttacttagtaatgtggatttaagattccttcatgtcttttcatggtttagtagctcatttctttttttttttttaataatttaaacatttattgtagattcaaggggtacatgtgcaggtttgttaaatgggtattttgtgtgatggtgaggtttagggtaccattgatgccaccacccaggtagtgaacatagtatccaataggtagcttttcaaccattgcctccctttcttcctccccactcttatagtccccagtgtcttttgttctcatctttatgtccctatgtacccagtgtttagctcccacttataagtgagaatatgtggtatttggttttctgtttctgtgttagttcacttaggataagggcctctagctgcatccatgttgctgtagaggacgtgatttcattattttttatggctgtgtagtattccatggcgtttatggacacattttctttattcaatccactgttgatgggcacctaggttgattccatgtctttgctattgtgaataatgctgtggtgaacatatgtgtgcatatgccttttttgggagaatgatttattttcttttggagatacctggtaatgggattgctgcatcgaatggtagctctgtttcaagttatctgagaaatctcagagttgctttccatggtggctaaactaatttacattaccatccacagtgtataagtgttcccctttttctgcagcctcaccagcatctgctaatttgtttttactttttaataatagccgttctgactagtgtgaaatggtatctcattgtgggttgttttttctttctttttttttttttttttttgagatggagtcttgctctgttgcccaggctggagtgcagtggcgtgatctcggctcactgcaacctctgcctcctgggttcaagtgattctccttcctcagcctcccaagtagctgggactacaggcgcgtgccaccacactgggctaattttttgtatttttagtgtagacggggtttcaccgtgttagccaggatggtcttgatctcctgatccacccgtcttggcctcccaaagtactgggattacaggcgtgagccaccgtgcctggccctcattgtggttctgattttcatttctctgatgattagtgatattgaccattttttcatgtttgttggctgcttgtatgtcttcttttgagaagtgtctgtttatgtctttgctcactttttaatggggttgttttctgtttgttgaattgtttatttcttatagattctggatgttagatctttgtcagatacatagtttgcaaatatgcaaatattttctcccattctgcaggctggctgctcattgtgttgattacttcttttactgtgcagaagctttttagttgatgtagtcccatttgtctatttttgtttttgttgcatttgctttgggggtctcagtcatgaattctttgtctagcccaatgtccagaggaggttttcctatattttcttttagaatttttatagcttcagaatttacatttaagtctttaatccatcttgagttaatttttgtgtatagtgagagataggggtccagtttcattccacatatagtaatccagtttttccagctccatttatgaatagggtgtcctttccccagtgtatgtttttgttaactttgtcagagatcagttggctataggtacgtacctttatttctgggttgtctgttctgtcctcttggtctatgtgtctgtttttgtatcagtaccatgctgttctggttactatagccttataccatttagtttaaagtcaggtaatgtgatgcatccagctttattctttttgcttaggatggctttcactatttgggctcttttttggttccatatgaattttagaatagtttttttctaattctgtgaagaatgacattggtagtttggtaggaatagcattgaatttacagattgctttgggcagtatggctttttttttttttttttttttttttttttttttttttttgaggcagagtctcactcttgcccaggctggagtacagtggcacagtctcggctcactgcaacctccgcctcccaggttcaagccattctcctgccctcagcctcctgtactgggattacagtcatgtgccaccacgcccaactagtttttgtattattagtagagatggggtttcaccatgttggccaggctcgtctcaaactcctgacatcagg

SEQ ID NO: 746 - DNA, 32748 bp, Homo sapiens
  source 1..32748: mol_type = other DNA
gtgacgcgccctcctcgcggtgcccttcagccgccgccgcagctcaccgggcgccacatggacccagccggcccgagcgcgccccgccgctgaccgcccgcgccccgggaaggtaaccgcgccccgagcgcagcgcgcgcccggcctccgctccccgggtctcccctcccggccccggcgtctcctccccggcccccgcttctccccgcttctcccgccggccccggtttctccttcccggccccccttctccccgcggccccggcttcgcccagctcctccccccggcctccgctccccgggtctctcctccccggctccggcttctccccccggctccggcctctccctccggcccccgtttctccccccgaccccggcttctccccgcagcccccgtttctctcccgggctccgcgcgcgcggggtccggggcgggcgctgtccactgccgcggtgctgaagcggcccccgcggtcccggcccgcgcccggcctcctcctcgcttcttcctgtctcgaggctccccctctcctccctcgccctctttctttcctctcctggcgcgctcccgcctgagggccgctcgcccgcccgcaaagccgaggggtgcgggtgcggcggggccggagccctgcgggtctgcggggcccggccgtgccctccttccccgcgccgcgggagccaggggagaagtttggaggagaatcggcgctgcggcaaagcctccgaggggcgctccccgcccgccgccctcccagtccccgcgcgagtctccttcctctgcggagggcgaggggtgaaccgtcaaacagtgtctctccagggacctggggttccccgataggagagaccccgcaaaaccggggggctcactgcggctgctgtgatttcagaaagcggcttcccaagaggggaccagagcgccccaccccaccccatgcacgcccccggggcgggggtgctctgtccccgtccccacgtgtttcctgaaggctgagccccctgaagtttctccccaaccccgatctcttctacgcgggccatgtggggggcacactgactgcagtgccgtcagggatagggtcacccaagcctccctggtcagaagccacaggagcccgccctgaagggtacccgctcaaagacccacccccaacccttctccacggccctgggctcgggaccaccgcggaggcgccgctccagacactgagctgcagagcggagcagtcaccttcaaacgccccctgggccccgcccctgcttccgcagcctggcgccaggcgcctctgagcgatgccccctaagccatcagcagccctccctgcagaggcttcagacaccccaggagctggggagaccattttcaggtcctctggggtcctggtttgggtgtggggacagaagcccctcacgaaggacttcccaggcagccgctccaggtgggggagggtccagcccacaaggtattgcgggtaaggaatgatggtctctggggaaggccaggcaggggcctgcttagggtgacctgtgaccacttcactctcccccaggaagaacactcgctcccggccatacttgcgtgtgagttctgacccctggaggagccactgtggaagcagagcaatcgccatggagtttgtgatgaagcaggctctaggaggtaggaagcgggaggtggggtggggaggggctgaggggacatggagagaccaccacagcagctgctcctcatctggcccaccgcagcagcgcccctgcagccacacggccacccacgcagccctgcacaggagcctggggcagaggagcaaggaccgtgcccagcagcgcccccagcccggcccttttcgaggccccgagccagaactggtgttcctggcgggacaggggctgccctgtaagctcactctgccccactgctgtggtcggggcagagcccatggaccatgctgatgcacgtcctgggggagggtgcacactctggcgtaggctttacagggccaattctaactggccaggctgggcagcccccaagggggcttccttccagatgaggagagccaagcggtgggagagcaggatgcaggtggcagcctcagggacaggcgtggggacagagctggcctgtgcatctggcgaggaccctgtgggtttcacttgggtgaggcagcgccatcctcagggaccagggcttgctggttacgggagcgaaggaaaaggcccgaaacagcttgtgtgtctcgactgcctcccaggcgggacgtgcagccttttttgtgtgtactggggtggggccaggcccccttccaacctgctgtctgctatttgaaaggaacctcgtccccacttgacccaaggctgtcattgtggccagagaccatgtcaagagcagtggctgggttcctagaccaggaggtgggcagggcctgggccatgctggtacagacgtgtcccggcagagctgatgggtcaactcaggcctcggggctgtcgtggcgagtctcagttttgcccagagccgtccatcctgtgttcccccagcaccagtgcccagaactcctgtgaggggaacctgtggccggtgcccgattctaccactagagacgtcttgcttgggtggcctccacgggggagcaccctcacctgatgccattcacaccttggagtgagtcaggcctcctgggagcatttctgcagtgggggagctggccgggttcgaggggccagggacaagggtgtacagagggcaggcgccgcttcccccagggcaggagctgcctgcctggctgtctcccggagggtggctgtgcttccactcaacacaaattaaatgaaaagatattgagcctgtcctggggccacatccctgagatttcgtggtcaagggtaagagtcaggttgagtctaattataatggctgcgtcaccgggctgtgattcagggacaagcctgcatctgcgctgggagggacgcacgttccacccagggagtcccaggctgttacggataattaattagttggctaattcaggccctgaggtgggcttgtaagaaactgaaatatcttatttggctgtctacatgactgaaattagctgggtaattaccagcctgaattccctttttgtttcatggcagcccaaagtttctccagcagcagcaaccgggcaggcgtcgctcagcgtggtggagctgagcgggggcagccagcagaccctgggggggctccacgctgagtgcttcccagagcaccccacattggctttgcagagcacgttgaggctcggagccagagctgctgagggcgggagctggtggggggcttccagtcgagaccttgttttctgcctctgcgcctctgtccctcacccggcgagcctcattgttgctgtctcaggatgcgtgtgagtgagacagagcaagacagagatgggaaatgggggaacctccagacagcacgacagagcttggcagagaccccaagagaactattgagaaacagaccaagccccggacacaaagaagctggcaggagagggagcaggaggcacccaggaagccgttcaaagaaaggcgaacccagaaacagggtcggggagggggagctggagaaagaaaatgacagcccagaaacagacagagaaaaagacaagaatgtgttattcagcacgcacagggacagacaggtgaaaacagagacggcacgtcagagacagaggcagaggggagagagagaaagagggagagacggagacagagatagagggagacacagagacagagggagacagagacagggagaaacagagacagggagagatgggagcagagggagagacagagggatacagagagacagacagacaaaggaagagggcagagagaggcagagggagaggtggaggcagaaggagagagagagacagagagagttagagagatagagatggagacagagacagagggagagacagagatggggagagacggagaatcagaaacagagggagagacagtggtgagagggagagacagagacagagggagagacagagacagagggagagacagtggggagagagacgcattagaaatgaactgctaagaggagtcagggccaggagcgcaggcagcatggcacatgcacacgtgcacgcccgtcagagggtgcagcagagaggaggaagaggtgaggacctgcccagggctctgggcagggggacaggcctggttaaatcaagaccattcgggggctgtccgcggcaggctgggccgcaggtgtgagtcttgctgaggagtgagtggcccagggcctgctcatctgacccaacgctgggtctcaaggaggggcccctgttggggccaccaagggaagggagcatggtggctgccggggtgatcgctcgtgggggagcgggaggctcctctgcagcaaaagtggccttgaactggggccgggcctccccccacaacacgtgggtccggatccagggtcctcaagggagtaatttaaagaaactggtttcctcaggccagaaagttgcaaacacggcctgggagctctgtggacagcgtggaggaacgtggcacgtgtgggtgccgtggtcactgcagaccctcatggggctaaatgtggcagaagcgagcagccacccgctctcccatcctccgccttgatgtgacacacgccctgtttaaacacgctcaggtcctcgggaatgtgtggggcaggcgggccggggcttcaggtgggacacggcttggaggatgcatgtgcggagaggctggggtgcagagtgggaggcagccggacactcaggagagcctctgactgccccagcgacagagcccaaggcaggactcacccatgctcggctctgccacgtgtggggaggtctagcgggcaggtccagtgactccggtggttcagtcacgatggacagtgtccggcagtgaatgcccctcacccagccaggcccaacctggggggcgacagcctggcctgggttcagtggagaagctgtccttgtccccggagagtggtacgctgttgggttctgtgtccagtcctacatggggagggaagcaggtgaacatctggggagaacacaccgtaggggtgcggtcctgggtttggcgtgagggggaggattgtggtcatccaagccggggtggacgagaagtgtctcgtggacggcccaggcaggaagtgcagggttccaccgtgtgggagagcccctccgcgcccccgtggggctgggctgtgagttctcggcaggaacaacccaaggggcttgtgggggccaccggtgtccaccttgggggttcacgcgaggctggtgaggggtgtccaccttgggggttcacgtgaggctggtgaggggtgtccaccttgggggttcacgtgaggctggtgaggggtgcagttgggaaagaatctccctctgtgagcagagaccaccagagccaggagtccaggccagggatgccctgagccacaatgcagccaacaccagcatctcccccagccctccacggggatggagggggcacctccttcctccttcccggcaccaaagtggggctcagcactcaccatctgggacctcaggcagggccatggaggcaactgggatctgggcaatcctgccctgattcccagtgtccacccctgagacttacaccatgggcaaggttgggtgtccaccctgtcccagacagaggtccctctggctctcctgcctctctcttcttgcccagtttgaagctcagccttctctgtttattagggaccccacaggctcctggtggttgaggcaatgggggattctgccagttcctgccccattgggccactgatcaggctctctggacctgggaggacgatggagctgcaggctgggctgagctgggtccgggaggacggtggagctgcaggctgggctgagctgggtccgggaggacggtggagctgcaggctgggctgagctgggtccgggaggacggtggagctgcaggctgggctgagctggacctgggaggacggtggagctgcaggctgggctgagctgcagggacagcagcagatccggaggtgaagctcttgaattccacatggggaagattcttttggctgcaagtaacaatcagaggaagaggagcttgaattggggtgacgatgtgtcaggaggtggcccagctgctcagcgatgctactggggacctggtgccatcaggtgccaccttcgtcctcagtggatctttcatgctcagctgctcctcacaatctcaaagtggctgctgctgctccagcattgcatccatagtcagggaaggaaaaagagaggagctaaggggcaaccccttcatctgtttagtggtggtctttacagactctcatggagggtttccatttacttgccacagctagaagaggaaggtgggggccagggtgggcccgtcctactccaaacagaggccgggtgttgggcaggcgtcccacagtgcctgactcacacccaacttggggagacttggtttctaggtgcagaaccgctaggcaatgaccccccagcagtgtgtccttcccagccttactccttggaacaaggcatgtgctcgaaaggcagtttgcaaacacttaacagtaaaatgccaacatttgttcagaacggacttcacaaacgccgtgtggtcgagaaagcactcactcactttgctgggttcggcagagatgcctcttatcccagatttctgggaggctggaaggacccttcagagaaactgcctttcctcccgaaaccgtgaagggcagtcctttcctccagagaggatgctcttggttgattaagctgcaactcaattataaatactttagccccaacttgggaataaaatggatattatgcacttcaactgacaaagttatttatgtttttgcctcattggttggcaagacgttccagttggggttagagcatttgtttcaatagctcctgcgtgacaggactacttcagtcccgctttgctgccatcagacgctgctggactcgcacggggagcgcagagcgtttaatgctgggacatcagacagaacagggaactgatgaaagcttcagaatgaacattgagtccacgcaaatctgatgctgccaaacttcagagaacctgggtctcctggtccacacggagatcagacgagggggacactgagtgcctggcagcccttccactaggcggtcccccgggatgaggcgaggccccaccctccagctccaccatccagtccagcaccgtccttggccgcgggcactgctgtccttgcctgcggaccgagcgcccagctcttcaatacagcacctggtcctcgctttcaggagaggatgcgtggagacaggcgaggtggacgtgccaataagtgacccaaacagtgccaagctcggcggcagatggcgcagccgccggtttccaggacagttgtaatccttggccctcattcggcctcttcccgtcactcacatggcgcggctttcctggcctcggcggtgtggacggggggccttggccatggttgcaggaccccagctccagctcaggtcagcgtctcatcccaggtgagctaatgaagatctgcaaagccaccagagttgctgaggagagaagaggtgtttgtggcacttcagcgtgggcgcaaaacagagggagcattgcaggacgtgcatcagacgctgggcccggggacctgtgaggccaccatgtcagcctctctgagacggtggcagtcgaggcccgtggcggggctggggctggtccacaatcagcttgacaaagtaaggtggtggcggccagccaggcccagggcccctgggtgtcagcaggtgagcaggtcaggcgggcatggcccggtgctgcaacacctctccagcgcctcggtgcctcccctccccaagggctggggcgaaccaggcttggcttggacctgtgctcagctgcactggggcctctcgggcagcaggctggacacccagctctcaggaggggtgtgggcttgtctgcaatgcaagaacaggagccaaaagccaaccttcttttacaccagattcacctgtggtcattcttctgaccttgcccaatgcgctcagggatgacaggtggacagtgagccacccccgagggcggtggcgcctccagtgtcccctgtcagacttggctcctcagatgctggtttattccttgacaccggatggggaaaatattctgagatactatgtccagcgtgcccacaggacctcccctcacggctggtgggaacaatgcaccctccaatgggcacctggggagggtctctggccagcagcatctccagatggaagtggaggggaagggagccccagggcctggaggaggaaatcctcatggccaagggggcgtgagggaagggggcggtcactgcagtcatcagtgggtagggattcctgatgctccatccttacttaaaatttttctcttaattaatattaaattatcctgattatgctgggtcttgttttaatttttgcctaggagtctccttggactgattttttttttctttttgagacagagtctcgctctattgcccaggctggagtgcagtggcgcaatctcagctcatataacctccgcctcctgggttcaagcgattctcctgcctcagcctcctgagtagctgggattacaggtgcctgccaccacgcctggctaatttttttttttttttttagtagagacggggtttcactgtgttgcccaggctggtctcgaactcctgaacccaggcaatccacctgccccggcctcccaaagtgctgggattacaggcgtgagccactgcgcccggcctgaatttttttttttttttttttttacattcacccagtgtgcccctgctgagccttgcttaacgtttctgtcactttatgtgggttgccattcagaaatacatgtagttggatttcattttttatctaattggagccttaatgcatctgtttaatgtgcactgttttgaccaacatatgtgatctaacctctgtcatctttgttgttgcctttttaaacgctttcttgctgtttcatttattttaacttaatgtagggaccacattttctctttaaaacctctgcagtgctttggaatgtgcgtgctctttgaaaacatgatgtaagctctacttgccagagttgaaaatgatgcagtgtatttccagtccttgccaacacacttccaggacttctgcacactttatactcttccgactcctctcccatcttttggtctttgtaatttttgagacagggtctcgctctgtcgcccaggctggagtgcagtggagcgatcacagctcactgcagcctcaacatcccgggctcaagtgagccttctaccttagcctcctgaataactgggactataggtgtgtaccaccacacttggctaatttttttttttttaagacagggtcccaccatgtttcccaggctaggaagagaattcaaataataagtataaagaagtgatatgagaaaatcactgggaaaattgagatactgcattgttttgaaatcattcatcacttcatttatgaatatttttggccgggcgcagtggcttatgcctgtaatcccagcactttgggaggctgaggcaggtggatcacgaggtcaggagttcaagaccagcctggccaacatggtgaaaccctgttctctactaaaaacacaaaagttagccgggtgtggtggtgggcgcctgtaatcccagctactctggagactgaggcaggagaattgcttgaacccgggaggcggaagttgcagtgagccgagactgcaccactgcactccagcctgggtgacagagtgagactctgtctcaaaaaaaaaaaaaaaaaaaaaaatttcacggagaatgccttcagatccacttgtaaatttaagagacactgcaaagttgctagtgctgttgatttattaggactagtgagtgcagtcagtgagctgaggtctcaggctggtgagaaaaaccagcctccaaggtgaatataacttaaatagctcaacataaacattgtaacaaatataatttcccttaacaggcgtttatattctcaaggacagacaacaaaagatctttgaatgggtggatagttcagggaagtttttgtttattttgcagacatttagacagaaagtcaactttttgatgatgagatatggaatcagtagagacctaagtccaagttacagagttggaagtggtgtgtaaatgtctgcaacttccccacccgttgtaacaagagcctgggcagaagccaggtttgcagtggcaaacactgtatcaacagcctctcacggtgcttctccaagtgccgctgagatttatgacctgtgaaacctgttacaattgcagctgagactgaacaagatactgtggaacttacaataacggacttcttaagctgccccactcagaggtgtgtgtcttatgtttctgagtaagtgccacacggggtcatctcagatgccacgtgttaacctcctgtaagggctccagagcattcggtgcttacaaacctgcccccatgcccctccgtggctgtatgtaaatactgcttagcgctgagccctgcagtgcactgcgattacacttcttataaagtcttttctttgttctgtagttcttttttttttttttttttttgagacggagtcttgctctgtcacccaggctggagtgcggtggcacaatctcggctcactgaaagctccacctcctgggttcaagcaattctcctgcctcggcctctcgagtagctgggattacaggcacctgccaccatgactggctaatttttgtatttttagtagagacggggtttcaccatgttggccaggctagtcttgaactcctgacctcagatgatccacccgcctcagcctcccaaagtgctgggattacaggcgtgagccaccacgcctgaccccttatttttatcttctaacacttcaactgaatttttaatttctgcatttatatttttaatttccaagagctcttttctgttttctaaatgttcgttctctttacaagttttcctctgttctctgtgttgtctctgagctctgttttgggagcccccagataaactggggttccagtgtgtgagagctggcagtcttgccctaatgggaaatgaatggggctagacctggtgcctttcatggaatccttctttcacctggtggacggcttgaacgctagttacccgacccatggccggggcccctcacacacgacacttgttcatactggcagatgcccggtggtttgtgtctgctccatgtacaggctctgcctgcctggccatcactctggcacagggactccaaccttgtgttcctcccggactcctggggaaaacctggcctggggtagcccctggttcttcagatttaaggcacagatttaatccaccactgcaataggaaacaagttcgaagatttttgctacagatcctggcagagaggatgctgtgagtcgcgggggccatcctccatctccgggtcgcatgaggcaggaatgaagagtcagggagagggccgggcgtggtggctcatgcctgaaatcccaacactgtgggaggccaaggcaggtgaatcacctgaggtcaggagttcaagatcagcctggccaacatggtgaaacccggtctccactaaaaatacaaaaattagctgggcgtggtggcaggcacctgtagtccaagctgctcaggagggtgaggcaggagaatcacttgaacccaggaggcagaggttgcagtgagctgagattgcgctactgcactccagcctggcaacagagcgagactccgtcttaaaaaaaaaaaatcaggcagagtggggacagctagcatgattataagaggaagtggagtgtgggtcccttgtatttgcaggcagatacctgtatggtcctttcagagcaagtggtgggaaaagcaggggttccacctgctggacgggagagaggcctctgagttcacatgtctggccgccggcttgggtcgcccaggtgtggctctgcctccgatgcccaggcagtggtctttgctgtgtcattttgttacaagctccttttccgtccatttagcttgcagctttctttgtgtcagagactttccctggatgcacatttatgtttcagcgagtcaggaaaagctgttggaagtcttctgtgtgtgtgtgggaattctgggcttacctgtagggcaaacgtggcgagctggcttttatgcttgggaatccgcacaggtcaggccctttaggtcttttggggagtgtggctccatctccccagaaatggattctgtgtggctggatggtggatctatgagcagggcagtggactgggcttgagtgagggctctgtagggtgcagatattccatgaactctctgttttcaaggaatcacttctgccctttaggattggtgcctgaggattggtctgagtctgggggtctctggttcagtttctccaaggaaatgatttcttgatatctcattgccacgtgggtggtgggcccagtgccctttatacagacctttcaccatccctcatgtctgccccactcgcctgacagcagggcctccagtcccagagtcttcctggggttctgcccggctggtcagcttctcagcagcatctccctctgcagagcccatccgtgcacctgctttccatcgtccccaatctgataccgatttacctggcctctcctctcttgttgtgttattcttgtgaaattatactattcactttctctttttttttttttttttttgagacagagtctagctcagccacccaggcaggagtgcagtggtacaatcttggctcactgcaacctccggctcccaggttcaagcaattctcctgcctcaccctcccaagtagctgggactacaggcatctgccaccacacccagctaatttttgcatttttagtagagacggggtttcaccatgttggccaggctggtcttgatctcttaacctcatgatctgcctgcctcggcctcccaaagtcctgggattacaggtgtgagccaccgctcccagcctgttcagtttctttactcccatcttagtggggttgtggaaaggcacgtcaataagcatatatgttcaatccatcatgtttaaacaaaactcagtacactatcatttgtaagggtgcctggcattaggacggccagcgttaggacattaggatagccagcattagagcaggcagcgttaggacaccgggcgttagcattaggatgctcagtgttaggacacccagcgttaggacacgcagcgttaggatgcccagcattaggaacgtgctgggattacaggcgtgagccaccgtgcctggcccctaagtatattcttgagttttgctcttgatatggtcaagtcacttagaaagagtttggtcctttcctctcttattttggaactttgctaggtgggattcgagcggtattctgtctgaagataatttccccacactcaagcccataccctttttattactctgatggacgccctttgatttatgactttttcttctctgtctgttgggaacactctcattaaaaagcagaattgtcagattggataaaaaatcaagatccagttctgtgctacatacaagaaacccactttaaatataaaaagactctgctgggtgcggtggctcctgcctgtaatcccagcactttgggaggctgaggcaactgaatcacctgaggtgaggagatcaagaccatcctggacaacatggtgatacccctgtctctactaaaaatacaaaaatttagcggggcgtggtggcgggcgcctgtagtcccagctactcgggaggctgaggcaggagaatcatgtgaacccaggaggcagaggttgcagtgagctgagatcgcaccactgcactccaacctgggtgacagagcaagactctgtctcaaataaataaataaatatataaagactctagtcaggtaaaagtgaaaagatagggaaaaaataagaagaaaacttgagtggctatattaatataagaccaaggagatttcagtgcaagaaatattgccagggatgaaggaagtcatttcctggtgattaagaggtcagctaatcaagaggacatcatggtctcaactgcttctacacccgacagctgagttccaacatacgtcagcaaagacagaaggaggtcacaggagaaacatacaaacccactgtttgagctggagatactcaactcaaaggacagagaagcaggaaggacagacaggacttgagcagcacagccagccaggctgacctgcttgatgttcacagacgctctgagcagcaacagcagagtagtccttcttcttttcaggcacacatggagcatttgccaagacacaccatattcgaggccctgaaacaagtctcagtgcacgtgaaagggttcaagtcatgcaaatatattctccaactacaatgaaatgcaatgagaaataaagacagaaaggtatctagaaaatctcccaaatagttggaaactaaacaacacacttctaaatagcccacgagccaaggaagaaatcaaagtggaaattagaggctgggtgcagtggctcatgtctgtaatcccaacactttgcgaggctaaggaggaaggattgcctgaggccaggagttccaggccagcttgggcaacagagcaagatcccatctctatgaaaaataaaaaaaaaattggctgggcacagtggtatgcacctgtagcactagctgattggaggccaaggtgggaagatcacttgagctcagcagtttgaggccagcctggacaacctgggcaatgtagggagatcccatctctataaaaaatttaaaaattagctgggcatggcagtgtgcccttgttgtctgaactacttgggaggcagaggtgggaggatcacttaagcccaagagttcaaggctgcagtgagccatgatctcaccactgcattccagcctgggtgacagagcaaggtcccacctcttataaaaaagggaaattagaggctgggcgtggtggcttacacctgtaatcccagcactttgggaggctgaggcgggcggatcacctgagctcaggagttcgagaccatcctggccaacatggtgaaaacctgcctctactaagaatacaaaaattagccaggtgtggtggcgggcacctgtaatcccagctactcgggaggctggggcagaagaatcacttgaacccaggaggtggaggttgcagtgagccaagaccacgccattgcactccagcctgggcaacaagagtgaaattccatctcgaaaaaaaaaaaagaaaaagaaaaaagaaaatgtgcaaaagatttgaatagatattcccccaaagaagatacgggaattaaaggaatgattattaaggatatatgaagatgttcggcagtgctggtcacggggacacaccacagcgagatgctgccacacccactagggtgaccagagtcaacagagccactcacgcatgtggagaaacccacgccctcatgctctccagtgggagcttaaaatggcacaaccgcactggaaaacagcttggctgtttcttaaaaagcaaaatagaaatttaatacacagctgagcaattctgctcctagacgttgacccaagagaaatgaaagcgcagacccaaggccgggcgtggtggctcacgcctgtaatcccagcactttgggaggccgaggcgggtggatcacgaggtcaggagatcgagaccatcctggctaacatggtgaaaccccgtctctactaaaaatacaaaaaattagccgggcgtggttgcaggcgcctgtaatcccagctacttgggaggctgaggcaggagaatggtgtgagcccaggaggcggagcttgcagtgagctgagatcatgccactgcactccagcctgggcaacgaagcgagactccatctcaaaaaaaaaaaaaaaaaaaagaaagtgcagatccacacagacgtgtgcaggaacaacccacggttcacacacaggtgggcgggtgaaggagccgtgtgcatccacaccgtggggtcctgctcagcatggagaggggtgagctgctggtgtgatggggtgtcccagaaagcagcgaactcagtaaccgggccagtccccccgcctgctgcagataccacgtattgtgtgtgcccctttatataaagttctagagaaagcccataatccatagtgacaggaagtaggtcagtggctggagtggtgggtgggaggggccacacaggccaccatgaaacccgagggctggacgtgtccactgtcttgattgtggtgatggcttcatacacatatacatgcgtcaaaacagacttagggtatgtcagttacctccataaagctgtttaaaagttgggttctgagagttacggaggacgcctacctttgtgatggtcatgaagtggtcacacatgtggcccccacggcctgaggtcccccccaccccctcaggccatgtgtccgtgttcaaggctgagtgagggcagcaggcagggcagaggctcagcagccacagggcccgtttccttgagggcacgaggcagggcagaggctcagcagccacagggcccgtttcagtaagggcgtgagacagggcagaggcttggcagccatagggcccctttctgggggagaatgagaagctttggccgggccccaccccgtgcactcctgccctacccaaggctgaaggggccttggggagtcatcaccgttccactgtctataggcgaggacgtggggtggcgagagccacccgccagccctgagaatagcaaccgcaagatacggttcacagcgtgaggagcataatcgtgtttgaatattgaaccatcctcactttgctaaaatgagccccactgagtactcactgtgtttcccatggaacgccagactctcctcccgctctggcccagcgttcagcactgacattctcgctggagcccggcctgccgcccgcgcactcgcgcgctctctatctctatcgctatctctccaccaatttttggcattgctcttatgttaatttcacaaaaataacccagaggatttccttctttttctccgttccaagaacattctaaatatcattggaattatctgtttcttgaatgtttgaaagaatccatctgtgaattcttagacatcgttctcagattttttacaacgggttttaaagacaatccatttcattcaagtttttaagtgtattaggaaagtgtgtgtaaaatattatttgaccatcttatttcctgtctgggtgtggctagttctcaatcgtttcccctcgttttgtgtgtcccaggcttctttctgtcttctcactctgagcagctgcctgatgcctgttttatgggaggttcaagacccacctcctgaaccgctgactcttttgacatttgtctttctggacggattcgttttgccgttagctttgcaaactcctttcctctgcctgccttggtttgtttggttgctttttctgtggcaattggagtgaggtgttttttgctgtgtatgcctgggcttgccgggagcgtgagcgtttcagggaatgaacagcatgggccacccctgacatgccgctggattgaggcctcgatacatccagttcctggagatgtggtaaccgtggttttaatattttccaactcgtttgttgttagagagatgttacatttacaagggcccaggaggaggatttttatttatttttatttatttatttatttatgtatttattgagccagggtctcagctcactgcaacctccacctcccagactcaagaaattctctcgcctcagcctcccaggtagctgagacaacaggtgtgtgccactatgcctggcgaatttttcataatttttttgtggagacagggttttgccatgttacccagactgatcttgagctcctgggctcaagcgatccagccacctcaccctcccaagtgctgggatgacaggtgtgaccgccgcacccagccaaggattttttattcctggttgtgctgcacctgtgccatgactctgagccaaagcatgcagccttatttctgctctggaaaacatattgagattaatatatcaagaaagacaaatgtcaacagaggtggcctaacatttttttgacaggtgagattataaatcatttaaaatttatgcttctctgttttaaaaaaaatttaaggccaggcaaggtggctcacgcctgtaatttcagtactttgggaggccgaggacggcggatcacctgaggtcaggagtttgagaccagcctgaccaacatggtgaaaaccccatctctactaaaaataataataaaaaaaaattggccgggcatggtggcacctgcccgtaatctcagctacttgggaggctgaggcaggagaatctcttgaacccaggaggcagaggttgcagtgagccgagattgtgccactgcactccagccagggcaacaaagaatgaaactccatctcaaaaaaaaaaaaaattaagttccgggatacatgtgcaggatgtgtaggtttgttacataggtagtaaacgtgtaccatgatggtttgctgcacctgccagcctatcacctaggtattaagcccagcatgcattagctatttttcttgatgctctctcttcccctgctccataggccccagtgtgtgtttttcccctccctgtgtccatgtgttctcaatgttcaactcccacttacgagtgagaacatgcggtgtttggttttctgttcctgtgttagtttgctgaagataatggcttccagccccattcctatccctgcaaaggacatgatctcattcttttttatggctgtgtagtattccatgttgtatatgtaccacattttctttatccagtctatcatcgatgggcatttgggttgattccctatctttgctattgtgaataatgctgcaatgaacatacacgtacatatatcttaaaatagaatgatttatattcctttgggtatatacccagtaatgggattgctgagtcaaatggtatttctggttctaggtctctgaggaatcgccacagtcttccacggtggttgaactaatttacactcccatcaacagtataaaagtgttcctatttctctgcaaccttcccagcatctgttgtttcttgactttttaatcttaatcaccatactgactggtatgagatggtatctcattgtagttttgatttgcatttctctagtgatcagtgatgttgagctttttttcacaggtttgttggctgcataaatgtctttcgtttgggttccttgtagattctggacattagacctttgtcagatggatagattgagaaatgtttctccaattctgtaggttgtctgctcactctgatgatagtttcttttgctatgcagaagctctttaattagctcccacttgtcaatttttgctttattacaattgcttttgatgttttcatcatgaaattctcaaccttgcctatgtcctgaatggtattgcctagattttcttctagggtttttatacttttgggttttacatttaaatctttaattcaccttgagttaatttttatataaggtgtaaggaaggggtccagtttccattttcttcagatggctagccagttctcccagcaccatttattaaatagggaatcctttcctcattgtttttgtcaggtttgttgaaaatcagatgattgtaggtgtgcaggcttatttctgagttctctattctgttccattggtctacgtgtctgtttttgtacctgtaccatgctgttttggttactgtagtcttgtagtatagtttgaagtcaggtatatgcttctcttttttgtggtaaaatatatagcataaaatttaccatttaaattatgttaagtgcacaattcagtggcattaagtacatcacaatgttgtgcaactaacacctctatttccagaacttttcatcatttccaactgaaactctgtctacactaaacactcactccccactctccttcccccagcccctcgcacccaccactttacttcctgtctcaatgaatttggctactctagggacctcatctaagtggaatcttacagtatttgtctttttgtgtctggcttatttcatttagcatagtgtcctcaaggttcatccatgttgcagtttgtgttggaacttaattcctttttaaggctgcataatattccattctgtctacaccacattgtgcttgtccattcatctgctgatggacaccctgggttgtttctccctcttggttattgtggttaatgctgctatgaacaggggtatggaggtatctgtgagagactctgctttcagttcttgtgggtctatacccagaaatggaatcgctagatcatatggcaattctatgtttaattttttgaggaacagccagactgtttccacagcagctgtgctgtttctcattcccaacaacaaggcacagggttccagtttcttcacattgttgccaacacttgtgatttcctggtttttgataacagccgtctgagtgggtgtgagccggtatctcattgtggtgcagactgacacctggcccttgtaagcattccatgagagcttcaaaggaacacctgttaggtttttcagggtttgggttcggtgtgaacctcgtgtgtaaccctccgatcctccttctatctttagataatcctaacaacaggggtatattcatacatgattgtttttcctttttgccttccaaacatgggctctgcggcgcgtttgtctgcctgtggctctccggctgcagcgcccacagcagcccctccctcccgctccaggccccgggcttccctgtgtggatgtgcgatgggcgtatggccacacgcccaagatatcaccttgtctccagccacacgccagggccgctgccgagacagacggtgcgcgagcgtgcgtgggcacgtttctccacagaggagcacccgccctagccggccgccgcgcaggagtgggacgccgggtgaactccgcacgtgctcgcggcgacgcactgcgttccaaaatggctgccgcctgcgttccaaaatggctgccgccgcccacctttcccgtggaggctgagcacgtcgctccccacgcttgccggcctccaggctgacgaccgccagagccgtctctgggactctgcaggcacttcccgagcccccgcaaggtgcgttttcacttctttgtgacacttgggttgagtctcctctgacatcaattctgccatatgaaccttaattttatccaaagccccaaaaagaacaaaagcgttggagtttaagctgaaggtgcgatccggattacatacaattgcacattattgttgatgcggctgacgtcattatgatattaagcctgcccaccaagaatctggcatgtctttccaaaaccgtacgatttaaatccatgatttttttctgatataggttctatagacttcccttttatttctaagtaggttatattttcgtacttattgtgtgttttcctcattattgtaagtggaacgtcattcctgttcctgtttctagcttgttcttgacagtgtgggggaaaactattaattcggaagtatggatattgtatttagccatgctgccacatcccatgatgtgttctggtaggtttttactgcactgtcttgagtttctcagagataggatcgtgtcatcaggaagagaggtgggagagacggagaaagagataattggctgtcttcttttataactcttattaccatcctgtgttgacgggaatacgttcgtggctgtgggactgtcatggaatctcccttcacaagcctagatgatgcagcctcctgcacgcccaggccgtgtggtgcaaccattgttccccggctgcaaacctgcacaacacacatctcactgaacaccgcagtagcggcagcaccagggtgaggctgtgcacctaagcatagaaaaggcaccgtgaggccaggcgtggtggctcacgcctgtaatctcagcactttgggatgccaaggtgggtggatcatttgaggtcaggagtttgagaacagcttggccaaacatggtgaaaccccatctctgctaaaaatgcaaaaattagccaggcgtggtggcacacgcctgtaatcccagctacttgagaggctgaggcacaagaatggcttgaacccaggagtggaggttgcagcgagccaagatcacgccattgcactccagtctggacaacaggtctcaagagaaagaaagaaggccgggcgcggtggctcacgcctgtaatcccagcgctttgagaggccgaggcgggcagatcacgaggtcaggagatcgagaccacggtgaaaccccgtctctactaaaaaaaaaaaatacaaaaaattagccgggcgcggtggcggacgcctgcagtcccagctactccagaggctgaggcgggagaatggcgtgaacctgggaggcggagcttgcagtgacccgagatggcgccactgtacaccagcctgggcgacagagcgagattccgtctcaaaaaaaaaaggaaagaaaaggcaccgtgagaattcggtgctgtcgccttccagggcactgtcgtacatgcggcctgctgttgactgaaacggccttatgtggcacatgactgtgtcttatcttttcatgcgcttcactggacccttcgaaacagcgcagaatcgcagcggcagctgtgtgtcatgccctcggtcttactgcaggcagatttactgtttaccattgtccattttctgcttttctcttcattaattatctcttcctgtcttatttgggattattttgttttgtttcttttaaatttcttaagatggcaatgaagttcctatactttctgctcttccttaaaatgaaggactatgaatttcctcccaaaaaaagttttagccctggaccctaagttcagacgcctagtgtttatctttcatgctttctggaattttttttttttttttttgagacagagtctcactctaatgctcaggctggagtacagtggcgcagtctcggctcaccgcaacatctgcctcccgagttcaagcaattctcctgcctcagcctcctgagtagctggaattacagacatgtgccatcaagcccagctaatttttgtatcttttttagtagagatggggtttcacgatgttggccaggctggtctcaaactcctgaccttttgatcctcccaccttggcctcccaaagtgctgggattacaggtgtgagccaccacgcccagctgctttctggaatttttacactttcagtttttatttcctcttcagttgaagggttacttacgtccttgtttctaatatttgggcttccatacttagtgatttggtcatgtttttagtatttgtaacttgattagattatgatcagggaaaatggcctgtaatatctctagcttttaatttgttagggcttctgatcaatttgatagtggtgcaatttattttcaataaccattgccctcttaagggtacactccaatgagtttcaccatcaccgtggttaagtctgcctggccccaggcaatctacattttctttctgtcactgtagattagtttgcacccaaatgtacatacatgaaattaaataatttgtatctggccttttacactcagcataaagactttgagattctcccgtgttgtttggtgtatcagcaattcatctgtctctgttgctaagtgatgctacctgtgtggacataccacagtttgtctattcacctgttgatggacatttgagttgctttctggttttggctgttacaaatgaaactaccatgaacattcctgttcctgccattgtgtgaacttaagtgtttgtttctcttgggtaaacacctaggagtggaatttctgggtcatttggtggcatgttcagttgtacaggaaaatgctcaactgttggcaaagtggttgtagcatttaccttcccacaagtatgcatgagtgttccagttcctccaccagtgttccttgccaacacttagcacagtcagtctttttaatttcagacatttgagtaggaatgtggtggtatctctgtgtgatttaagtttgaattcccttatgactgacacgtcgatcaactttatttgtaacagccacgtgtgtcttttcgtgcagtcatgcatcatgtaacgaaagggacaagttctgaggactgtgtcattaggtgactttgttgctgtgcgaacatcaaagagtgcactgttgcacacccagatggagcaaccctgcacgcccaggctgttgggggtagcctggtgctcccgggcacaaccctgcacagcacgtgactgcctgaatggcacggaagttgtaacacagtggtgagtatttgcgtacctaagcacatctaaacatagaaaaggtaccacgtggtacaccttacaatggctgcgacatcatgttgctttacatggtccatgactatacttagttgccatctgtttctcttctttggtgaaatgtcttttgtccactttaaaaatcaggttgtttgtgttcctgttattgagttgtaagagttttttgtgtattctgaatataagacttttttttttcttttgagacagagtctcgctctgtcacccagactggagtgcagtggcccgatctcggctcactgcaacctccacctcccaggttcaagcaattctcctgcctcagcctccctagtagctgggactgcaggcacgtgccaccacgcctgcctaatttttgcattttttttttttttagtagagatggggtttcaccatgttagccaggctattctcaatctcctgacctcgtgatctgcccgcctcgacttcccaaagtgctgggattacaggtgtgagccactgcgtccggccaaccttttgtttttttgagacagagtcttgccttgtcgcccaggctagagtgcagtggcacgatcttggctcactgcaacctccacctccagggttcaaataattctcctgcctcagcctctcaagtagctgggattacgggtgcccgtcaccatgtctggctaatatatatatatatatatacatatatatacacacacacacacatatatttatatatacatacgtgtgtgtatgtatatacacatatatgtgtctgtgtgtgtatatgtgtgtgtatatatatatatatatatatttttttttttagtagagacggggtttccccattttgcccaggctggtctcgaactcctgacctcaagtcatctgcccgccttggcctcccaaagtgctgggattacggttgcccgtcaccatgtctggctaatatatatatatatacatatatatacacacacacacacatatatttatatatacatacatgtgtgtgtatgtatatacacatatatgtgtctgtgtgtgtatatgtgtgtgtatatatatatatattttttagtagagatgggatttccccattttgcccaggctggtctcgaactcctgacctcaattcatctgcccgccttggcctcccaaagtgctgggattacaggcgtgagccactgcgcccggcctaagatctttatcagatgtgtggtttgcaaatatattctctcagcctgtggtgtaccttttcattttttaagacagtgtcttttgaagatgttaagaaaaactcaaactgtttttccctttgccctcactccacaaggataatcaacacagaagatgtctgtgaccaaatgtatgaaggttttccccacccaccaagcaagcagtcagtccggcagtggacaacagcagggtgttctccaattcaattccattctgatgctgtctacctggagacagcctcagaaaccccacgttgagggctcagtcccacaaggctgccccctccatcccaccagtcgcaagtccaggaccctagaatgtctgaacgaccggcttcgagttggggttcatgcgacccctcttgggtttaattcctagagcaactcacagaattcagggaaacatatgcctatggtttattacagaggatctttttattttttattttttgagacggagcctgcctctgtcgctcaggctaaagtacaatggtgcaatctcggctcactgcaacctctgcctcctgggttcaagcaattcttgtgcctcagcctactgagtagctgggattacaggcacatgccaccatgcctggataatttttgtatttttagtagagacggggtttcaccatgttgactgggctggtctcgaactccagacctcaggtgatccgcccatctcggcctcccaaagtgctgggattacaggtgtgagccaccatgcccagcctacagaggatattttcaaggatacacatagccagatgaagagacacatggccaggcctgaagggtcccaaggataggagcttccaccctgtggagttggggtgccacccttctgaggagcttccaccccgtggagctggggtgctaccctcctggcacgtggatgagttcttcgccttccttccagcctccatgtgcccagctctctggaagctcctgaaccccgcctcttgaggagactccatcggataggcatggtggaagaagcatggacgtccccgtagaaatgcgaccgatgaaaagggtgtgatctaaacccagcaaggcctgtccagattcctcttggcctctctctgtagcgttccttcctccagggcacggggcagggccccttctgaaatgagggcttatgactcaccaacaggaagtcaggggaagatttgagtcctgccctgcacaggtgaaaagagggcagaaggtcagagagaggggttctgtttcctgattctaaagggccccaacattataacaagggccatgggagtgagaggcaggagccatagatgaaaacatatatatatatctcataatatcgcagaagagcaaaaatgtttaatgttgatgaaattcagtttatcaatttttctttttaagatttatgcttttgtcacttatataagaaatctttgcttaagccaaagtcccagaaattttctcttctgttttcttctagaagttgtataatttcagctttgacatttagatctatgattgattgtgagttcatttttatataaagtgtcaggtaaaggaaaacatttacatatgtgtttattttgcacatggatattgaattgagccagtgcgcttctgaaagcactatctggccgggcacagtggctcacgcctgcaatcccagcacttcgggaggctgaggcaggcaaatcacttgagcccaggagttcgagaccaacctgggcaacatagtgagaccttgtctctacaaaaaatgtttttaaaaaattagctgggcatggtggcacatgggaggctgaggtgggaggatcagttgagcccaggaagttgagactgcagtgagctatgattgagcctctgcattgcagcctgggcaacggagcaagaccctgtctaagaaaagaaaacagaagtaaggactatcctcaccctcattgaattccctctgcagctctgtcaaaaatcgattgacaatatatgtatgggtctatttctggactttctatactttccattgatctagatgtctgttcttttttttttttttttttttgagacggagtctcactgtcacccaggctggagttcagtggtgccatctcggctcactgcaacctccacctcttgggttcaagtgattctcctgactcagcctctcaagtagctgggattacaggcacacgccaccacacccagctaatttttgcatttttagtagaaacggggtttcaccatgtccatcaggcttgtcttgaactcctgagctcaggtgatccacccacctcggcctcccaaagtactggaattacaggcgtgagccactgtgcctggcctatatgtctgttcttttgtttataccatagtgccttgattatagtaagtctttttgtttttttgagacggagtctcgctctgttgcccaggctggagtccagtggcgcgatcttggctcactgcaagctccgcctcccgggttcacaccattctgcctcagcctcccgagtagctgggactacaggcgcccgccaccatgcccggctacttttttgtatttttagtagagacggggtctcattgtgttagccaggatggtctcgatctcctgacctcgtgatccgccggtcttggcctcccaaagtgctgggattacaggcgtgagccaccgcgcccggcctacagtaagtcttaaagtcaggttgtggccaggctcagtggctcacgcttgtaatcccagcactttgggaggccgaggcgggtggatcaggaggtcaagagttcgagaacagcctgaccaacacggtgaaaccccgtctctattaaaaatacaaatattagttaggcatggtggcagacgcctgtaatcctggctacttgggaggctgaggcaggagaataacttgaacccgtgaggtggaggttgcagtgagctgagatcctgccactgcactctagcttgggcgacagagctagactatttgctgagcacctgctgtgtggcaggctctgctctaggtgccagggctgcagctccgagctgactgcctgctcccatggggctttctgttagcagactggcaatcagaagcaaacaaacaacagatggcaccatttcaggtaatggacaactacaaagggaaatacagctggtgacgggccagagagtggcaaggactgtgtttttctttgcctacatttatttgggattcatgtttagttctacaatcaataagaatgtgtctgtgtgttgtgcaggggtccagttttattctttcccattaagtatcctgtcccatctggggatactgcattctttctccagggtcctgagcctccacctctgtctctggtcccacgtgggggtcctgtgtctgtgggggtctggggatgggctccccactctgggcccgttgtctgtcttcctcccactgcaccatcatcattctgtcttggtatctggtggacctcactctcctctttttccttcaggtgtctgtcctggcaaatgggccttttgcaggtctgtatgcaacactcagcttgtcagatttcacagaattttcttcttaattcttcggagtttggggaggatggacgtctttacgtgtggagttaccctggccagaaaaataacaagtgtctttctttatttagatattgtttaatttttcattcaattctataattttccccgtagttttatttcaagttaaaaagcatttttccattcttaaaaattaacattgggctgggtgcagtggctcatgcctgtaatcccagcactttaggaggccgaggcaggcggatcaggcagtcaggagttcgagaccaccctggccaatacggtgaaacccgtctctactgaaaatacaaaaattagccaggcgtggtggcgcgtgcctgtagtcccaggtactcaggaggcggaggcaagggaattgcgtgaacccgggaggcggatctggaaaagtggtgaggcccacatgaagtcttcagtggggtggtcgctggtaccatgtccaggtctcagctttgacgaacactcggtggctgcaatgtcagcgtctagggagccctcttatacaatctttgtgactcttccgtaaatctacaattatttcaaaatgaagctttaaaaatcaactttaatggatgtagtatttacatatacattatgtataacgtatactaaattgaatgcagccattgtcattgtacttaccgtgtaagggaaccctgggcagggttttgacctcaggggcggctgctctgtataagcagatccccccagaaactgcctgggcgtctcgggagcgtgggtgccactccagcaaaggtctgggaggtgggttcccgggaagagcctcagggctggaaacgcgcggccctgaccccaccctccccgatgtctgcagaggaaacgtctctgcttctgccccttctgctaccgggaggtggggtgggcggtggagtctcagcagggccagagggcagggaggcgccgcgatctgcaccccccccccaccccctctccacccggtttggggcgagctcccgggtgggaagggcccctcccgctgggactgaactccctccccagagggtttatccgcctgtgccgctgtggggggcgttgccagccccgtcattgccgcggggtcgtgcccggtgcgcccccccaccgcctccacctctcacggggggaagctgaggctcagagaacgaggtaggggtggggtcggcccctgtacgtcgaggccagtagcggaccccagccagactgcgggacccccagcctcggatccgacccccctgcaatcagagtcggggtgtcccagcctcaggcaccacgtgggaccgccccgcgccgcagcggcctcctctggaaacgggggcgggggtgggtcgcagcgccgccctcctgcggatgcgggatgcagctcatgcttccagggtccggcggggtcgcggggtgtcgaggtcgaggccggcggggtcgcagcagtgctcggggccgcccgttctgcgccggtctcgccgctccggcgtctgtgccgggagagcaaatggcactttgggtttctgtgccaggaacaagcttcccgcagtttctgttgcgctcctggctgcgcccaattcccagcttttggaagtggttctggaggcgcctccctgcagtacccgggccgaaaagcgggggggcgtgggcggcatctgtgacgctccccaggttcgcggcgggtccctctgagcctagtggctttgcagcctgcggggagcacgaatcctcggctccttagaggtgggccttccagaagcctttggcgcctggaccagcccagggctcaagtggggcctccacactctcagagcgggagggccccccacaggcacccctggagcagagcgcagcacacctggtgctctataaatgccggctcccgcgaccagacccagagcctatgggatcagctggaggggagggaaggggcagcccactgagctgcagaagccctgcagctccccacccctgccaggaaccccttccatcaggagagcaatgtggggagagaccaggctcacccacctccttatagacgccagtcctttccaggagggagaaagagccacgggtcactcactttagggtgaattagcttttctcatgggggttaagatttgcacaaaggcagtcaggactgtgggggctgtccttgcctcccccacacacctgctagagacagcccgctggaggcagagagattttggtccaatgactggggactgttagaagaatccaggagcaactctactgtgacccagtttcccttgagtcatgggcctaaaatctgctttgcaaaacatggcagatgcggctgaaaactgaccacaagcctcttagctttctgttgaggagtccagatctgtgctatcagccaagtgcctagcataggctgcctgcctgtccccagcagcgacgagggcagcaagaggggctcgttctccccacaccccactgcctgtgatagcttcagacagccaggatatggggggcagggaaacaggtgcagtcggcggcgcctgcaggatgcaggcatggccctgtctgagtgacaccttcagcccagagcactcaaccaaaaagctattctcctcccaccaacagctcgggccttccaaatgacagctcctgcccaccctcgacagggagctcactcctgagtgactggcagaggcagcactggcacagatagctacaggcgagggcgtcgccccaggctccgtatagcacggagcttcccggtatcagcatagtaatggcgagggggaacccagagcgccagggacatggagctgctgaatccacagaaacgaggtggggggcacacctggacccaggtggaaagtggctgggtggtgttagtctaacccacaatttcacctgacatctctacccgaggcatgggctcagctggtcgggggcagtccttaggaggtctggcatccagggggcagagcccagaggcaagaccttcaaggagggggcagagccagtgcctcaccactgaggagcacctcgagagggggccgggtggccgcggggggagagcggcatttgcaggggcaacgtgtggccagagtcccctcacacacacgaggctggtccaggagcacccctgcaacgctgagggctataagtggccatggaggagcctggccgctctgccaagtcacctccctcagtgacacctgtgtgctgggtccagccagcttgctctgctctctggagctgccgagggccagggctccccgcagtgcctgctgtattcagagcccgtaattatgcatatctgtcctgtgggctgagttgcagagctgtttagggaggtgtttgtggggcctgtgaatcagcagctca

SEQ ID NO: 747 - DNA, 7256 bp, Homo sapiens
  source 1..7256: mol_type = other DNA
tttccgcctacccgagaccaaatacgggcacacacaatacacaccacacacgcgcgcacacgcacacgggcacacacgcgcgcacgggatcctgctccgctccgcggctcccccgccccggagagctccgcgatcagcacccgggacagcgccaccgcccacgtgcagggggtggggtccgggcggggctggcgcctcggcgtctcccgggagtgtcccgtccagccgccgagcaggtaggagctgctgggacccccgccctcagcccatccgcatccgcatccctagaggaaaggggtgtgcgagtgggggctggggcactggggagacaaccagagggagggcagcagcctgaagcggagagacagggatctggggacgcgagacaggtatggagaagacaaagagccgagggcggggagtggggcgcaggcggaggggagagggagagaccctggagacagaggccaggcgatagggaagagagacaggcgggttggggaggcagacacagggaagacgcctatgtggggtcaagaggcagcgtggagaccgaggcggtcacgagagcagcacggatgcgtggagagaccaacaggccaagaaggatgagggggctcagcacaggcaccgggcagcccccgacccgccctccagcaaaattggggagagggaagagggaacctgcgtctcagctcccaggaccaggtgcggagggagcagtcggctgtgggcgctcggaccacaggctgcccgctccccacctcgcgggacctcaggatcccagtcgggctattggggggttcccaggcaccggtgggccccggagcgagcctgccccgccgggactccgcgtctgtgcgtcagccccgcccgttgtcctggcaacaacccgttgcccgggcaaccagctttgctctcaccccgcttgagaggagcccggctgttgctctgggcaacgcggtctgctggttcccacgtctgccttcgcccgcttccggttcagaccctgcggaggggcgaggacgaggcagaagtcagcgggatgcctgtggggccgtggaggaagagggtatccctttaggatggaactaggtcctggacaccccctctcaagtgcggggaggctgatactacaactcccagcatgactcgcggtggctgtccggtttctgcgcggctgttcgcgcaaaggcctcatgggagttggagttctttgttgtgcgtggggctcaaaggacgtctggggtgggaatgggggactagggtgcttgagtgtctctgcagaaaagactccaggaccccgccaccatgttcccggagcccccaaccccggggcctccatcgcccgacacgcctcccgactccagtcgcatcagccacggcccaggtgagcaagacccgggggtggggggccgagcagagagaaagcctggccaggattccgaggggcgggattcggacgggtgtactcgggcaggcgggctggaaaatccggctgggatcccgggtcgtcatcctggactggaatgcgaacgaaatggggtaaaaggaaggaacagatttgcaaaaaaaaaaaaaaaaaaaaaaaaaaaaaaatcgaaaccggatcaaggggtgttgcatggaatgggatcttagaattggaaggtccacctagctcttcttttacagataaggaaacaggcccgatgaggagcagggcttcttgtaaaagcatcaggagttgagcagaaatggggggcggggtcgggtaaggaaaggcagaactaacaagcaagcaaatccagatggtgtcagcctgggttggggcatcgaatctctctataggccacattaggtggaagaaaaacacaggaagaaatgcaatgaaaatggctggagggaaaaggaggccagcattccagcttccacgtgtaatcaggactgaatcagcctgcgtgctgcccaggcctcaatgtgtgttgtctccacccctctgcagtgcccccctgggccctggccaccatcgtgctggtctcaggcctcctcatcttcagctgctgtttctgtctctaccggaagagctgtcggaggcggacaggcaagaagagccaggcccaagcccaggtccaccttcaggaagtgaaggggctgggccagagttacatagacaaggtgtggcccagcccagcccctccacctggccccttcccgcaccctgctcctctcaatggcccagctggtcccagtccctgctcccttctgtcctataggaacccaccttactggctcatcctccctgtgtgtctagccctcaactggactctggggacccagagatggaacagaactagttgctattcccaagaacttcccagtctggtgggagagtcaggcactgacacagacactcaccacacagggtaatatgtgccatactacagggtctcataggagcacagaaaaggcatcccactgtatagaaacctacagaaacatataaatatttggctctgggccgggtgcggtggctcacgcctgtaatcctagcacttgggaggctgaggtggacagattgcctgaggtcatgaattcaagactagcctgggcaacatgatgaaaccctgtctctactaaaaatacaaaagccagccatggtggtgtggtataatcccagctactcgagaggctgaggcactgaaaccgggaggtggaggctgcagtgagctgtgatcgcgccactgcactccagcctgggtgacagagcgagactctgtctccaataaatagataaataaataaatggctctgaaagctgaaaaccagctttgtgccagaatactttaaaatatgctgatttttttcagaaaatgggacatatttacagtaggaaaaagtttaaaacagagggtcagacagaggaggcttcgtggtggaggtgacttctgcactgagacctgagggacagagttaactgagaccagagagaaggacattctagtccaagttggagcatgtgttgaggccccatatccagattcaggccccatatccagattctgaggcttatttggggaacaaagagtcatttctcacaatagctgcactctggagtgaagtgtctggagaactcagcagtatccatgtcatgaaggtgatgaaggctacaaatatgttttgagcatgagagggacagggtcagatggtgttaggatgactcctctggaaccctgtgtaggacagatctgcggcgagggatccagggacgaggccagtgcagcagcagcctggagaggataaaagacatttgcattggatgaggccgttggaatggaaagtggtcactgcagggtctgaaaattaagtctctcagtgcagagtgcagtggttgcctgggagccagacagccctaggtttccaaccaagaaggaccatttcctggttgtgtgaccttggagaactcactgtccctctctgagcctcaagtctgtggtcactaacttggtatttcccctccttccttctcaataaggagctgttcaattagcatccgtaaaggatgctatttagggtcctggtgtccagccccatccctgtcccttaaaccagtgatgttcaaagaccgtctgcagcagaatcacactgggtacttgttgaaatgcaaattctggcactagcacctgacctatcaagtcagaatccctgaagaggtgacctcagacattttgccacaggattcaggggaattcaggttcacattgaattttaagaattgctggcctaggttaaggagacaccttctgctttttcattcaactttagaatggcaagtacacagtaaatatgccatttctcctccatgttttgctgtgctaagatcacaagtaaacatggcagtttggactagcaccccagtacatccattagcatgtgaaataaaacctgcattattcctgtgggcaatgggacactatcagcacttgttttaatctaagcatgacaagcacatgtctagttcctgcccatagcagacaccactaatcaaaccttcacaaacatactgcatctgtgttaccacgtctatttcctgcctgtggcagacagcactagtcaaatactgaatctgcttagcctgtgagagctcaggtatagcccaagggacctgtgagcctcccttggcttctgagcctgatggatactgctatcaggggaagacttcacccacccttacccctggctccttaaggtgcagccagaagtagaggagctggagccagcaccatccgggccagggcagcaggtggcagacaagcatgagctaggacgactgcagtactccctggattatgacttccagagtggccaggtgggtgtggaggaaggggaagctttggagggaggatcccgggggttccaaccccttctgaaaggagccatggaagggaggctaagactagtgttccccacctcccccactgtgcctgggccctgcagctgctggtgggcattctgcaagcaatgggattggcagccttggatcttggtggctcctcggacccctatgtgcgggtctacctgctgccggacaaacggaggcggtacgagaccaaggtgcatcggcagacgctgaaccctcactttggggagaccttcgccttcaaggtgagctcctgccttcaggccccgtgttccatagcctgtgcccagtccctggaacactagggaccgaccccttccgcttttcctggaggcggccacagctcaggtggcagctaccagctctggggctattccactggaccctgggcactactgactcctgggctgtagcctggtccttgggcggtacgatttgggttccactgacccgtgatttttttccgcatggatccctggactttcccatttgagttcccccaactgttcgcttcgaccctcgctgcctcactccatgccttccttctggttgtgctgtgcctcaccctatctctgacttcctgctctctactgcggattctctgtgcactccaggtcccctacgtggagctggggggcagggtgctggtcatggcggtgtacgacttcgaccgcttctctcgcaatgacgccatcggggaggtgcgggtccctatgagctccgtggacctggggcggccagtgcaggcctggcgggagctgcaggcggctccgcgggaggaggtgagcatgcgcggtcgcgccccgagccacgcccccaggcccagtcccgcccacaacatcctgagccaatcagatcataggctttccagaccctcagggcggcgtggattgtacccctgaggaggcatggatgtggagccggggctctggtgatgggcccctctcctttcagcaggagaagcttggggacatctgcttctccctccgctatgtccccacggccgggaagctcaccgtcatcgtcctggaggctaaaaacctgaagaagatggacgtaggaggactgtcaggtgtgtgggaagcaagggagtggggtgtgtggggatggcgtggggtgggttctcgttctgacagtttctgagcctcgagggtttcttcggggacagggaggacctggctgctgtggaaggcatggattttggcatagagctagggagacccgaagggtgtaggcagtgtttctatgttggtccaacaacccagcagtggggagctataagactcctccttcctctccccagatccatacgtcaaggtccacctgctgcagggcggcaaaaaggtgcggaagaagaaaaccaccatcaagaagaacactctgaacccctattacaacgaagctttcagcttcgaggtgccctgtgaccaagtccaggtgagctcaaacctgcccttctccaagagcccagacctttagtaatcgccattgctaggcggagggagactttttagcatctccctagaaaccaggtgagggggtctgaggttatgctctcagtctgtttcctcctatgaggaccaggaagcctcttccactccaggaagagactccttaaaattgggtgtgggtgtcctatctgctctaagcgggaccgggatgtcccacccctaagcagtaccagatgctccaccctaagcaggatcagtatgccccgccccaccaagcggaaccaggatgctccgcccccaagcaggaccaggatgccccgcccccaagcaggaccaggatgccccgcccccaagcgggaccaggatgccccactcctaagcgggaccagattccccaccctaagcaggaccaggatgccccgccctcctcaggaacgtggttctaagaaaaagagacctcccctcacttctttagggacggcgcctaccctagcccggcccctgttaaagttctgcagctttgcggctcttaggaggctgctcccccaggaggcgccgaacacacccgctccgcaaccgagtcctgagggttcatttccttagaaacctggctgcgcaggaagaaaggcgccagagcctcctcctcgccgcaggctccgtccctctcgtctcccaccccctcccccgtcccgagctccggggccccgagccctcgggtggcagcgagaggtaccctcagccgtgaaaacggacaccgccccttccggggcctcctcccctcacgctcctctctcctcttcctcccgcgcccaccccagaaggtgcaggtggagctgaccgtgctggactacgacaagctgggcaagaacgaggccatcgggagggtggccgtgggggcggccgccggcggggctggcctgcggcactgggcggacatgctggccaacccgcggcggcccattgcccagtggcactcgctgcggcccccggaccgagtgaggctgctgcctgcgccctgactcccaccccaagcccccggccaagcctggactctagcccctgaccccagactcccgagaccggccaaagccaagccagccccacccttaagcttcctctgacggttaccctccccccaccttccaccccaaccatctgaaccattcctgtcttctcacccccaacgatgccaatcacgacaactttccagcacactcccccgaccctcgcggacacacccagatgccccagggaccccgggaagggaaggcagcctggtttctcctgcccccgggtcctgccccctgctttgacaatcagccatcctcgtctgctctcctctctcttccaacacagcccatccctgcactgctcctggggccaaataaatattcagcagctccggt

SEQ ID NO: 748 - DNA, 28273 bp, Homo sapiens
  source 1..28273: mol_type = other DNA
cggaaacggtccggggctgagctgcagtcagatccggggatggagggagccggagaagaggagtgagaaggccggggaggcaggccctgctgtcttcctgcaggccggcagcctgctggcagtggaggaccaggccgtccaggaaaggaaggggtcaggaggtcgggcagggcctcagcaggttcagacaagtccccagaagggagctgcaggcgccctcgagtccaggccccaagcctggctccggttgtccaaagagggcctaggccaggcctctggtgcggaaactgagtcacagccagacctcagggcacggcctagacgcttacgagccaaagttaggggtagagagcagagacctccggggggtctcagggagtagggggcttcagggcctcccagtctagagccggattggcgagttagacgcttgtagatccaaggttggattggggtggggtctctgggacgttggatcgctacgcaaggattggggggattcaagtgcttagagatcgaagtctgccctgggtagggggagtcagacaattggaaagcctaggtagttatttggggaggggtctctacgccttggcgaagcgcacagctgcatctttttggcttgaggcctgaggccttgtcgagaagcttccgtgaaagggtgggccagccgggccacgagaaagaaagtgaataaatcaggaatataagtgggcggggggcccctgagaggggggtcgcaaagggtgagacatggccaccaggcgtttaaccgacgctttcttgttgttgcggaataattccatccaaaaccggcagctgttagccgagcaagtgagtagtcacatcacctccagccctctgcattcacgtagcattgctgcggtgagtctcctggcggcctctccgacacacggaccgtgtgcactgcggctctgcctgtttgtctgtctctgtctgtctctctgtttaaaaagagaagataagaataataagactaagaataataagatctcttggctagagtcagggggcatctgtagccctggatgaggaagaagcggtgctgtgaggccgcagctccacctctgcccggtcttctcctcacttccgcagcacccccccccccgcaccccccgccttggcgtcactgcgctacaggccgcctgtaatttacatatgttttaacgctaacattgggaagcattgggcctttctgaagcctttttgtttcgttttgtttgaagctcccctccccccagtaatgagcctcagtttggtcctaagggctgggtcgccggatcgtagacccaaatccttgcaaaatgaacgactccctcccctcaaagaggagggagttgtgttgttgttttgttttgttttgtttttccgcccgttttcttttaacggccccgcagccctctgtgtggccttgttccctgtgaataattgcctcactgttcttcctgggggcttgcgtttgtgagactcaaggtgctagcctcttcactttccatttcccagacaggaaattaagctttcctctccattcgaactttttaaaaaaagcctgaggaggtatatgtgaaaattaaccccgtaaaatagcactttttttttttaattaaccacaacctttagttagcctagcagtagcgttttttaagggtggtcctggaaaaattactgtttggggtttgtttttaatgggggctacttttccctttctgagcctcagtttactgctctgttaaataaggggcgagtctggatgatctataccagacagtgatcgttagctctgtaatgtcttcaattgaaaagtgaagttatgaaactggctgtagttcaggctacctgctgtaggcagactaggttggaatagaagcagcgttggaacaggcgggaaatagccatcccaggaccacattcttgggggttatacttgatattaggcaattttggaacattcatttcacctcttagggactgtattgccagtttatttttttctttatggctttatctaaatgcttcaggaaaattttgccatatgtcatgattatcatgtctacaaagacagtttctcctttttgtaagtcacaggtggagaatgtctttggccatataactgatagaaaagtcattttaagccgtgtgagcggtttcaggaataaaagcatgtaaactcaggtcaaacagcctagaactagggacagagtgtgtgtgagatttcagttaattaagaagttgaagggttttttttacatttataaacggaaaggaattacattatattgaaataaatgtaaagatgtctggtagcatagaaacaggctaattctagcgctaattttgaagaagaaataatccaagaaatcgagtagaaattggatgaattcaattccttaatggaacttcagtaatgttaaataagaactgcatgttccttaaatgacttgattttgtgctgcctcaaaaactactgaaactcatattaagatttctaaggtatcagttttaattgaaaaacatattgtttatttttcaatttttaatcattaaggttcaaaataccctgaacctttgggtaacatgagggtttttttttttttcccgattaagtcagacagtttaaaaacctagtatctgagacgggaagctttttaaaagtgcatctctgaatcagaccactttagaaaattattttctaagttaggcaattttaaaaaatatttaagctaagcagaataattaaaaatggatagttaacgtatacagtttggaaaaatagatatgtcagggtatatacagatacatttagctaactcacagttttttgaaaatagatttctaaacccaactaaaaatacatttctaagaacgttaaaaaatgttttctaaatgtcataccattgaaaatgttaatatttatattagtctgaccatttaaaatctttctcagatcattgaaagcagtcatatcatttaaaatatccttatagtcaatccatactatctcaaaaataggttttgcagtctaacaaacatagtttgcctgaattcaaatttaaaaataaaacacagatttatatattttaattgtgttaaaaaatggcatgtcataaatttctgaagtatttagggttgaagtgttacatcttcactttgcttacaggtgattcgtaacaaaatctattctgcacacagtacggcgaaatgctaacaagactaaatagaggttatgattttttcaacttttctggaagttggaaaagctttataaacattttgaagcaaaagccatgtttaacacaatttgtaaaatctattgagtaactcttagcaatgcttttcactgcatatctagctcacaaaaaatttaaagccttgtttctgacttgtaaatttcaaagccatgtagcaaaccaaacaaaatcgtatctgtcaaattttgaatatggactaggtattaggtgacattaaggaattaattataatacattacatttgctaattttattagagatgcctactgaaatgtttagtggtgaaatgtcaaggcatcttacctaagtccttaaacccctccaaaaatagaggaagcaaataaggcaaattgttactcattgttaagtctagtgatgagtatgtgtgcgacattttaccattttgtaggcttttctgcatgtttgaaaatttttaaatagaaacttaaagtaagtatatttgttatagtaaagtaaaacagttaaaaagaggcaatttgtaaatacatgtctaacactcaggcaatttgaaaggaagaaattaaacctaagtttaacttaatttaaaaaataataacctggaattttaagtttccaattagaagaaaaagctgtagactttgatcttgatgcatttgataccaactaaaaatacacctaaaataacagactttttaaaaaaaaaattgtaatcctgaattttgacatcttatttcaggaaaaagctgcagaaattaattgcagagtagtgtgtatcatacacctcaaagcaaagcacacctaaagccatgccattcaaaaaatttaaacatgcattttttgcatcctagtttgagggaaaaaactagaatttggttgttgtagtggggttattgtgtgtccctgtgcgtgcatacagggttttgcagcattcaggcaaatatgtcaaataaacaggaatttaaggaggatacgcagtgaccagataaacacaaagcctcaagggccagaaggaacctaaaggtcatttggcctaatgtccccatttgtgataacccctcatgcctatcttatttggccatggtgtatgacaatgatggaaaatgccagcagctccatgatttttaccactaaaaagtctttgcctgttaatcccaactatttgtgtcctggggtcctgcttttagttctgttccttcgggtcttccttctgtctggtaaccctgcagccttgttacccagaattctttccaggcctagcattcccggctcagagtggttatgcttttttcctataaatgatgtttagtttttctgtatcctttttagatttcagcatccagaactgagcaaaattctacttttttgtgttcttagttgtattaaagttagtaaaactaattgtaaaaaaacagacaggtttgactttatgcactcctaacaaaatacagtcgtatttcccatgcattttactttggcctcagttttgagtgccccatcacgttcatgcctcagggcagcatgaaataaaggaaagagcactgagaattgaatctgagaattgaggcctaagtcctgttctgctgcaggctcagagtgtgtccttaggcaagcctttaatcttttcggacattttttgcctcatttgtaaactgaggggtttgggttaggtgatttccagcagccctatcgattcaacagtattttctcaagttctgttttaatacattgtttctcctgactttagctttaatttgaaaaggagaaattcatagtcaacagtgttgtagctgtcagtccaaggttactgacagaaatccttagaagtagccccagtactgtgcaaaagtaactttcacattattatgccagccaagtgcaggttttaaggtagcaactcattcaagcagcttggctttaggaaactgaaatggatttatgaagctaaacaattattcaaaacaaattgtaaagtcataaagaaatgaatgaaaggtagatattgagatgctcttctgatctgatgaaattctgtatggatttgtgtggtttccttcgatctccgggaatggatctaatataggggttggagctactttgttagtgtttactgcctaatctatactctgctttaaaataatgcataatctataattggaagctagcgttaattggtcttagattagtttgaaacataagcacattatttttaataaaatgtgtgctttaggaaaaaggaaattaaggattaactatggttataagaaacctgaggtccttattcaggcttgactacaatattagctaagatttatggagagtttactttgtgcctggctctgggctaagccctttccgtgtgtaagctcagctcatcttcacagtgctctatcaaataagtactattgtttttctcagatacagataaggaaacagattttagaggaggtaggaaactggcccagtgtcacccacctgatggctgggggctgtgattggaactctggcaaatctggcttcagagccccgtgctcacctcctgggccactctggtgttggctgcattttcagaacttgtgctgcagatcctggaaaatggaaggacctattgttttaaaacaattttttttcttgcaataggctagcatctttctttatctcactttatgaaccttacatagtcaattttaacttgcagattgaagattctaagttttagtacaagctgagtctgttggaaaattagttctctgtctttagaatccaagtatgaaatcattatatatttctctttagatctacttgcttttctgcttttaaagattccatgggagcagtgaggcttactttgagaataagggtactttgttggataaaagtgaagcaaacttttattttggcagtaacggaaataaagtaaatatcactatagcatagacctgtgtttccaactcattttgctcaacttttccagacttcctgagtaaacacagatgggtttccacttatttttcagttttatgtagaaagttctttagactataaattccacatgctacttggagttttcagtgtttgcttgattgcatgccattggaaggtcaaaaacctagatttagacattataaagatttagaaggtgatgatgtgtagtaacgtgttttcatttggctttattttggtctttcttgatggtaattctaaatgttttaattcaggtcttgactaaatttcctggtaatttggtggcagacagaattttgaaagccttctatttttaaatagcagaatggtggggagggtctttgaaaaggtgaccttaatttaatattcctgatgtggtggtagctgcctatcacaagtaattccctgaattgttaataaaattagagaggctggagggtggggtggaaagagacctgaacacctgggtctgtccccagtctgaccattaacaagctctgtggcttcaagcaatgcatttatacattttgaagcttagttttcttatttgtaagaaaagacttatttctagccctagaatcccatgattctgatttcacctcttatcaactaataattgtagaaatcagaagatcagggtgtgtgtgctcggttaataatccaagagcataggcacatgtgcagcagagattttaaccgaggtttgcaatagtacatcgttcaaagattaaatgccagggagccgctgcagaataggaagaagactgagatactcaagttagggattttgtcttgcatcatgttttattaataaaagattttaatgttctcttaatgttaagcttttaaaaaataaaaacattttttctttgtaaagtaaaaggtaattaaatcagctttccatttgatttattaatatcgtctagtactactattatggcagggtgtgtatagagttcttttttgctctcatagaaaattgtggaaggaatgaagaggatttgcagcttttcataatgtcatctaattgaatttttacgtggagtaaagtttgattacatttttattgctatcattgtttaataatattttgaccctgatagagcagcttcatttgcactatttttaaataagaaagttatgttttattttctaaatttactgctaaacataaaaaaacacaattgattattgaatttcaccactaattatttcagtgatcaatactgtacaaaaaaaagacctagttgtttagattatctgtcattagtaaatgtctgtccagaagatagagttccatgttgatctaaaaaagaacctttacttttcaattgaaacttaaccctctggtgtcatgcttctcccttccccctccccttaaaagaaaaaaattattcttaccttttgttttgtctcgtttgcttgcttttataagagccttatgaataactgtatgctttctagctaataataatacataccaagagatggtaagagtttttcttttattttgccacctgtgtctctctccgggaaagagtggtttctcagctctcttactaccagggatgaagccgtgtctgcgggatgtaatttgcagagaccttacatatgtggtcactcacatgttatctgaatacagctacagacaatttttgtgggtcatttattttttaattttgttgcatttgcaggtctgatttacatgttaaaatatacatttatttaacatgataaaattacattttagctctgctctcttattttattttcctgagggaaaatagaatgtggtattgtatgtgatatttggtgtttatgaaacagattaacagcatattttagtgaaaccaaagcaagtgtgttttatctgtttccagtgtattttaatatttacagtcattttttgcttgtttcctagctcattttcaaaacaaccacagtaaataaaaattaaagcatatattgatgtagcttaatttaaaaaaaaaaaaggagattttaaaatgccttgcttagtggatctttatatttagtcagcttaaaatctcagtgttttctcaactgaccatgccttgtctgtctgtctgtcccatgctgctttctttgtgctttccccaactggatgggactgatggggacaacatgtctcttcaggagctggacgaggtattgtgttttgaatatttttatatgttgggtaatttgagtttataaaatacctacttttcctgaagtctttgctcatatataaaatgctaacagcttatacatatttagcatttgttttgattactttataatttttttaacagtttaatatgtagaatttaatctattttcacaccatgtgaactgatgatttaaaaaaggctttgggaagatcgtttactagtcttgggaaagtgtcttaactttggaagcagtaaaggttgaacactttcttcaaggaagccagaatgttttgagaattaatgtctgtagcttcctgatttctgagaagtgagtcgtgcacttcctcaggtagacagtatagaaggccagcatgtctgtgaaggccctaaatgagaaggactgtagccacggcaactgtgggagggtcttccttgtcactcctgtctggaatgagatgacacccagtggatgcacctggagctattgtcacctgggcccagttctgcatctcctagctgggggtgcctttggcctttttattagctactagcatcttgcccagaaggtggagagaatatatattcaaagcactttattttagtagccggagtaaaagggttgagaaaaaatgagattaaaactgttgttaatgtttgtgtctattgtctgtttcagcattgaaggggtaagaatatttttcctgagtatagaccttttaagtagagtgatggagaggtgagggttgttcttgtttgttttcatttagaagtatgaatagtaaagtaggattaggaggatcactgtccttaaaaccagtggggtcctaactagtagattcagatctacctatatattctaaaaaccttaactagttgataatgacaacagactgagcacagcctaaatagccttcattgggaactggttaaatatattgtgtagcatctctgaccctctgtaacaggtaaatagtgaggcccatccatgagagctgcagtggaataagccccagacacatggcggagtggaaagacccagatgcagagcagcatggataatatgattcctgctccttttttttttttttttttttttttttcaggaaaaataactcatatttatgcttgtgtgtgcttaaaaaattcctgaaaagatacacaagaaactgttaacagtggatacaccccaagaaacatctgggatagaaaacttcctttctattgcaaacccttttcttagggtggatatatatttttaaaccatgtgcatgtatactttgccactaaaaacaattagttaaaaaaaaaaaacaccactcaacgggtagctgactgagccaggtgtcatggtcatgcctgtgtgggggtttcctttcccattcaggaacctcactgccagctccccgcctgggcacggggccctggagagggcttgggggcttggagagcaggcgttctgagttaaaatagatgttgctactggctgaacagtttgaagatatggagcttatgacctcaaaaggaagtgtataggatgcgagggagggtaacaaattatggaaccacttaggttgaagaaccatttgaataatgttccaaggaggggcacataagtggtcataattacttcggggtctgctgtctgaaccgatttccagtctttcctacttcctttttcaggcagcaagttccagaaactggctactcactgcatgaacttggcaggcccttttgcttttcttatgtttcacctctaagggcttaaaagggagtcttcacgctctgtgatcagaggccctgcgtagagagcactatctcctccacgctcaccccagtgctattagaaatgcaggttgctgcctcatcgtgggtgcccacggccacctcatttccttgtgcgtttcacttgcctcttttgctcttttgtgcagtgccgttatctttttcatgaagtgtggcttccacaattgtctgtgacgtacattttatttacctcgtgcattcattccactcgtttcttgtcggatcactcagctggttgtgattgtgcgttcaggactctgaagtgccaggtactggcctaggagcagggggtgtggttggggacagtgtccagaggcttctttgaagctgacgcagggcctcacattggcatctctggaaatagtgaacacccagctccagagtggattagatgttagccacccctttataggggaggcctgagcaaatgtccctgagtgaatatcacttgcatctcccagagtaaaggcatctgacggcctcacttcagaggcttcctgcagtctgtccatgtttgattgtcattctcctcctctagcctgagtaccctggagatgtcacttttccttctcagaaaacactaagtaaggtgttccctgaggaggacccgagcccaccattggttctcttacccagggaagtgtctggccctctcctttgttctctgtctttaatctacttcctgtcttatgacaaagaaatctctgggagtttttaaactcaagaattattttaaaagtcacaagataacaaatgtcaagcccccaaaccacactgcctggaggactgcacatctgggagtgcctgggccgggccccagtgtccatgttggtgaaatagggagcggcgctcctctgaaggattgttcttgggactggcatgggccaggtcagtagcagtgctcagtacagtgctcacagaaggcagggagggacggattgctcccctcctttttcttcccctcagagtatgtatgttagttgagaaaaaaggaaaatcagtgaaacttaacaacagtatcagggtgatgtgattctcaagtgtttttatctctatattttttgtatcatttatttttatttttttgagacagagtctcactctgttgcccaggctagagtgcagtggcgcgatctcggctcactgcaacctctgcctccccagttcaagcgattctcctgcctcagcctcctgagtagctgggactacaggtgcgtgccaccatgcgtggctattttatttatttatttatttttgtattttttagtagagacggagttttgacatgttgctcaggctggtctcgaactcctgagctcaagtgatccgcctgccttggcctcccaagtgctaggattacaggcgtgagccactgcgtcatcctatgccattttaaaagtatttattttgaccatttactaatttcataattagaaaaggtaagcattattttaaaattattacgggtttagaaaaatgtagtgctgacatcacttttttcttttatccacatgcttattcacttctccaacaactcggatttcttaagcctaattgtctattagcgaagtagtctgacttcatcatacaggctcccagagtttcacgtggaagtgtgagttgccagtctgttgattttcagtgtcccttctgggctttccaagtgttcattgccatagacagtccagaattatcggtattgttctcattaccaatgcgttacggctaaacttagttgatttttttagatggggaggaggtgtagctgacttttccaatctccacagaggctttgctatttctgtaatcttagtctacactaaatcagccttcagggaaaggcagggtttttaagagtaggagggccatagatttggaacagcaagatttataagagagaatgtgtatgttctttccatagatggagaacttgtccatactggctggtactctttaaatggacaaatgtcaacatttgaagtggatcaaaggcaaaagatacctttagtgagactggcaggaaagccattgggtgtgctgttttgaacatctgttggattttttctgcatttctctcaggaaggatggctctaggttagggtagcggaccccagtagttcttggagagaggaactacatatcaaagaggcaagaattcttaattctcttaagtacaatttttatttaaaaaatatggatttttttttttttacttcagaagcacaaatttatttatttatttatgtattgagatggagtctcgctctgtcttaataaaaggctggagcacattggcacgatcttggctcactgcaacttctgccttccgggttcaagtgattctcctgcctcagcttcccgagtagctgggattacaggtgcatgccaccatgcccggctaatttttgtattttcagtagagacggggtttcaccgtgctggctaggctggtcttgaactcccgacctcaggcaatccgcctgcctcagcctcccaaagtgctgggattaccggcgtgagccaccatggccagctgcacaaaccaacatcatatatttggagggggcaccatgttgaaattcagtaagggtaaggagagagaattagaaacctggccattttttaagatctgtatgaaataggatggcagcttgaaaattgatacatatgctggatcttcaacaataagaagacatgtttttaaatggaaagtgaggtttctgaaattaaaagggtgcttatgttgcacataaaatttgtttatgtccatatttgttcccatttcaaatagttgacgcttatcttcaacaattgttttcccttcccaaaacatactgtcttgttttttaatagtacatactgtgatacacattacaaatccatactgctaaaagaaatgacacatttcttctcaatagggtggtgtttctttattataatgaactatagctatagactgtatcataaaagagacaaattattcgctatttaaagttttcattcccaaagaatcagctgttctatcttactggcaaaactctgatacaatgtgtgggaaagctagtaccagctgagcaggctggcatccatgctgttcatgtaggaatctctaattagcaagcttccttaggacccttaacaaagagtgtgttctccccacttttgatttacatctaatttgaggggaacacatgcataaaatcaagtactgcttcaaagagttgtattcacttcaaccgacttttcatatgtggtttataatttgttgttttggataaaatgatactaatcccaatgcaggtaaatttagatagataccatctctctgtcttctttagtttaatgtgtatttgtaaacagtaaaaacagtacaaaataagatcatgagcttaaaaactctaaaatcactataaataattactgattgaaatgtgtaataataaaatatagtggattcgataataaactggtgtagtggaaattctaggacccatgaagaggtcctttagcaattttagattttactttgtataaacagctggagttcaagttctgttccagtccagcaatactgtagacagcacctgatgtatggctggcaggtgctgcgagctgggcctgtggtttgtccccctgctttttagtcagtgtgtcctccacagagttgtgtacctcttggtgactttggagcaggagtgttgaggaataaacaagtctgcctctgagtgcttggcacaggccctctctgtgcctgctctgtagagggtgaggtctgcgcctctctgtccacggatggtcagtaagagaggatgatctttactgacactaacgtcactcactggcggcctgtcctatagtgcctggtgtagttggtgggaaatgaatcaaactactgtgttttgttgttttaatctgatggcttgtcttgattcattttcttagcaaattgcagttatagtttatgggcctgtggagtgattggcacctttgagggtggaaggggtttctggagtcagccgacccaggtttcagtctgtcacataatggctctgtgaccttgggcaagcgacttaacttttctgagtttcaatttccatatttataggttagaataatagtttctaactcacctagtttttatgaggattaaaataatgtcaagaatgtaaaattcctattgatgaactcttgaaaccaaacagaaggtagtggtggtggagaattaccacttcacggcccgggagccccagacagtgcgggtttggatgacacaccatttgtttaagaaatgacactggccctgcagcatccgtgccacgcttgagcaccgttgggcttaatcacggctcctggacgtgctgggattagtgaatggggcctagtccttccagcgtggtcattgcctaagatgcgttccctgagtggacacgtgccccagagcacacagaaagcctgaagcagatggtggcagaaccactccagggcatgcagggaggttgatggtgaagataccaatttgcttttaagaattttactgtgaactctttaggatttagggcctattacttgaagtggtcttttattctaagtttttctttatatgatatttttcccccttcatctgtggattttaaaattttgtcttgttcctttattattagaaaagcaaataagtatttaatgaatgaaaaaataaatttagttaaatgcaaggaagagggaagaaaagcaatatgaatttttcacccaactctacagtgtgatttagaaaatttccaaagtattatctataaagggcttttatagattattttccattatattttgatcatcatttggatcttttgaaactggcatttaaaaattctgagctctggagggcacctcaaaatcttttcaacccattcactgcctgcaggcaagaaaacagcttaaccgtgccaaacccatgatttccctctgttttttgtgtgtgtgtgtgttttttttttttttttttttttgagacagagtttcgctcttgttgccctggctggagtgcaatggtacgatcatggctcactgcgaccttcgcctcttgggttcaagggattctcctgcctcagcctcccgagtagctgggattacaggcataagccaccatgcccagttaatttttgtatttttagtagagaacggttttcaccattttggccaggctactctcgaactcctgacctcagatgatctgcccgccttggcctcccaaagttctgggattacaggcgtgagccaccgcgcccagccgatttccctcccattcttaaaagctttctaccgcagtgtgttatatagttaaaataaacaggaaccatcgataccatttcaaaataaggggaaatgttccctgtggacatttaactgaagaaaagaaatgacagtgtaagattgcattgagatcttaaggattgcttttgccaaatggtagataatttgctagcggttttaggcagttgtttcacacatcttaacacatggttaatgattgtgtgactgagataactggatcagccctatttccaaaataagctaagtgtatttaagtaaaccttgctactattgagcattttgtagttgtttcatttactgcctagttttttttttcacttgcaactgatcacaagaatcattgaggttcatgccgttctatcacagtactagtagtaagaggtctttattttaaggatcttttgttgactttttcattacatttctatagccagatcaagtcaaatttacgttctgaagtatgtccaaggaaattaagagctggtgcatgaaaagataggaaaacaatccaaatcctagcagttatcaaaagcaagtttataatacaggcaagtgcattcactcctttctatatattttcagggagcaacatttaagagagagtaaacattcactcctttctgtatcttttcagggagtaacatttaagagagagtaagagtatttgtatctaaattggattagaataatttttttcatgtccctttactttcctgtagcttgctgatgaccgtatggcactggtgtcaggcatcagcttagatccagaagcagcgattggtgtgacaaaacggccacctcctaagtgggtggatggagtggatgaagtaagttccatgttagtttcatagcatcttgtttttttaagtaattatgacaatgtattttaagatatctgtcatataaacgaatttggctacacttgaatgtatatttctagaaatactttagctttaggttaagttgtctatgtgtgtgttaatgattttagctgtagttttaacattggtagtaactacctgaattataggaagaaattgaaaccccatgcaacaaggaagaatgtgattttctggtaatttgaattaaaagctgctcacacatcagcaagccaacaagtttgctgaagaccgaattctgtatgctgagtgtagctgatggaggcagaccatagcctgcctggcatcagtggagttctgtgacttcatttgcttagattcagtatgatgttggccggattaagcagaagatgaaagaattggccagccttcatgacaagcatttaaacagacccaccctggatgacagcagcgaagaggaacatgccattgagataactacccaagagatcactcaggtgaggagtgcaagtgagtcctggggaaaccagcgagccttctcatggcaatctcagaaactagagtgttactcagaatcagtctcctggagtcatttcccaacctgaagttctcagagggacctcaagaggccctgaagtcctccagctgtcagcgtaggtacctgtgaggccttggaggtatggggactgtttttcaattgttggcagataactgctgtggacggattaagtaaatatgaaatttcaaacattatcgagttcaatcatttgattttaaaatgtataactaatatcgtatactagtgttaagaaatttcaatgctaaattatagtcctcataattgaaaaaacaacttagtatcctagaaaaaattttttataaatattaaatttgattaattttaaaataataggactagtgttgaaacctcagtgtttacattttttactgaagtctcctgggtgctaattatcagaggagtgtggtgctttgagaaaagccctggggggttggaatgttggaaccctggctcttagcagtttaacagttacacgattctcatttaatccctctgactctagtgttctcatctgtaaaatgggactaataatcatagtaccatcctcataggatgcttgttagggattaaatgagaggaatgcaataataatatgatatatgataatacaggttgaacattcctaatctgaaatccaaaatgctccaaaatttgaaactttcttttgagtgccaatatgacactcaaaggaatgctcattggagcattttggatttcgaattttcagattggggtactcaactagtaggtattctgcaaatattccaaaatctcccgaaatttgaaatcctaaacattgccaatcccaagcatttcggatgagggatactcagcctgtctaacgtgatgatatgtgagcagctgggcacacagcaggccctacatagcaggagctgaaatctagtgaaatctttctgtgtatataaatgaagccacagattccttttatctgttcacctttctctaaaccagactgagtgaacagagcctctcacttctcactctggcttgtgatgtggcagtgttagcagaggggcttctctcccaggcttgccctgagcctcgggcttgttctcttagctcttccacaggtgccagcgtgccgtgcaggccctgccgagccgggcccgggcctgctccgagcaggaggggcggctgcttgggaacgtggtggcctcgctggcgcaggccctgcaggaactctccaccagcttccggcacgcacagtcaggctacctcaaacgtgagtgctgcccgggcctagtgaagggattttgagtaagaaaagcactttatgttttcttttttgccactattttttcatttagtccagtacctttcattgttagcttttgaacatgctcataccttgtacagtaaagggaagcctcctccccatgtgaaaccctggcttggaatgaaggcacagcgtggggtaccgaccaaggctgggggagggcaccaagatagttcagcatctcagcaaacaaaatttgttttgtgtcaagctgcaagaatttgaaaatcaaccaagcacattttaaaaacctgttgttttctggatgttggggtttgggagagctgctcttcaataggtaaaaagcagttgttattactgaaagccacatatttgcataacaaccaaagtgtttgagagcacctgagaaaacctccccagggtccttgaaacacttcctctgctggcaccacaggtttcacccagcagaccttttcttcccaaatagtgcaaagccagatttcagctctcttctcattctaatcaccctgtaaactgggttttttaaaattgcccttgcaatcaataaagtccccacatactccaaaaaacctagttctccctccctctgacaactggcatatttgtattttaattttattatttccaaaatttgattagggccatatggaattcatactagagatgcttctagagagaaatactgattttttaaaatgttttgtaacagcagttagattaaatatttctgcttcacttagagattctcagatggttgtgtcatttttatcttggcatcaagtgaattgtgcacatttacactgtgacttttgtcttgagtaatcccaaatgcctgcatattgttgtatgtttgtaatcctttactctccctccacccccgttggagataggcttctttaaagcggctaagaatatctcaattttgactgttggagtttactctagaattcccccttttaatggtagaacaatactcaggatggtttacatattcaagtaaaatgaattcctatctgtgataggcatgaagaatcgagaggaaagatcccagcattttttcgacacatcagtaccactaatggatgatggagacgataacactctttaccatcgggtacgtgaacgggctgcaaagctgattgctgtgtctgtgcaccccattctgcatctttcacctcctagacctcgatcttctgtgcagtgtcagtggattgatacagttgacttgtatattcatcaggttgttttgcagcaggtggaagaacagccgtactgtttcttcctttccaaaggccacagggagaccttgtaatctgctttccagagcctttgggaaagtggtcaacacgctgccttcttaggaagagcccagagaaacagagggctatcccgggggttttgtttatctgcccttgtggagttggcagacgtgggcttctgtcttccctgctatggcctcagagctttagatcctgctggtttagggaatttgaatctttcctgttagggaaaaatgagtgcttactgtgctttgtagaaatattttcagaattcattttctttaaattattttcattgtctttaaattatatctaaacaagtataccatagctttcctgagagggaaaacaatctatccaacacattgtgcactgtcttgctagggttttacagaggaccagttagttctggtggagcagaacacactgatggtggaagagcgggaacgagagattcgccagattgtacagtccatttctgacctgaatgaaatattcagggacttaggggcgatgattgtagaacaggtacgtgagctggccttcctcgtgaataggttttcctgccatactatctgtaccttctttttcctgtactcctttcagggaaaaaaattggagccaattttcccaacatgtgtgtgcacctgtcctttatgtgtgtgtgggtgtgtgtgtgtgtgtgtgtgtgtgtgtgtgtgtgtatattaatattaatcaaatattaaatttgattaattttaaaataataggactagtgttgaaacctcagtgtttacattttttactgaagtctcctgggtgctaattatcagaggagtgtggtgctttgagaaaagccctggggggttggaatgttggaaccctggctcttagcagtttaacagttacatgattctcatttaatccctctgactctagtgttctcatctgtaaaatgggactaataatcatagtaccatcctcataggatgcttgttagggattaaatgagaggaatgcaataataatatgatatatgataatacaggttgaacattcctaatctgaaatccaaaatgctccaaaatttgaaacttttttttgagtgccaatatgacactcaaaggatatatatacatagcaatcctaatcagaaaatatgaagttcaaaatgctccagaattcaaaactttttgagtgttaacatgatgccacaggtggaaaatccctacacaagacctcatgtgacaggttgcagtcaaaactttgttttatgcacaaaactagtaaaaatattgtggccgggcacggtggctcacatctgtaatcccagcactttggggggctgaggcacatggatcacctgaggtcagcagttcgagaccagcgcggtcaacatggtgaaaccccgtctctgctaaaaatacaaaaaaattagctgggcatggtggcaggtgcctgtaacagctactcgggaggttgaggcaggaggatcgcttgaacctgggaggtagaggttgcagtgagccgagattgcaccattgcactccagcctgggcaacaagagtgaaactctgtctcaaaaaatatatatatatatattgtataaaattactttcaagctatgtatatgaaacattaatggtatatgaaacataaaggtataagaaacattaatgaattttgtgtttagacttgggtcccatccagaatatctcattatgtgtatgcaaatattccaaaatctaaaaaaaaaatcccaaatccaaaacacttctagtctcaagcttttcagataagggatactcagcctgtatatgtgtgtatttacaaattatatacataggctactgtcattccctataagaatattaataaatctttttttgataaatgaagttctaatattctcttcccatgcctcgagggtactcatgtgagcaccctactctagagacctagttgactctgaccgagctcagcaatgattctgacgctatagaagatttcccttctaattttggcaggttattgtgtaatggcaattggaaccactagcgttcaagtagaattaaattgttgttcaccgttaaaatctgattagggcattttattatcttgccagcagggatttgggtcctgatccccctgaaaccaactgcagaatggagtgttcaggctctggaagatccagttacattaattactccagtggttcccagtgaactgctatctcttctaatccagcatgtttccaataaaagctctgttcttcctcatagcccagtgtccccgtcttccaatttaattgtttaagagattaaacaattaaacatcttccccttgagtccaaatttttaattttaggtggtagactggagtttaccatttcctgctctgacccatagagatgtggatccacgtttatagacgtgatagtcaatttgcaggtctacttatgacaggggcgagcttacctggtgttctctgcttacttgaatccaagtacgtaggcagcaaatgggcgcagagcttctgtgctgctcagagcctctgtccactggaccatagatttcttagggccccaggaagtccgaatatggcatttctatggcagctgaaaccaataaggaaacctcagtctgtcagtacttctttctcgtgagctagatgtgatggcactaaccagcattctgccatcgagctcctgacactgcttgagggtgaactccagagccctccgtgtgtacctgcagcacacagggaaggaaaacatcatcttatggatgatgatgtctgtaatttgcatatctcatttttgacgttcagttttcccagttgctattgttgattgtctgtaactgtcatttattacctagggtacagtccttgacagaattgactataacgttgaacagtcctgtatcaaaactgaagatggtttgaaacagcttcacaaggtaatatgtctttcaagacttgggaatcttaggaactattttcaaataatcaagaattggtaagagggttcttttccaccataacgatcttcagcattcttgtgttgtccactctcaatacagtagtgtaaaaagggattcatcatttcatttaaagccaattgtgggggctgttgccgttttattgcagttaatgattccaggtgtatctcacacttaaatccaaaattgctaagaactcctttttgtgacagtaaattctaaagagattggagttctttcttttagaaaatatttcattcttttctaatgcttcttgttttaggaaatcaattgggcatttgctaaaatatgtgttgaaaatctgtctgcttgttgccgttgacttgggcctctcttgtgatacattcctgatgaattgctgatggagaatcattctgcagaagataaaaatctaatcttctctttaattaccacagcatatctgtattaccttgagaaaagagaagtttgttgaagtgagagtagtaattcttttattctgtgctaataaggtagctgtttcagggatgtttttatgatattctcttttaaaaaaatagatggaaagcatcttaggaatcttatcggttataagaaacatgcataaacggctgagactctcatatataattggttacgtattttctttaaaaggaatataacaatacttcacaaattaaataatatccatttccttgtatctttgagacccagtggagtttctagccatataatgagtgttttgccaattcactgttggactactctaccatttttctgaaatcagtcgcttcctataccagagatcgccccatttaatagcagtattgggtttacaaaaagtcagcccttgcactagtctaaccagaagccctgagctgtcttttcagggggcttgttgccatgtgtaggtggatatgagactccagcctgtggtgggaagagaagtctgaccttgtctatgcagggtttttttaagcatttagattaatttggttgccaagccctgtctattaaaagtgaaaactaacttaagtttctcactctgtaatacccaggttttgatgtgctgctgaattatgcattggttttgaagtttcttaaataaaaactagtgaaatatgttttgtaatataacacagataaaaggaaaagctttctctgcgggagtgagcaaatctagtgggaactaaaaattttgttttaggttctactttataaatcattttgagaggttttacagtatattatttagtattggcttccctggtgttctgggttacttattagaaaagtcagcgtgctccatcttccctccagccacaaggctgtaggcagcacgcgcgtgctcggcagtcggctagtctaagggtgattgagcgtcgggagctgctccccatgaccggactctcggtgctgtccccgtgcctgatgtttcctcctggtggatgaggggctcctccaggtgggcgggcaggctcacttaggaaacaagcccaccgcgggggatggagcaggagagattgccattctcgccagggctgccttcccgctgtctcctcctccctcctgtgccatagcaaggtctggaagaggcagcgcatgctctccctggacgtgcctcccggcgccctctgaactctgctgtcctctggctctcctttctcagtgctctgcgtctttcgccagccaggtggggccctttggcatttctctagcaggcatgatggagttcccgctcctgccgagcttccaggatgcggtgttaaggtgaagagatgtgcagggtgcagcctcgtccccagattgagcttggagggctcctttgctgtatcgttagcggcactgggaggacgcgcctcagagggatctttctgcatatgacatccatggggcacacgtgtctgtttttatttcaaaggatgagtttttgtttccaaatttaggggaggtcgaaatggggcctcttccgggtgtctgttgcctacctgccaggtacggtcctccagcccgttgtttccttccgcggtgaaggaactgtgcattcgctccaggaacacggaccgggaacaggcgacccgtgctgcaggggcacttgccacggcctgcaggaggaaaagccgggagaagcaggcccagctgcacccggaagcatgagctttcacttccctgtcaggctttgtcttagtagtaggtttccaacaaatccatttccacgtccagggtaaataagcagcaccaggatcatggggctcttccactcctggtgattgaattccgtgggattgattggagggattacaatcatgtagcctgtagcagagacctcagtcactgtgcagagagatctggaagcctcattctggaaacgagtgggacttgatttgggattttggggaaaatgacggccttttttccctcctctttttgtaggcagaacagtatcaaaagaagaatcggaagatgcttgtgattttaatattatttgtcatcatcattgtgctcattgttgtcctcgttggcgtgaagtctcgataagtggcattgggttttcgtgtgtgccgcgcgtgtggatctcccgggtgtgaggggcttggcctgcgccccgccagctgcccgcagaggtgcagcctcgaggaatctgagggcgtcggggcagcgaacctttgcatccacggactcctccttccctagtcctgctcaagcggtccggggaatgggtttttgtttttccttcattgttgagaatttaaggacctttgatactgctgcacaatagagattgagttctgggatcagttataatatatattttttttagaaagagaaaatgagctgagagtttacaggcactgcagaagctgttcagtattatatgtgtatatgctatttttttagcagccatgtctgagcagaatgttaacataatttttggaaaaattttctttaaaccatctggtttttaagaaatttggtaccaaaaattgatgagtagaggcaaaaatgccccttcatctttctctatatattttccagttgaaaacaaactaagaagtcctttaagaatttataatccgttccccattaacttaatttagcttttccatcactgttaatgatcagagtaacaaagtgtgaaaaataagaaaccatcattgatgttaattaacacatttagatgggccagttaaaacagcttcataagttttaaattaattgtaaatggaatattcctcatttaaaatttttgcactgcattttctactgtaaaccaaaagaggttactaagcaaaaccacctaaatttaagttggtgatttaaatgaatctcacattaaaagaaagcttgacagtgttatgaaagccaccagactcagccagtgtgtccccatgggtatccccagccatccttgctcaatccattacttatatactaactacataatgacctgttcaaaccagactctatttaatgaactgtgaatttacacagaggccattttaaatgggtcaccccatttaggattagtggatctcaaattattaaccaaacatcactccatttcaaagtaaaatattccaccagcgatttgatttattggctcttccattgccactgagcaatgcccaggaagcaggcacattgccaaggactgggggcatcttgactaggaagctcctcgtttgtgtgagcgtgggtcagaccgccaaagtaggacttcatcgtttacctacctattatcaatatggtgcttgaatatattcctataactgtagaacagtgtggaaagtgatggtaactttgaagttgttcatgttttattggctttgttttaattgacactagtagagttttaatggtctttgtgtaaattttaatggcttttccattgtttttgcttctcttaaaaagtttaagaagaatatgacctcattaaatgtgctgttttatttggaccagtcacacaaaatgtctctctagagttgactttaaagttgtttacagaaatttaaactcaattccagagattgaagttgtccaaacagctcatgggcttagtgtccaaacccctgcccagccttccctttccaagttggtgccacctccaggtagccattggtggttttcctattactgatgtggctgtggaatgataaggtcctagaggggccctggcatttcaggaagcggacctggtattccctgacaaacattgcttaggaaagagggccggagaataagaagccagcacctcatcagtcagccctgcaatgtgagacttccgtagctgttgagagtcactgcaggtgttctttcatcccatctgattttaacccatggttgagacgttccaagttagatctgctgctcttaggtgtggggctgtccacattagggaacttgcctcaaaaacagtccacagtggcaataccggacttctgttcaagctttttaaagtgctgagccttacaaacccctgaaggaaagtgaccctttaagagaggatcatctttttttatatttattttcaccaaatagggtgatgagggttggtttttgttccctcaacccatttgggtaaaataacggatctgattagaaactgttttaaggaggggctgggctcggtggctcacgcctgtaatcccagactttgagaggccaaggcggtcacgaggtcaggagttcgagaccagcctagccaacatggtgaaaccccgtctctacaaaaaatacaaaaattagccgggtgggacacgcctgtaatcccagctactcaagaggctgaggcaggagaatagcttgaacccgggaggcagaggttgcagtgagccgagatcacaccactgcactccagcctgggtgacagagcgaggctccgtctcaaaaaaaaaaaaaaaaaattgttttagcgctgggtttcccaaggtgggagagacagacccagcctggagctggcccctggcctgtgtgctgacttcttggggtcctcaaaccactgtatttttctgttgagcctgtacttggggagagatcagtagcatttgaggaagtaagagaaaagaatcatggtacctcagggtttctttccctttactcgctggcagccattgtctgtgggcacctcatgtttttccacactctactgggccgtggaggtaacgatcacccaggccagtctcctctgcctgggatgcgccctctgagaggaggcctagcagggcaggctccctctgggcatccctggatgcagcctctggacacatgcctcctttaaagtgtccgggtgcagctcaggttgagtggaggtagaaggagaaacagacatgtttaccacgcgttttccaaagctcctgatctttcccaagattgtaactgaaaactgctgtctcttgttttgttcgttttgggggtggtggtgctggctgggccatgcttgtgaagtgatgtgtgtctctgatttaacggattcactgttttctctgctaattgagagagcgttatttacattatttatttgttttgacacaagtgctttcagtgttttatcctagctaatggcttcttaaaggtaataaaacccttccaacgtaattggtcagataaaactttttttcttgtatgcttaaataaagcaattagtgaagcacttctatccaaaatgacttttttgtccttttttaaaaccaatttactgttactggaaactttttgtacaataaagcaatcacgcagattaaagaacatcctgcaatcctagtattaattttaa

SEQ ID NO: 749 - DNA, 32744 bp, Homo sapiens
  source 1..32744: mol_type = other DNA
ttcccatcccctcccccgcctcctgcgcgctccggccccggcgtctccggccccgcctgcgctggggtcgctgcagtccccgcagctgccccgggctgcttgcccaggcgccccggccttattccagcctggggagcgcctcggtggggagcacgggacagcgagggaggccgaggcgggggccctgggcgcccgatatctccgaaccggggaggcggccccgattccgagagccggaacgcagggaaaggcaaggacggggcggccggcggaggggcgggcgccgctcatcagccacgccagtcacgtctggggccaccggctgcctttttcttcctttccccctttgctttcttccccctccgctgttggcgagggcaaagtggccgtggcggcgccatgcccgggccggagtgagtgcgcgcgggcgaaaatggcgtacatccaggtagggctgaggctgggggcaaggtccggggtgcgggtagggggtgccgcgccccctccggctgggagcgcgcggaagggagggcccacggctaggctcccacaaacttgcttcgagaaaaagggtgcccgtgcgcgggcaacctgtgcagcaacaggggtgcgccccgggaggagagactggggacccccaaaccccgggatggagggtcctatgtgtactctgcaacgcgcgcccttgcctcttggggagggaatggggggtggggcggacttttcttctcccctgccccctccctctccttggcaccccaccccaggggaggggccgtggggagggcggcccggggcgcgccagccacccggcccgccagctgccgttgccgtggtgacggctccggctaattggccggcggagcgagcctgaggcagctgttccgaccaggagggacaaggacgtcgtctctcctgggcactgggtgctgaggggtgggggacacccagaggccagaggcgcgctggtgaagagaagggagcctgttactttactccgctgcattggggtctgggagatgtggaccctcttcaccttgaagaaacgtcccccaagaatccttgggctgaaataattctgaaataatttctaagcagccttttttggggggagggggcggaggggtgggccgggcttcttggtgaaaagacctttctcctctgcaagaagggaagtgaccgcaggtcagcgccaaggtcaagcaggcagacccgcagtgagacccgttgagctgcttgcttctggcgctggcgcctctgagctgggcagagaagcttacagactcccacgtccagggtgcatcttggctcacatcttgtcccctcagccacagctgggggtgctgctggtcctcccattcccctctgggtcacatatcccctcatcgtgtcctcagacgcttcagcctgccgggaactctgtgctgtgtcacctggcggagcctcttccattcatctcctgccttagattccctgaattggcttccctttcgtggaatcgccagtttctcttcaagttcaatgaaggtcacattactgtccacccactgtgtgctgaatgttgtccaggggctattgagtagtcgcccaacaaacacttgggcgaccgcctactaagtgctggcactggggatacagtgatgaaaacagcacagttcctgcccctctgggtgcgcaatttagtgagaaatgaacatgattaccggctcctggagttcttaatggccgccttcagcacagagaaattaagtgacttgcccaaggccacatagctgcttaggggtcaaggtgggatctcaagaggggactgtggtagatatgttaagcatctcatatggcgatgacccagtgatgttggttttccttctagaacaaggtgttaaactttgttgtcctgtaaagtgccagatactattttttttctcttggaggctcacatggtctctgtcacaactattccactctgactatagcaccaaaactgctatggacagtagtaaatgagtgggcgtggctgtgttccaataaaactttatttgcaggcaccaaaatttgaattttgtatactttgcacgagtcaagaggcattcatcttttttttttttcaaccttttaaaaactcacaaattattcttagctcaagggctgtagcaaaacaggctgcggggctggttttgatctgcgagccttagtttgccaacctctgtttagaatgcatgggttgtctttcttcctctttctttctggtgtgaattggttctcttccatcggtgtcaaacacgtgagcccaggagacccaatgccagaaagactcagcatgcctgggaatgtcagggcaccctctttcatcttctttgctttctctctgctccttgacactcatcttgcacctgggctttgagaaagttggggaggctgtttttcagcagggccatgaggtgaccttgtctctgttcactttggtttcataaatggcctcttttgaccaccacatgtctaggaaatgcttccctgtattcagaaaatggtcatagattattatgaaaaagtatcactttatcctaacattctaaagcactttttcatgcaagccctatgagggtataatattttgctgttttgtgccctgctgtacctgccgggacaatacccagtgcctactgggttccactaggtcttgacaatcacctaattctcatcacagaaagggtgcattttatttttcagctggaccgcacgcaagtatttgcatagtcagtgtcctgtcccacctcaacagcacgcctttgaggtatagagtagcctttccactaaagaagaggtaaccgaggctcagagaggccccctgtcttgcccaagtcacatgatcagtcgatggtgagactaggactctagtacttcctggctcagcttgttgcgtggcccctcagcacctttgggtcttgttctgtgtatggtttgagttttggctttagagagtttgtgataagtgcctttgactatttcccaagctgttgctattcccttaccacttcgaggatttcaattttttcacaagccacgtaccacctatactatgatgatgatgatgatgatgatgatgatgatgatgattatgattattattttagacagggtctcactctgtcgcccaggctggagtgcagtggtgcgatctcggctcactgcaacctctgcttcccaggttcaagtgattctcctgcctcagcctccccagcagctgggattacaggcgcctgccaccacgcctggctaattttttgtatttttagaaaagagggggtttcaccatgttggccaggctggtctcaaactcctgacctcaggtgatccacccgccttggcctcccaaagtactgtgattataggcatcagccaccacgcccagccctacctatgctattattaacttaattttttttctataaatgggctcatttttatttttactttaaaaaaatcatatgaaaaggaaacattatgtcactaatatcataggaaaccaagatcatgtgacatcgcagaaggcaactagaagaataaacccaatgggaataatgccacattactgaattctaggtggacgtggctgtctccaagcctctggacaagatctactttctttgtttaaaagaaaggggatgggggagggtggaaattggtaagtggtaaaagatgttaacatgtagtggtaccaaattgagactttctcctccttaaaggagaatcggaaaaaagataataactttctccctcttgattcaaagttctgagtttgagtcccacctcagttcacctctgggacatgcccgaggttgggatgcagtacttctaacctatctagcctacttggcccatttggaaaaccaccttaaagagaaggagggagtctgtgccttgagaacccaggagacgaagatggggaggcggggtggggccacaacaggaagggaggacctccttcctcaagaggaccagattagggcttcctttttagttccctctatttgtgggtggtgataggaaacaccccaccatcaccattggagcagaattggaaggtagggcctccgggagggcgggggagccaagtaacatccactgtgtgcctgcctgcatgttagctaatcatgtccttttgggttggctacatggctatttctgtataggaaggtttgctcttctcctgaagtgtggctgcattggatagcatgactatctatccgcccgctctgattcataacagcatacggtgcaaatcaaatcgaaatgctaaagtttcccatttatttggtgttggttaaccaggaggctaccagcagccctgaaaatagcaacaccttgttaggatgttaggaagtcagctcccttcccaggatggtaagtggaaatatgcagggcttttttttttttttgtaaaatttttttgagttgctggaatattgctaaactggtcttgtctctctttctttaaccccttcgttcccttacgcccttggcttcatcgtggatcttaaaagggcagttggaaccattaaacgaggtgggttcatttgatgatttgtttggtctggtttctaatcaagaaatgcctgactttcattttggagtcttatgtggggctgtggggatattgaatattcaacaataacctggtgttaataacggcacagtttccattcctttctaccgaaaggagatcccggttttgaaaagacaccagttgacaagacaagtttccctctccacccctacttattccgtttgattatctctgtctgtttcatgtcaccgagattttttaaaaatattttttcccctgctttcaagaagacacagtaatattcattgtgtttcgaacatatcgtatagcccttatgatgttgtataaaccacccacatgtcaagaaagacgttcacataaactacaaaagaaaatacctgcaaatgttttgcttgctactaacggctccagcgagttgatgtttgctatctttgtgcctgcagttggtaaatagaaatggaaaacattttgttctaagtgctgagcagcagagccagaactcctgaatgtctatttctcatccgagatcggctgcttgtaattttgggtgttgtttctcctcttcctcttccccaccctgcccacctcccctctcccccatccccccgcccacctcccccaatggcctcagggttttctttctagaatctctggtctgctgctgtgcagatggacctgccggcactgctgtcagaagtgctacgagtccagctgttgccagtcaagtgaggatgaagttgaaattctgggacctttccctgctcagacccctccctggctgtaagtaaaactgctctgaacttctctgaaatcaatttcaagacttttcctttttaatgagaaggcgggttgggggtctgggccacgggagggaggatttgggggcatgaaagagaagcaggctgagtttccagggacaactttgctgcagactggggatatgttctgtacccctcattttgttcggcaagctggcgagaccagctggtggtgtggttttagttcacctagtggcacatcgggccttctgagatacgaaccgtgtaatgctaagcgtgtgggcgtttttagtcacgtggagcgtggttccgagcagaaaaggagatctgtgagccgagcctctatattcttcaggggctgaccgcattctgagggtttccatccaagtcagcgtgacaagattccctagcacttagcccagggcctgcacatagtaaaagctcgataaatatccattgcatggatgggtagacggaatgaacaaacaagtgcctttttgctgctccgaacaagaacttcagaaacagggaagcagaaaagcacctccaggctccatcctgtcctccaacgctgtttatgttctctctggcatctttcgttttatttctaatttgctctcctcccgcgcctgcatacaacatctccatctgccagtcgctcagatattttgggaacgcagttttgaagcttctcagccacgtgcctggtccacctctccgtgactgagagagggacgtggtcagagagcctgggtacagtcaagaaggtcggggctgggaaggatcaagaagtcatcaagtgagcttgtcatgcttcggaggggcaggcccagagagggagacagacagcggccaggacccacagctggagcctggcagagtggaaggaggcagcgctgtttcagctcagtccttggcctgagattccaaaagtctctggtgtcccatctttccctccaagctgggggctcatgcctcaggcctctcattttctcttcttagaagcaagtatcaaatatttccatagcaaaatggttctgtatccaggctctgtggtctcaactactatttcgagttctgtgaccttgggcaagtggtttgatctctgtgtgccttgatttcccatctgtgaaatgggatgataaaaagaatagtatttctctcagagttgtcgaagggagtcaatgaatttggaatgtggaaaagtagttaggaatgcttgatactttgttggtgatcatacatgtaagtaactctggctgggcgcagtggctcatgcctgtaatcccagcattttgggaggctgagggcaggcggatcacttgagctcaggatttcgagaccagcctgggccacatagtgagaccccccccatgccccatctcgacaaaacatcaaaaaattagccggatgtggtgatgtgtgcctgtggccccagctactctggaggctgaggtgggaggatcgcttgagcctaggaggttgaggctacagtgagctgtgattgcgccactgcactccagcctgggaaagaatgagaccctgtctcaaaaataaatacataaataaataaatgagatatgcatataatatgcttagcacagagcaaaagttttataagcatttatttctgtcagtattaggtttcaatagagattaattaaactgatacaaacacaatgttaaagaactcttccattattcattattcataagttgtggcctgaatcctacaggtgtgtgtagagttgagatttttggtgaaagcaactcattaatcaagagataattcacagccgggtgccgtggctctcatctgtaatcccagtgctttgggagactgaggtgggaggactgcttgaggtcaggagtttaagaccagcctgggcaacacgatgagacccctatctctacaaaaatttaaaaaattagctgggcacgttggtgcctagagttccagttcttcgggaggctgagttggaaggatcgtttgagcctggaaagtcagggctgcagtgagctataatcacgccactgcagtccagcttgcgcaacagagcaagacttcaaaaaaaaaaaaaaaaaaaaaaggattctactggtctatgtagcagaagttagttcagtccatctgatgtccttaaagctatgctcacaagaatgctatctccatgtgggcagggagttttgcctgccttgttcactcagaaaaagttgttgactgacagactatcctgcaggcagaacttgcatcctgaaagtgccaatcatcagttgaaaagttaatctcagttccttttgtagttatttcttaagtacagtgtgccaggcgctgtggtatacacagggctagatagggtcctgtgaccatgctcagggaattttcagtctcacgtaggaggtaaggcaggtatgtaagtcaggttgccccctagagttgtgcatttacaccctgcattccatatatgacagtcctgcataagaccttgttatgaaagaatcaggaatgatggcttcaggcatagctggatccaggagcagaaatcatgtcatcagagcctttctctctctctctttctttctctgtttcttctgtattggcctcattgttaagcttgttttctccatgtggcagcactagacttgcattctgttgcggttgcataaaaaacgaacaaacaaacaaaacaaaaccaggaaagactcttattagcctggctcgggttatgtaccaatcactttcacttggaggaaatggtgctagaatcatgccagttacctgcccacccaggaaaccagggagatggtcatttccaccagaaacacaggaactgaactattagaccaggggttggcaaacttttaaaggaccaaataataaatatattagcctcatgggccatatggtctctgttgcagctacttatttctaccattgttatgcagaagcagctgtagacagtaaatgaacgggcacgtctgtgtttcattaacacttcatttacaaaatcaggcagtgaatttggctttgtagtttgcagacccctgtaatagacaattggggtattgtgactagaggggaggaaattgactagagaggtgggcagacatcaccccttgtagagataggcgtctcattgtgttgcccaggctggtcttaaactcctgacctcaagcagtcctcccacctcagcctcccaaagcactgggattacaggtgagagccgcggcaaccggctgtgaattatcgcttgattaatgagttgctttcaccaaaaatctcaactccacacacacctgtaggattcaggccacaactacatctaggaagagctgggggagcctgcaagcttaggctgagttgggtcttgaatgccagagtaaggaatctggattttcttcgataccagcggagacccctcacaggtgttgagtatcacagccaggtacctgtttgccccctagatatccaaatgttgagtgttacagatgcacagcctaggttctcatgttgagctggaggacagttgcgttttgccttgactgctgctaaccctttgtgtaagcaggggcaagggggctgggaccctctgggaagatacttcttttggttttgccactagtagagaagtggactggaactttcccagcagggccaatacaccacaaaattccaggtggcgccattcacatggtggccattatgaatggcaccacctagggttgtgcagtctacagactgaacagctgtgcgtgacctttgtgcttcccaggatgaatgaggtctcttctgaacactgggcagtgcttaatacagttttgacactcagcataatgcaaaacggtaagagaaatctgtaaagggaagatggctaaatcattcagaaagtaaatttacagctttgtgttttccccagatttatttaccaagtgggcagctgcatgttatcaaacagacaggaagtagaaatgtcaagtgtatgggctttgcagtgctgttcctactgcgacatttgagccaagaaccatgggacttgcctctgtggactggcatgtggcagatgagctggccctttgtgtgtgctctgcgtgtgatcttggggatacattaattgtcacatatgctcatgtcctgtgggcccccaacttttcttggctgggctgggctggtgaagattaggaaaactgcacaatctgactggtgctttttgaagcaatgccagaaagaccctcattgaagagtgaattaaagtcaagttggttgattgtttgtcgaacaagcacatattgaatgcctacaatgtgcagagctcttacagccctctcagagatgccccacttggcgattgggagtgtgtgccatttagagtttagcattactggcttagctggggttctgccttttaacagtggtgcaaattagttattcatccttctcccaacctgtattagtttgttttctgttgtgataaagggatacccaagactgggtaaggttcaagtgattctcctttttttttttttgagacggagtctagctctgtcgcccaggctggagtgcagtggtgcaatctcgctcactgcaagctctgcctcccgggttcatgccattctcttgcctcagcctcccgagtagctgggactacaggcgtccgccaccacgcccggctaattttttgtattttttttagtagagatggggtttcaccgtgttagctaggatggtctcgatgtcctgacctcgtgatccacccgcctcagcctcccaaaatgctgggattacagacgtgagccaccgtgcccgcccagtttcaagtgattctcatgcctcagcctcccaagtagctgggactgcaagtgcatgccaccacgtcaggttaatttttgtacttttaatagagatggggtttcgccatgtcggccgggttggtctcgaacccctgacctcaagtgatccacccacctcagcctcccaaagtcctgggattacaggcatgagccaccatgcctagctcctgataacacttttgaagaacatcagatcagtctcatctcatgcacaggatgcgtctgaagacctcacagcattcaaaacttgcatttttcaagacgagttttcccataggctttaatgtcaagttggggggtatgcagcctcggaaggcataaatctacagccattatggcttaggggcatgttattagcagcatcagtctcaaaacgacgtcaccagctgtttttctacctcctttcccatccctccagcatccttacctagctttatgagtattgggggggatcttaaagccaccccagttgtaataatatcaactaagctgggcatggaggcatgcatctatagtcccagctactcaagaggctgagggcgggaggatcactttgagcccaggagttcgagtccagcctgggcaacatagtgagaccctgtttcttaaaaaaaaaaacaatgaattgatcgatcaatcaataaaaaatgtttcaagatgtattgagcagctgtttactacgcaaccaagcactgttctaagcattttatttatttttgagacagggtctcttgctgtgtcacccaggctggagtacagtggcacaatcatagcccactgcagcctcaaactcctgggctcaagcagtcctcccgccttagcctcccaagtaactatgactacaaacacagaccaccatgcccagctaatttaaaaaatttttttgtagaaacagagttctgccatgttgcccaggctgatctcaaactttcgagctcaagtgatcctcctgccttagcttcccaaagtttacattcttcacaaagtttacagctgtgggccaccatgcccagccaactttcagtagagatgggtcctgctgtgttgcccaggctggtctcaaactcctggcctcaagggatcctcctgccttggcctcccaaaatgctgggattatatgtgtgagccaccatgctcggcctctacgcattttatatgtgttaactcattcagtgtttacaaccaccgtataatgtgggtactgtcaatatttccactttacagatggggaaatggaggtacgggaggggaaagggacttgccccagcacccagccagggttcagccccagcggttctctcaatgactaccctgtatcgtcttccttctccatccacccctacatcctccttcccaatttctcagcagttctttattgggagcacattgagtcacggctgctgctaatttatagctatttctttacatcaaacttctgttcagaaattgttgattttcagggccatttctgccgcgcaaagaacccttgagtgacattgttataggatatttttaaaagatcttaaattatagacacagtgactgttgaaataccaggacacttgtaaccaaaagcagaagttcggatgcctataaaacaaccagacggttcactccaggctggagattgacaggtctcgggcttcactgagccaaagtggcgcccccacgtggcgacagcttaactttacacagctctccacccaaccccagctttgaaattatgcaagttcttgacagattgttctaaattggggaatatttcttcatatcatttcacattttgtgcaaaaagcaagacgttgttgagagtttaaggacaccacactgtcaaatttgcattattccatgttgcataaaatgagtctgagagcggtttcatcgtgggtcttaacccccaagggacagagatgccagtccccggggattcctggacagctactgagacctcttcccttcctataggatggccagccggagcagtgacaaggatggtgactctgtccacacggccagcgaagtcccgctgaccccacggaccaattccccggatggaagacgctcgtcctcagacacatccaagtctacatacagcctgacgcggaggatttcgagtaagtatctctgctttacctttctgggggccctggctggctttcccagacactctcccacggagagtcatgaagggcagtgttattgctgggggagggcggcagagtgggatgacagtccaggagacagggcgagagagagataatgacggtgtgacagaggagggcatcacacctgattgctgctgagtttaatcaaaagcaatcattttgattgatttttgctttattaattttaagtttgattgaattggctgaattgattaacattgtcagtgtatatcatttcagattctgaaagatgagtgtggctatattatatagcagggtttgtcaattctggtgactttgggagctaggcgggttgcatcagtggccaagtgcagaggttgcatagagataaacattgcctgagtgcagtgacaaatggcagctgccgctctgtctggagagttactagggcagggtggggacttcggtcaattgaaaagcaaatgccccattgaaagggggccagggtgtctgctactcagctctggccaatggtagctgtatgggattgggggctccgtattgtctgatctttgtaaagagatattggcaatctgggtttttttatgtgaaacattcttactttcaagcctaaacaaaatgtatgtgtggccatcaaatttgaccacccaatttgtccactctgttgtgtggcgtatgtgtttgaccaaacagcatgatttgggtgaggaggaaaaaggaggacaaacacccagaggctcccaacctccttctgctccacaaaagtatctctgctctgtgtgaaccgatgtctgaaattcaccagacagagggaaaagcttcaaatgcatgaaacaaatccattcaggtggagatcattggtgtccaacctttcctggggatagagggaaaagaaaaaagtagaaaaaaaaagagttcaagggcatgaaatagtgaaacagagggagcactggatttctttaggcctcagtcttcccatttgtaaaatgagagggctggtctagagctgcgctgtctggtataacaatcactagacacacgtagctgttgagcacgtaaatggtgtgagactgaatcttactgatgttctgtaagtgcaaaatacatactggactttcaggacagtgaggaaaaaaaaaaaaaaagtctgggcgcggtggctcatgcctgtaatcccagcactttgggaggccgaggcgggaggatcacctgaggtcaggacttcgagaccagcctggctaacatggtgaaaccccatctctactaaaaatacaaaattagacgggcatggtagcgcatgcctgtaatcccagctacctgggaggctgaggcaggagaatcggttgaacccgggaggtggaggttgcagtgagccgagattgcaccactacactccagctcaggcaacaaaaatgaaactctgtctcaaaaaaaaaaaaaaaaagagagagaggatttaaagtatctcactaaaatatttttatattggttccatgttgaaatgagtatacattggatatagtgggttaaataaaataaaatattaaaattaattttgcaggctgggcgcggtggctcacgcctgtaatcccagcactttgggaggccgaggcaggcagatagcttgaggccaggagttcaagaccatcctggccaacatgatgaaattccatctctattaaaaatgcaaaaatgggccaggtgtggtggtatacaactgtagtcccagctacttgagaggctgagccatgagattcacttgcacctggaaggtggaggttgcagtgagccgagatccgccactgcactccagcctggacgatagagcaagactctgtctcaaaataaataaataaaattaaatgaattttgcccttttatttgcatattttaaaagtcgtggctgccagaacattttaagttacatgtgtggcttgcatttctggcttgcgttatctttctatggacagtgtgggcctaggtaatttctaagtctcatgcccagctctgaacacaggttatctccatttagcatacatctatcagagtacctcccatgcctctggcaaatgtctcataaagacaactgtttgggcaattagcaagaatgccatgagctcattgctagaagagagggatgtgcaaaggttggaataatgaacttgggatcaatgcattctgctggttcatggaagggagagaggcggcccgtaagcggtgaggtttgaatatgaaccttgaagaagtacagtcgttcccatttattggtctgtgcctacgggcacattctgtgccatgctcttttcatgccctggctcagtgaatcttcaccacattctttgaggtaggtgccgttattgactctattttactgatgggaaaacagagtcccagagagtcaaaagaatatgcccggagtcacatggctcactggtaatgagtacacgagtagtgagtaagtggctgagatggaattccacccaggcactctggtcccagagctcactctcttaaagtggagacatcgtaggataatggttagagccagactctggggtcagctagaccagcctgacccctggctcctacacttgcaagtgtgtgaccttcagaaagttacttaaagcttctgtttcctcgtctataaagtggggataatagtaattatctaataattcaaggggatgtgaagattgtgattgcacatatgcgatgatgtagtgtacacagtccattagagcagtgcctggcacttagctgctgtgatgatggcaaggtgtcaatagtgccaccaaactatctgtcacagaatcagtgagtatttcagagtgtggagaaagatggcaaaggtcattctgaagcagagtaaacaatgcaagaatctgcttacctgcaaagtggcccaggtctgccccgtatgtggctgtcttcattgttatttctggtggctctcaggtcttgagtcaagacgtcccagctctccactcatcgatattaaacccatcgagtttggcgttctcagcgccaagaaggagcccatccaaccttcggtgctcagacggacctataaccccgacgactatttcaggaagttcgaaccccacctgtactccctcgactccaacagcgacgatgtggactctctgacagacgaggagatcctgtccaagtaccagctgggcatgctgcacttcagcactcagtacgacctgctgcacaaccacctcaccgtgcgcgtgatcgaggccagggacctgccacctcccatctcccacgatggctcgcgccaggacatggcgcactccaacccctacgtcaagatctgtctcctgccagaccagaagaactcaaagcagaccggggtcaaacgcaagacccagaagcccgtgtttgaggagcgctacaccttcgagatccccttcctggaggcccagaggaggaccctgctcctgaccgtggtggattttgataagttctcccgccactgtgtcattgggaaagtttctgtgcctttgtgtgaagttgacctggtcaagggcgggcactggtggaaggcgctgattcccagttctcaggtaagggatgggtttgtggtgtttcctcctgggagcttttttaaaaagtgattatttttattttattttactgtttaaaaggcttttttggatttttaaaactttttattttgaaataatttttgactcacaagaggttgcaaaaatagcagagagttcctgtgtcctcttgatccagcatgatagcatcttacgcaaccaggaaatagatgttggtaactaacctagagcttactcagatttcagtagtttttttttttttttgagacgctctgtcacccaggctggagcgccgtggcgtgatcttggctcactgcaaactccacctcccaggttcacgccattctcctgcctcagcctcctgagtagctgggactataggcgcccgccaccacgccctgctaatttttttgtattttttttttttttagtagagatgaggttttccgtgttatccaggatggtctcgatctcctgacctcaagatttcactactttttacatgcatcactcatgtgtgtgtctttctgtgaaaatttatcacatgtatagattcctgtaaccaccaccactctggaagccttttttaaatcatcgatgctgagttatttaataaggagaatgattgcacagggtataaagctatcaatcattttgactttcagaaattgatttttttggggaaaaagtgaaggctggaaaacaggatgatgcatggatgtttttcaggccaactgttagattggcttccttccccctgtccagcccagggaaatgtggttggctgctcgggaagccacccacggaccaggctgtgtctccagtcggctgttgtgcattcctgcatattagagggtaactgtctacccattgtaggtagaaggatgtggggagcccaaggaaaggaaaagacccagccactccttcctccttccctcccttcccgcttctctcttcactccctccctcccttccttccctgctaccctcttccctccctttctccctccttcccctccttcctccctcccctcctcccctcttcccttccttctctccctgtcctgtgggatggctgttgtaggaacagggacgggagatggagaaacaggggagggggctttggccaccatgaggtcaataagagctgccttccaggccaggcgcagtggcttacgcctgtaatcccagcactttgggaggctgaggcaggagaatcacttgagtctaggcgttcaagaccagcctgggcaacacagtgagaccccgtctctacaaaaaacaatttaaaaattagctaggcatggtagtgcacatctgtaattctagctacttgggaggctgaggcaggaggatctcttgagcccagagtttgaggctgcagtgagctatgatcgagccactgcactcactccagctcactccagcctggttgacagagtgagaccctgtctctttaaaaaaaaaaaaaagttgcctttccatggggagccatttggtgacgtgcagagaaaatggccttgggtccaagctgcaaccttcctcccagtgcctagctgttgctgggcccctgtgctccctcacctcacttcaggtgaagtggaggtagtaacaccacctcgcagcgagggcctggcgggtggcgagcactccacagtggcaggcccagttgtcaggagacgacgtcttctattgtgaacccattcagagtgagcctgtaatgtgtcgccttccagtgcactaagcggtaatcacacctggtgaatatctaattgggcagacaagaggcggggagtgttcccgttcactcctgatgctgagccttcttgcggtagaggagctggcgtctcctcagctgagttaatctcggggctgccatctcctttccatttgaagagggacagccgggcctgtttcaggtcactgcgggagcaggtttctcccagacaagggctggctcctcacccttgatagagctgcaggccgtgccttagtttcatggggacctttcagtgcctctatgaattaaaagtattcatgtgtatagggctgagtgcaatggctcacacctgtaatcccagcactttgggaggttgaggtgggaggatggcttgagcccaacagttcgagaccagcctgggcaacatagtgacaccctatttctacaaaacattaaaaaaaaaaaaattagccaggcatggtggcatgtgcctgtagtcccagctactcgggaggctgaggcaggaggattgctcgagcccgggagtttgaggctgcagtgagctatgattgcgccgatgcactccagcctggtcaatagagtgaggccttgtctctaaaaaaataaaataacaaaagtgtgtataaagttgaaatattgcaggcaggtcaactgctctaattgctcatctgatttatactctggtccgtcacactcgggcttccagccttgctggtgctattatcagccaagtagtggctgttaatgcctttaattgtgggtttgactcaagtcctggctgtaaatgccttctgtctctcattcctgatgatgatgagtgttttcttagtactgttcaaaatagtttttggaagcgtcatctggacccttaagatatttgttttccttctcttctcccctctttattattctttgttttttcttctctgatctgctcatttcttcattctgtttctcttgaggtcctattatgtgcccggcatttctagttggattaataaaaatgaataccataccattcctagcagcaggaaacttccagtctagtgggaaagacagtttggtaaacagcaagccatgatgcagtgtgctgcatgcggtaataaatgggcaatcaggactcatttgcttttttaaaattattattattattttttatttttagaaacagggtcttgctcagtcgcccaggctggaatgcagtggtgcaatcacagctcactgcagccccaaactcctgggctcaagagatcctcccacctcagcctcccgagtagctgggactacagttgtatgccgctgcacctggttagtttttaaaaaaatacattttgcagagatggggatttcgctatgttgcctaggctggtctccaactcctagtctcaagcgatcctctcacctcggcctcctaaagtttgctgggattattggcatgagctactgagccctgccaagactcgtttcattaagaatgatcaaaattggccttgaaaatgggcaccatattgaagactgaggtaccatctctcagtaattccaatatagcaggtcttgcaccgttggagtggatcaggatgtatttgctcacatttggggagcaaatgtatttcaggcagaagttttaaatgatggaatccactaggaaggtcatgctatatgagtatttcactttgaataccagactcatactagtgaggcaagaagctcacacaaagagaggcactggagactctgactgagggaagaatatgctcctattgcccagctaatgcttactctggaaattatgctctttgagtggaaaagccggttgtcttacatgctgccaacaatcatatgaaaaagagctcatcactgatcattagagaaatgcaaatcaacactacaatgagataccatctcataccagtcagaatggctactattaaaaagtccaaaataacagatgctggtgaggttatagagaaaaaggaacgcttatacactgttggtgggagtgtaaattagttcagccatagtggaagacagtgtcgcaattcctcaaagacctaaagacagaaatacctttccacccagcaatctcattactgggcatatacccaaaggaatataaattgttctattataaagacacatgcatgcgttatgttcattgcagcactattcacaatagcaaaggcatggaatcgacctaaatgtccatcagtgatagactggataaagaaaatgtggtacatatataccatggaatactatgcagtcatgaaaaagaacaagatcatgtcctttgcaagaacatggatggagctggaggccattatcctcagcaaactaacacaggaatggaaaaccaaatactccgtgttctcacttgtaagtgggagctaaatgctgagaacacatggacacagagaggggaacaacacacagtggggcctttcacagaatggagggtgggaggagggagaggatcaggaaaaacaactaatgggtactaggcttaatacctgggtgatgaaataatctatacaacaatctgccatgacacgagtttacctatgtaacaaacctgcacttatactcctgaacttaaaataaaagttaaaaaaaattcagttctgcaaaaaaaaaaaaaaaaaaaaaaaaagaaagaaagaaacaagctggttgtctttggccgggttccctagaagcagagccagagatggcgatttggatgtagatttgttgccagggctgccataacagagtactacaaattgagtggcttaaagcaacaaaaatttattgtctcacaggcctggaggcaaggagtcccagatcaaggcattagcagagtcgtgttccctctgaaacctggaggggaagccttccttgctccttcctcgcttctggtggttgcaggcagtccttggaattcctcagctggagctgcattgctctaatccctgttctaacgtcacatggacatttttgccctgtgtgtgtctgtgtctcttctcttctttttttttgagatgagtgctgctctgtcgcccaggctggagtgcagtggtgcgatctcggttcactgcaagctccgcctcccgggttcacgccattctcctggctcagcctcccgagttgctgggactacaggcgcccaccaccacgcccggctaatttttcgtaattttagtagagatggggtttcaccgtgttagccaggatgttctcaatctcctgacctcatgatccacctgcctcggcctcccatagtgctgggattacaggcgtgagccacgtcttttctcttcttataaggacaccggacaccagtcatattgaattaggacttaccctactccagtgtgacctcatcttaatttaaataacgacatatacaatgacccaatttccaaataaggtcccattctgagatactgggggttaggacctcaacctgtcttttttttttttttttttctgagacagggtcttgctctgtcacccaggctggattgcagtcgtgtaatcatggctcaatgcagccttgaactcctgggctcaagcaatcctcctacctcagcctttcaagtggctgggaccatgtggtaccacaagtgtacaccaacatgctcagataattttttattttttgtagagatggagtctcattattttgcccaggttggtcttaaaccactgggttcaagcgatcctcctgccttgggggcctcaagtgctgggattaaagacgtgagccagaatagctgccctgattgctgatttttgttagaagctaacatctgccttcaccaaattggttggttggtcagtggaatggaaaggagaggaggcagttgtgtaatggtatataagacaaagctattcaatttcttacttttagcctattctaatggtgtgtggagttgagctaatgcttagtgtctagttatactttcttcttggaaaacccatgtggaagatgaatgggtggcttatggggccagcatataggcacctcctggttcagggcagaacatcccatctgtcttgcaacatcctacctgactgcatctttgatcttggcattcaggaaactggcagctaatggagctatggcatttttggggtctcagtgataaggttggctggaagataatgaaaataagaccatacagtgagtaggacaaggggattgacatagacatgaaattacactggctatttagagaaattctgctcattggaatggattgaaagccattgaaatctgtgtaggctcaactcttttaaaaaattattagctaacatggtgaaaccccgtctctactaaaaatacaaaaaattagtgaggtgtggtggcgggcacctataatcccagctacttggaaggctgaggcaggagaaatgcttgaacatgggaggtggagatagcagtgagctgatatcgtgccattgcactctggcctgggcagcaagagtgaaactccgtctcgaaatttaaaaaaaaattattagttttaattgtgggaaaatacacacaccatgaaatttaccgtcttaaccatttttgcctgtacagttcagtggcattaagtacattcacattgttgtgcaaccatcaccaccatccctctccagaactcttgcaaaactgaaaccctacacccattaatcaataactccccatctccctctccccgcagcccctgacaaccatcattctactttctatgaatctgacagttctaggtacctcatataagtagagtcatagattatttttcctgtggctggcttgtttcactcaggataatgtcttcaaagttcatctgtgttgtagcatgagtcagaatttccttcctttctaaggctgaactgaataatattcctgtgtgtgtgtgtgtgtgtgtgtgtgtgtgtgtgtgtgtgtcatattttgttgattcattcatcctttaatggacacttggattgcctccacccaatggacaacggtgcctccaccgtttggctattataaataatactgctatgaacatgggtgtgcagatggctttttgaccaactgtgtgtgtgtttttttaagccataaaaatatccacgatgtaggtggttcattttctcttgagttcatgtggtttggggaaggaagaacaagggcagtggagagattagatgccccgtggccatgcgggaacctttctgagcattaggaaggatacacagttgtatccatttggcaaggctcatccagtattcctaaagtttgtgcatttcactgcatataagtttaatctaaaaaaaaaaacccaccataaacaaacactgaactctggttaatgatatgccgaaatgtgtatgggtgccatggtctgaagttttcctaaattcgtatgttgaaatcctaaccccgaggggatggtattcagacggcctttggggcggtggttaggccatgagggcagagctgttatcaatgagattagcgcccttgtaaagaggctccagagagttgccttgccccttcctccatgtggggcaaaaccaaaaggtcccatctatgaggaatggtcctcagcagacatgaaatcagctggtggcttgatcttggacttcccagcctccagaagggtgagaaataaattctgttgttttcaagccgcccagttgatagtatttttgttacagcagcctgaatggactaagacagtgaggaagtgtaccaatgtcagccacttattttgaaatgcattcaaaaaagatagagtgatagatggatagggaagaagcaaatagagcatattttaaatataattacagcagtgttaatatcagtaactgttcatttcagaatctaggggatgtatctaagagtgtgcactgtacagttcttttgttttgttttgttttgtttttttgtttttgagactgtgtctcactttgtcgccagactggagtgtagtggcatgatctcggctcactgcaacctctgcctctcgggttcaagtgattctcctgccccagcctctcaagttgctgggactacaggcgcccgccaccacacccagttaattttttgtatttttagtagagatggggtttcaccatgttagccaggatggtctcaatcttctgacctcgtgatctgcccatcttggctcccaaagtgttgggattacaggcgcgagccaccgcgcggccgcactgtacaattctttaagcctctctgtatttgaaagtgttgagagtgtaagccatggccaggcacggtgcctcacatctgtaattccagcaccttgggagacttaggagggaggatcacttgaggccaggagttcgaaatcagcctggccaacatggtgaaatcccatctctactttttagtacaaaaattagctgggtgtggtggcgcatgcctgtagtcctggctactcgggaagctgaggcatgagaatcgcttgaatccgggagacagaggctgcagtgagccaagatcgcaccactgcactccagtctggacagcagagcgagaccctgtctcatagaaaaaaaaagaaatgtagactgggtgtggtggctcatgcctaaaatcccaacactttgggaagccaagtgggaggactgcttgaggccaggagttcgagaccagcctgggcaacatgaagagatcctgtttctacaggaaaaagggagagagagaacattcataagaaaacgttgaggagcaaaagacaagaagtaccggtgccagttaggaaaaattgctgtggtctcttaggtgagaggtggtgatgatctggaccctgtgtaaggtggcggtgacaaaggatgcaatttgaaagcagaggctttgatgcccagaagcagcctttgaggaaactataaacaaggaatatcaaacagtgcggggtcggttgggggtggtcaagtgggtttctactactgtgatggttctcttactttaacaagcatccgaatcaggtgggagctgtgactgtggagcctccagacctcagcctccctaattctgatttcccacatcctgggtgagaggcccatgaatctgcacttgagccaatgggctgggagattctaatgtaggtaaactctggacctcgttccgagaaacactgggtggctggtggaaggtgaaaggtgaaaggtggaaggtggaaagggttcagacatttgacctgcccagacttgcatctaaaacttggctctgccacttaggggttggatgttgtgatggtttcataagctggcgtggcaagtgctgtgcccagctgcttcagtggccggtgtgcagggtgcacccaatacagggctgccactaagatgatattttatggagctgttctgggaaggagtagattcaagttaaagtgctcttaggcattcatgtagaagagttctaagtcatgtcaggatgcagtatcttacattacaaagccagattgcccactgaagaggaatgtttgatttgggcctagaagaagaaaatatgtttagtcaaaagtgatatttgcacactggaatgctggatatttatgtttccgaacattgcttcaacctgagatttgcactgcccaaatgaaagccttttagacctttgatgtctagaattcagagcattgtggcttaggaagcagagtctgtgcgtgtggccactaactaagctgtcttctccagtgtctgctgacacctgggaaagtcatctgttatcctaggttgggttcctctaaagacaaagatttgagtgcttgcattttctttaggaagtgatgctgagaaacaccagaagagaagggaggaaatgagaccaataaagtgtctcaccactgtgggcaactagagcttaatcatactggggaactcagtgtagcctaccccaggggtgagggagctggggtatttattcaccgagttcccatgtggcatgggttgcaggatgctcccaaaagtccttaattccctgggcacctccaacttgccttgtgggcacaagtaggaaagactccactggccgagagacctaagcagagatgtggggctgacagtaggcagtcaacgaagtctgttctggtcggggctaggtgctgtggtgggcacctttagcgttgctacactttctcttgccaccctcagggctcagaatgcggcatcttccatgcctcaccttctccctgcttgccatctctcttcatttcccctttcctctgatcaggaaggtgcaatgcagatgaataagaacattggctaagcggaaacctgtaaagaaaaagatgccagtccccccttcttatagaggtgcccaatctttgcaagtgactgtcttggcagccatgtctctctctgagcttttgggggaacggatgacaaagaaaatctatagctgtctccattcagccaatgctccctctcccctcaccccttttacatgtagatactgggagtagggaggattgtgaatgctgcagaaccacctctccgcctctcacaaatcacagagagagatgttgtgtcccagatgttgctggcccctgggtacttctccttggtcttcactttgggccagggcagcgtgttctggggtcaacaggaaacaccctcactcagcatcctgctgatgtacaggaaaaggtttggccagcccctggggcagagtaaataccccatagacatcagcatttgttgttatttcgtgttggtatctttatttatttatgtattagagacagggtctcacgctgtcactgaggctggagtgcaggggtgcgatcatgatcactgcagcctcaaactcctgggctcaagtgatcctcccgcctcagccttccaaggagcttggaccacaggtgtgaattaccacgcccagctaatttttaaattattttttgtagtgacggagtcttgctgtgttgcccaggctggtctcgaactcctgacctcaagcaatcctcctgccttggcctcccgaagtcctgagattgcagatgtgagccatcacgcccagccaaataaaagggttctagtcttggtatctttggcacttggaaggaactcaatagatgtcttctgaattgaacaaatattgtgtaaagagcatgcgcttttgagttagactgatctggttaaaagttccagcttcaccatttcccagctgtgtgaacttgggtctaactcctaggctgtacattagggataataattcttactgcatggggatctgggggagcactgtgaggatagtgatggtggcaagctctcacatagcactcactgtgcactgggcattctgctaagtgcttttattgtgtgaactattattatcaccccattttatagatgaagaaactgaggcatgcattaagcaacccatccaagccacagaactgggacttgaacccatgtcatccagctgcagaggctgtactctcagccagtctcctccatggcactgcttctttcatttatttatttaacctttttttaaaaatcaaaacaaaacaaaacaaaccttttttttttttttttaagagattggggagtgggggcaggcatggtggctcacacctgtaatcccaccactttgagaggctgaggcaggcagatcacctgaggtcaggagttcaagaccagcctggccaacatggtgaaacctcatctttactaaaaatacaaaaattagctgggcatggtggtgggcgcctctaatcctacctagctactcaggaggctgaagcaggagaatcgcttgaacccgagaagtggaggttacagtgagctgagatcacaccactgcactccagccagggtgaaggagcaagactccatctcactcctgtaatcctagcactttgggaggccaaggcggggggattatgtgagtcaggagttcaagaccagcccagagaaaaagagtgagatccccatctctacaaaaaatttaaaacttagcctgatgtggtgatgcacatccacattcgcagcaactcgggaggctaaggtgggaggatcacttgagcatgggaggtggaggctgctgtgagctatgatggcaacactgcactccagcctgggtgacagagccggaccctgtctcaaaagaaaaaacccaccaaaaccaaaaagactcaaaaaaaagatggagtcatgctatatatgctgaataaatggtgattgggaacccaggtgccagaaggtcacagggagggacccaaggaaggaatgtaccaagaaggagggagattgagacacaattgaggttgaaaccagaaggaattggcttagaatctgatttgtgcttcaatttatactactttggtcataaccatgccccaggcagacagtcgatagaagaattttttttttttttttaaagacagaatcttgctctgttgcccacgctggagtgcaatggcatgatctcggctcactgcaacctccgcctcccgatttcaagcatttctcctgcctcagcctcctgagtagctgggattacaggcatgcaccaccacacccggttaatttttgtatttttagtagagacaaggtttcaccatgttggccgggctggtctcgaactcctgacctcatgtgatccacccgccttggcctcccaaagtgttgggattacagatgtgagccaccagcacccagctgaagaattttttttttttaaatgactttattttttagggtggtctcaggtttataggaaaattgagaggaagggacaaaggtttcccatatacaccctgcctccacacgtatgtaatctcctttgttatcagcatctcctaccagaatggtacatttgttacaactggtaaacctacactgacacatcattattaccccaaatccataatttacattaggatgctctgggcgttgtgcattctgtgggtttggacaaatgtataatgacatgggtccaccattgtaatgtcatccagaataatttctctgggacttttttttaagccaaaatacttgataatttgaggtgctcagagttatgtgctcattggacccggtacttggaaactgcctggagttacaaacgcccccagcctgccttgtcagctgccaaaaactgcctggtaaacagagacaccttactgcattttgtattttgagatcactcaccacctggcaccttaccagacgaggctcttgacaaggcaaatgccaggtttcttaatgagaaatccctctttaacttgccctgagctgctgtcagccttgaccctctccgtagagtcctggcctttgtgtgtatgttaaaaattgtttcccgctcaggttctgatgaacagcagtgttttggcaatgttgtgtggccagagctgggcccaggccagcgtcttacaaagcagccattaactagaagtttcttttcatgcggtccttcatgttttcttcctccttaaatagaaattgattcattttagatatcaacatgcacttttttgtttgttttgatttgtttttttagagacagggcctctaaagaaagaggacaggttttttttgttttgttttgtttgtttgtttgtttgttattattattattttttttgagacagggtctcactctgttgcccagaatggagtgcagtggtgcagtaagagttcactgcagcttctacctccttggctcaagcaatcctcctgcctcagcctcctgagtagctgggaccacagtcgtgagccaccatgcatggctaatttgctcagccgtgttgctcaggctggtcttgagcttctagctcaagcaatccacctgccttggtctcccaaagtgcaaggattacaggcatgaaccaccgtgacctgcctcaacatggacttttgattcctagttataaaatgaactagaagaggaaccagaggtgatttggaccaactttcctgttatgtagactagagaactgcagcacagagaggttgagtgacttgtccaatgtcacatggctttcaggcaggaggtcttgctgtactgtaccaaaactcactgtactaacttctttaccccacaagggaggcgatctcatgatagctaagagcatagaccctggagtcatacagacttggcttcaagtcttggctttgccatccactagaggtgtaggctcaggtgagttacttgtcatctctaagcctcaatttccttgtctgtaaatggggattgtgtggtgtgctggctcccagagccaattgttaagttttcaggaattttgcaagctggttaacatcatcacattgatagctggagaccagctattgtatatgaaattgaccagtgtcataagttagaacctctgcccaccccaccccgagaactaaagatttaccaccacaacactgatctcagtagtacttaatttaaagggttattgttggcagtcagacttagtcgttatgaagcatgaagatcagagagcctggcacatgtttacagtggtgccatatcatggtcaaaagcacagacctagtgtcctttaattttcaggtcagagccagcccaaccacttccagcagtgtgaccttgggtaattactcaatgtcattgataataatcattgctagctctccctgagtacttaccatggatcaattactgttctaagggctttcatttccacccaggggctattattattcccattttacagttaaagaaactcaggcacagaaagtttgagtaacttacccaaggccatgaagttagtgaatggaggagactgtgttccattgaacatgaggaggctgtgttaactgttgccctgtctcactgaggctcagcttgttggaaaatggcaagaataacaaccccaacatcaagggtcatagttaggctgtcatctgataatgcctgtggcatgaggcaaggcctcaattaatgtgaacttcctactggtaacactaaataaatgtcaatgtcagtcattaccatgataattacattgaagtcttcctagccaagaaatttcaactcagtttgattgaggagaataaagtaacaattgtcatccaagcaattcatcaacttcatctgggattgagaagatgaggctatgagctctgagtggtcggtgggtgggtggcccaggtttctggtggtaagctccagagagaacatgaagggctttgttcagagagggagaagctgaatgtttccaagggctgtcaacattgattgaccacatatgtatggcaggttctgggctataaacatgagtgagagcctggtccctgcccttgagactctcatcgtagtgtaataagtatgagcatttgtcagatgtgtcctgtttcctgacactgtgcaaagtgttttctatatgtggtcccactgcagactcactcaagcctgtgaggtatggtgaccctccttcattctacacaggaggaaactgaggtcctggttaatgagtgactcacctaaagttattcacggaatggtggagcttggacatgaacttaaacagggtgacttctgagctcaatattcttattacctgaagttgcctttgaaaaacagtcatggccctcaatatctatcatattaggctgggcacagtggctcacacctgtaaacccagctctttgggaggccaaggcaggaggatgcttgaggccaggaatccaaaccagcctgggcaacaaatcaagaccccttctctataaaataaaaaattaaccaggcatgttggtgcacacctatagtcctagttacttgagaggctgaggcaggtagatcccctgagcccaggagttcaaggctgcagtgagttatgattgcaccactgtacttccaacctgagtgacagagcaagaccctgtctcaagaaaacaaacaaacaaacaaaaaaggatgatattgatatctatgaatgagaaaactaatggggctataagaaaaacgtctttacatttcaagcagcagcaaaactgactttggcagcttaaggaaatgacgaataagatgatgataggctcatttattaaatctgggctgtaagcccttcacatatattaacccatttaattcccacaacaaccatatgattggtgtctttactatccctattgtacagataagaaaactgaggccagggagttaggaaacttgcccacagtcatccagttagtaaatggcagagccaggactcatgtcagactctctaggagaaagagagggtggtattgaaaggatagtggagcagtttatagtatcaaaagaggtgaatcaccaaggcctcaggttagctctgggaatctctagactaggtccccatggacttctctctagagcagtgcagcccaacaaatacaacatgggctgcatattaatgggccatatacatgggcccatatacatgaccctaactttaaattcctaggaaacacattttagaaactaaaaagaaataggtgaaatttactgtaatattattttatggaacccgatacatccaaagtgttatcatttccacaagtcatcaaagtaaaatattattgatgtgaaattttacattcatttttcacactaaatggttgaatccattgcctcttgtacattcacagcacatctcaatttgcactagccctattcaagtgtgcagcagccataagaggcaaggggttcctctactgacagcaaagccttagaaggatcagattaattgacttggctccatggactgaggtcactccctcttcatttctctccattcgagttttatttctaggtgatagagaatccagtgggtttcccccttgggcagggtgtccagggcaggtgcagtcagatatgtctagatggtgtggctagaaggtgttcgatcttgacttttactacagctggtgttggcctcaagatgtgtgtaaacccagtgttgagagaaagaagagaagaggagaggtgagattgagggtttagtttcaaaagagcttctgtccctgctggtgaccctgtgaccttccttagggaattaaactgggcaaccgagaggtgatgtgtggaggcagaaggtcggatcagctcatcaacatcactggaataaa

SEQ ID NO: 750 - DNA, 8807 bp, Homo sapiens
  source 1..8807: mol_type = other DNA
aaaggcggggaagggcgtggtgggaagctctgtccgcggtcgcgccagctgttccccgggcagggtcgcctctaggtgctcacctccgccacttcgccatggcgggtcctggcccgggcgcggtgctggagtccccccggcagctgctgggccgcgtgcgcttcttggcagaggcagcgcggagcctccgcgccgggcggccgctgccagcagcgctggctttcgtgccgcgagaggtgctctacaagctttacaaggacccagcgggaccgtcgcgcgtgcttctgccggtgtgggaggcagagggcctggggctgcgtgtgggcgccgcaggcccagcccccggtaccggctccgggcccctccgcgccgcccgcgacagcattgagctccggcgcggcgcctgcgtgcgcaccacgggcgaggagctgtgcaatggccacgggctctgggtgaagctgacaaaggtgcgctcttccctgcccaggacccggtaaaagacccctggggccagagaaacctctggctgtttgccttttctcccctgtattgagttggcattgcgttcggcgccctttgccctgggctgggcacgacaggcggctgggcagttccctgacggctgtccccatcctacgcgtcccggcaggagcagctggcagagcacctgggcgactgcgggctgcaggaaggctggctgctggtgtgccgcccggcggagggcggagcccgcctggtacccatcgacactcccaaccacctccagcggcagcagcagctctttggcgtggattatcggccggtgctcaggtactgcacttgaaggagcggggctggctgtcagaaggccgggccaggagggcttgggaacacttcagccacagcctggggtgggtgggatactggagcggaggcagggttaagagcagaaaggggcgggacgtgaagggggctcggagggagactgggagatagagccctgaagaaggctacacggcatggaggtagtgtcttgctgaccgctgatgtctccccatcccactccctactctgtgcccacaggtgggaacaggtggtggacctgacatactcacatcgcctgggatcgagacctcagccggcagaggcatacgcagaagctgtacaaaggctactgtgagtgagctggaatggggtggggaggaaggagctctgcgtctgggcccagtctaattaggggcttggggttgcttagctatgtacccccgacatggacctacgagtgcgacgaggacctgatccacttcttgtatgaccacctgggcaaggaggatgagaacctgggtagcgtgaagcagtatgtggagagcatagacgtttcctcctacacggtgggtgctggggctcctcccaccccaggcaagatatagtcacacccctcaaggctagatccagaaagaacccccacctgcaggccaggactaaaacagggtccccacaggccacactcagttcagctccccatcttggacgtctataggaccccttacatacccagcggccccctatcccataccagttgcctgttagcccaacttcactatgctttctctctggtgctcctggcccagagcacaagcccagtgcagggagggagggtaactgctgacttcacgtctctgcccctccccaggaggagttcaacgtgtcctgcctgacagacagcaatgccgatacctactgggagagcgatgggtcccagtgccaacactgggtacggcttactatgaagaagggcaccattgtcaagtaagtaggctctgggcaggacagggtgggtgggctatgtccctgtgggttcacaaagactcatattcacactctgacccttcaggaagctgctactcacagtggataccacagatgacaactttatgccaaagcgggtggtggtctatgggggtgaaggggacaacctgaagaagctgagtgacgtgagcattgacgagtgagcacgctggcctggggagggaagtagggcatgttccaagcctagcccagcttgaaagcctaagtttgagtgagactccagcagtctctgaaggcctgaggcaggaggtatctgaagtgcttcacactcatctcctcaggaccctcatcggggatgtctgtgtcctggaggacatgaccgtccacctcccgatcatcgagatccgcatcgtggagtgccgaggtgaggtttaaggctataaggagggaaagagagcccggcgtggagatgggggcaaacagagagtgtgtgtggagagaagaggatgggcttggagttggggtgaaggcgatgctgaactaactccaggatttggagctttggggcctgagccagctgggacatgccaggtataggcctgccttaaagccatacaggtggttgggctcacctggaagaggaactgagttgggaccctcaggcatcccagcattctagtggaagacagaggaatcagcaggaatagatcaatcagaatcaggtgatagaaggtgatcccgaaggtcccgagtttctaggggctaacggtgacacaaggctgagcgttcaaggagccggtcccaggtctgagggccaaggaggcagcaggtgctgtaaatgaccttactctgaccccttcccccagatgatgggattgatgttcgtctccgaggggtcaagatcaagtcatctagacagcgggaactagggttgaatgcagacctgttccagccaactagtctggtgcgatatccacgcctagaaggcaccgaccctgaagtactgtaccgcagagctgtcctcctgcagaggtggctgtggtcctggacctatgggcccttcccttcccccaacattgagccttgtgtgtctgcatggaggaggttcccaaggtctcatagtataagctgttcaagggtcagagaagcccccaggtcctgccttttcctgtccctttatgttggggagttgggggtgttacaggtatgctaaactctttagctgcagtctatctacccatgccagattcatcaagatcctcgatagtgtcctgcaccacctggtacctgcctgggaccacacactgggcaccttcagtgagattaaggtgagccgacccagccagtgctggtcttggcatttccccttcctgctcacgtagttgttcattccttagcagagttcctaaaatctactctagggcaagacctttgctgggtctgggaacataggaagaaagccagaacaaatggtccaaatttagtgtttgggaggctgttccccagcctccttggtattccagagtgtgtggaatacccaagggctattgacagcacaggcagggcagtttgcgtgaaaggtacatacagggagttaccagcagctcaagatgtcttgagaaaagtgtgccagtaggtgtgagtatgacagagggatgagggtggaaggatgtgggcaggagacaggtcctggttgcagagggccctgtgggccaggctgtgaagcaaggactttgtcccagggtagtggagctgttggaaaggtaaggaaggtaatgacagtattagatttttttgttttagaaagctctccctggtggctgaactaaggaggggactggagacaaagacagggatggactagacttgaactgaaacggtggaattggatacaggcagaggggaaagttccagggcctggacggaggctgactgcccactcattcctgctctggccacctctcctcactagcaagtgaagcagttcctactgctgtcccgccagcggccaggcctggtggctcagtgcctgcgtgactctgagagcagcaagcccagcttcatgccacgcctatacatcaaccgccgtcttgccatggaacaccgtgcctgcccctctcgagaccctgcctgcaagaatgcagtcttcacccaggtctgcaccacctagggtccgactgagataggatcagtcaagggccaagggggctaggccaagagggacctgaacaagttcttggggcaagtatagggccaggtcttgctttcctatgactcctttcctccttgcctccaggtatatgaaggcctcaagccctctgacaaatatgaaaagcccctggactacaggtatggcatgagagtgagggacttactcgggacacctgtttgtgcacacaaacacacacaaacacacacacacacacacacacacacacacaactgctcgaggcacccctcgccatgactgcttttcccaggtggtctctgagctgatgaattgtgctgcacctggccccacataatgacaaatctgcccacgttttttgcaggtggcccatgcgctatgaccagtggtgggagtgtaaatttattgcagaaggcatcattgaccaaggtgaggccctgagggaggatctcaagggtcctgcttgctgccctatcaaagtggtagaggcttttcaccagctaatgatgatgggggacctattcattaccccattatgggagctgggctcttgagtgcccagctgagggcatctgtcatttcagggggtggtttccgggacagcctggcagatatgtcagaagagctgtgccctagctcagcggatacccccgtgcccctgcccttctttgtacgcacagccaaccaggtaatctccgtttccatctctgcaaacctcccaggtgccagattgagctagaaagggggcagaggagggggccagattgagctagaaagggggcaggcacagtggctcacgcctgtaatcccagcactttgggaagccgaggcgggcagatcacgaggtcaggagttcaagaccagcctggccaatgaagtgaagccccatctctataaaaataaaaaattagccgggcgtggtggcacgcgcctgtagtcccagctacatgggaggctgaagcaggcgactcgcttgaacccaggagacggaggttgcagtgagccgagatcacgccactgcactccagcctgggtgacacagtgagactctgtctcaaaaaaaaaaaaaaatagaaatagggcagaggagggactgagttgctcagggcaacctctgggcagacagggagaggaggagccactgtgcatttgaagggatcatttagtggaaaatgttcccagtggaaaatgttcagggaagtctttgggccaggaaaatagggtgtatctcatgccacactcacagctctgtctctggggcagggcaatggcactggtgaggctcgggacatgtatgtacccaacccctcctgccgagactttgccaagtatgaatggatcggacagctgatgggggctgcccttcggggtaaggagttcctggtgagtagccttatccacacccccgtccgatcagccctggcccttggaaggaaaggccagccaaacctgggcagctcagggtgagaagacagtggggagtgtttgtcacacaggtcctggccctgcctggttttgtgtggaagcagctttctggtgaggaggtgagctggagcaaggacttcccagctgtggactctgtgctggtgagtaggacctggaaccagtgtttcctctgcccagcccctaaaggttggtcctccctaaggctgttctgtaccttgttctttcaccacacacaagatccctctccaatccatccactcccatggcttcaactactgtctgtagactcgtgacccctaaaatcctgacctctagccccagcctctcctaagcctggggccatatatgtatctgtaccctcgacgtttgccccaagatggcatctcaggctcagtgtgttctttatcttctccgaagactactcccctctagggctcctgcctcagaagggcaccatgtcccactcctccccatcccaaagcccacagggccatccttcaccccttcttctccctcgccaccatattcttaagtcttcctctgtaatctgtttgcttttcctgtctcactactgtctccctgcctggttgaggacacctttcctccttagctaatcacttactaaaaagctggtgtccctgtctccgttcttacccgtttggtctccatgcagccacagtaattcatttcactctccttatttaaactcattgatggctcggccctgggcttaggatagaatgcagaatctgtaaaggccttacgtgaaccctgtgtctccagccacttggttcacattcaggctccagccacacagtttccttaggccttttgctctttccagctttctccaagatgttctctctcctaacttcccttatgtcccagccatcatttgggtctcagctgagacaccattttccacaggatgcctcctctggcctccaaggctggttaggtgttgtcttgatgcttttacagctcttgtactgacaccctcattccctgctgcctccatggggactgccttgcctggctgtctctgcttccctgtgagcatcttgtggaaagacagggactatctccacagtgaaaaggttacctccctgcctctctccaacccctaggtgaagctcctggaagtgatggaaggaatggacaaggagacgtttgagttcaagtttgggaaggaactaacattcaccactgtactgagtgaccaacaggtggtggagctgatccctgggggtgcaggcatcgtcgtgggatatggggaccgttctcgtttcatccaactggtccagaaggcacggctagaggagagcaaggagcaggtagtacccagaggctagtagagcagagagctttggcccctcctgagccccagctcctgggacccagaacacagcctgtaagccaccagtactccaagaactctggcccccaccattcctcagtgccacctttctgctgctaaaaggccacagtgatgccccccagtgtgaggcgggaggtgtgccctcttccccagccaagcctttttacccactccccaggtggcagctatgcaggcaggtctgctgaaggtggtaccacaggctgtgctggacttgctgacctggcaagagttggagaagaaagtgtgtggggatccagaggtcactgtggatgctctgcgcaagctcagtgagttccccaaggcagggcagggcagggcagcacagcacagcacaggggttggggctcaaggactgggcaagatgagacccaagaatgaatgctggccttgtctccaccagcccggtttgaggacttcgagccatctgactcgcgggtgcagtatttctgggaggcactgaacaacttcaccaacggtcagtggaggagggcagggtgacacctgggtttggactctgctgctgagttgcagaggcagggtagaagttgtagaccctccctcaccatccatgcaggcactgatttccttctccctccagaggaccggagccgcttcctgcgctttgtcacgggccgcagtcgcctgccagcacggatctacatctacccagacaagctggggtgagtgctggagggaggcctgaaggtgccatggccgccttctgtcctccctccccacacacgtacatgtgccccaacacatcttcctgacctatggtccctcaatgcccccagctacgagaccacagacgcgctgcccgagtcttccacttgctccagcaccctcttcctgccacactatgccaggtgggttttttcctaggctcgatttggggcccaggggaccccatcacccctggtagcgatgtagggacctgaccaagtccccattcccacagtgccaaggtatgcgaggagaagctccgctatgcggcctacaactgcgtggccatcgacactgacatgagcccttgggaggagtgaggcgtgccgccggctgtgggaccagcaagactgcacgtgtccctcttggccttgcccagggcgaagacaccttccctgccctggtttggctgacgtgctcagcaaaaccccatgtgccctgctcctgtgtgcagttggggtaggggcagctggcatggtcaggtaacactagtggcccagccccgcagacccacaagccctacccgtgctggggcttgcttcccgaggtatttcacctcttaagagggaatcttccacaagcccagcacaagctgccaggcctgagctacttgaagggggccatctaggtccccaacccatggactttgcctccattttcagctccgccttttttctcctattttctctctggctttcttcagccatgactcacaactaaaaacataaaacactggaggttagtggaggcccctccccaagcagggagcctgggatgggcagggagtgatagccaaactccttggtcacctgctccaagaaggaagcagtagctgagcacctgccctcacattctgctcttttcccctctccctccataccagagatgtggtgagctctgttcttctaccaacccagtctcaacacacaaagtgccaccaccttccctgactcagaacccacatccactcaatgtgaactctactaccacgacctccccatattcctcacttctccatcacctccagcctgactccctgtctgccctttcacccccaagattttgcacaggttaaggccagttatggcctttttgaaatctgtaatagctcccctttccccaactctaaagcctagaccttaaacctgttcctagagctatgcacacccctgccccagtttaccgttcctccctcagggcctccgtgacactccatgaaaagaagttcttgcataccggaaagttgaataaatggatgaattc

SEQ ID NO: 751 - DNA, 15157 bp, Homo sapiens
  source 1..15157: mol_type = other DNA
actgcgcggctccccgcgccgcagctgggcaccagcagcaccacggaccgcccctgtgctcgcccgacggcgccccgcggcgctttaagagacggcctggcagcccagccccagccgcccagaccggcgagaccagcctgcgggagcagccccatggcgggtaagcgagcctcgcctccccagcccagccccggcccctctgcgacccttccagcacttgcctccgccccgccgcccccgctggggtgcagcgcctgccctgcccggcctcggcgcgctcttggaggggcactgggatggagtagacgctgaggcccgctcttcgcggtcagttgcggcttaggaggtgtggggggtccggccttctcaccaccccacccagtgcagatccctgagacctgaatgccccgcggccgcacgtcaccctaagggaggcacctttttggcccgccccaggtggccagcggttggaacccagcgtctgagcacccccggggcgaagcctcctaggtcccgcaaatgcggacgtgtgagggccagcagcaacggggtcttgcccccttttcctccccacctcgtccaccgcgtcgcaccaactcccctaagcgcgtgctcaccttgatagagggctaggggagggagcgggtgttagagaagagtccagccttgcagcaggttccagggccccagagggtagaggtttgattgcagaccagggggaaggtacctttcagggctttccttaactgactgcgtccacaccccagctcccctcctggcctcaacaggagcccaggggatatggaggttctggtgagggcaggtttgatttctactcagaagcgcaaggaaatggcttctttaagccagaatcccaagggcagggccagctgttttccaaggaaaactagaaggttctgcccagggctctcagaccctggggtaaacggcttctcctctgagagctggcggaacctagccagcagcatccctcccggaacccatccccagcaggcctgctcctatcactcctgagatcaaacccagaggcagggttgctgccctagttctgccccagcaggccagggctgtgagggagagtggctttcccaggcaggcatcatagtactggtggtctctgcccccagagcagctggccctggtgattgggggcaccatcggggggctgctgctgctgctgttgatcggggcaagctgctgtctgtggagaaggttctgtgccaccctcacctatgaggagctgcctgggacaccagccatggccaccacagctgcctccagtgggcagcgggacaggccctgccagccgcatgctaggacccaactgagcaggtgaggcaggatgtggggccaagtgcgcccctggaatttccctcagggtggggtcgaaaaggaaagttctgtttatgggggtgcctcttctatgctgcttcggtgctgggagctatcacaaagaaaccccagaaacctcacatcagctattaggcaggtgttatgaaacccatgttccaggtgaggaatctgaggctcagtgcacataagcaacaggtccagagaacacaattagtaagtggcagaacaggaatccaaacccagactggctgacactgtcaggtgctgtgttccttcttcaaatcccactgctgtgtgtgtgtgtgtgtgtgtgtgtgtgtgtgtgtgtgcgtgtgtgtgtgtgtgtgttgcctggtatgggcccagaaaatggtgccctggcctcctcctggctcccgatggcttttcttcctccagcccctggtgctcaaccgtcctggctgagcgctctgagaccacaccattgacttgccacctacatgttgtctccctgactctggacaggccaccagctgtgccattcgtggtgcccccaacccttcaaggccgagattgggtgcccctgcacagtggagagtgggccgatgccccatgggacccctgcccggcatcagagctgctgcctcacacctccagcggcggccttggtgagtgtccttgccagggctgcccagaggtcagggtctgctcgggtggccccatctgctttcaccagcttggctccggaacacaacctgaaccagccagggatgccagggaccacccagggaccactctttctgggtgctttcatttatgaagtgcttgctgcaccccatgagggtaagatatggccttgggtgctgatttggagtgagacctcaccatgactctgagggggaggaattatcaccccattttacatagtcttaactgaggctgtaagcaacagattggaattggaacccaggcacgccatgtacagaacttgtgctgggtcccactctaggatgatgggttggttgaccaagaggacagaatggtaggggctgcaaacacagctttctgccacctctttgccctgaagatctaccaagagaccatcacaggaaccacccaataatcaccttggcccttctaatttgaagaggaagaagaaaggcaatgttttatcgctgagtcattccctagacgccatggaagggggctaggccaggtgatgggcactgtgtccttgaaacaggtcctgacctccaaggatgggggccaatcccagggggcaggactctgctggatccccagcctggccatgcaatgccttcatggtgagaaggcttcttggaggagctgcaccagagagaggggatgtgtttagcctggtgaggagagtggggcagatgtggtcaggctagctgaggctcagcagagacggatgggccaggatggggatgggtgcccagagcttgccactgtctcccatgcccctgccttcctctggcctgccagccctcccaccctctgtcataggagatgcatgtatggtgggggccatcaacccagagctgtacaagttcccggaggacaaaagtgagaccgacttccccgacggctgcctggggcggctgtggttctcggtggaatatgagcaggaggctgagcggctgctggtgggcttgatcaaggcacagcacctgcaagccccctcggagacctgcagccccctggtgaagctctacctgctgcccgatgagcggcgcttcctccaatccaagaccaaacgcaaaacctccaacccgcagtttgacgagcacttcatctttcaggtacagcctctggagcaggcagggtctggtgccctccgcgttgctgggaaggtgcagacctacaggagagcccagcctcctgtaccagccagggctctgcagcccccgggacccttgatgccaccagctctgctttacctagtctgctaggttaaggcctataggagctgatccctgatagaggggcaggggagagatttggtgagtggtgaccagaagcctgggcttccctgtcctgactacctggaagagagtgggtgaaaacacaattttagagcaactactgaatgccaggccctggcctatggggctcaggggaattatcccaaaggcctgaagcactatggggtttctggcaagtttatctaaggaaggcaaaagacaggcctcagcgtgaatgcagaagcttcctgtgctgtcagaggccagcgcggggcccgagtgccctcacagggtaggtgtggtgccttgctgcactctgggctggccggcttagggtctggaggtggagagtctattggggcaccgagccagtttcacaggggcctgggagccttagcaggtgactgggggcccttaggggaaggagtcatcgagacctgccaagaggccttggacaaacatgttctcaagagctgggtggcaagctagccaagaggtgaggttcagccagtcagctttcaggaggagtgtgactgcggaggccagggccatcacttgtgccttccgccctggctgagagctgggaagaggggtgccatcgggcctggtcccgggccgtctttctgaggccagggctgtgagaattcacaggtgaatcgctcttctcaagacatcagaatccaaggctgcagccttgctgacgtgcgacacgtcatgcttgcaggctaatttttcttagctcatcacttccccactctatctcgccccagcttgatccaatccctctgtggaaaagggagaaggggaaagaaaagaaaatcaatattaatgggccatctgctggaggtcagacactgtgattggggttttacaaccagagaggaagacccataatccccatttcacaggcgaggaggccaaatctcagggaggagagagctggcatgcccagctctgacagcagagacaggccggtgccctgggctcctgggcctttgctacagtgcagggtggtggcggagccacactcaccgtgcagccatgtcacttggtgctccggttaaacggcagattccaattcatgaatctgggctggggcccaagatcctgcatttctaacagggctccaagtggtggtagacgctacaggtcctcggaccacactctgtgtaccaaggtcctggcacctacccccactttccaggggtacacggctctgctgctgagaagggtcccctgaaaatgcctaggtttgggggatgtgggtccctggttgagacacccgttcccaaaagcacccatgtccagaataacaagtcacaccatcccatcccctacccccacgcctgactctggctggtgtccttgtcccccccaggtgtccagcaagaccatcacccagagggtgctgaagttctccgtctaccacgtggacaggcagaggaagcaccagctcctgggccaggtgctcttccccttgaagaatgagaccctagtgggggactgccggcgtgtcatctggagagacctggaggccgagagcctggaggtatggtcaaggtcaccatgcctatgccactgagcatcagctggcaggtgtgcacagggcccagcacctgctggcggcatcagccctcagcatcctgcacaccaccctacaacagtgactcagggaggagggcccaggccccaagcagcatgggacaggtgggaacggacctgcccctgggcagggagggcctgcttgaggtcctgttgtcacactggccatcagaccccctggagcaacctgaaatatccacatttggattcttatctaggttagacagctgtgagagatgacaccacaaatggtccagcccagggaaatgtttcctccagcccaccacccccaggaaggccccagctggctcagacctgggtgtgactccttagctctggtccacaggactgcacaagccccttaaactctccagaccacagttgccccatccttaaaatggcagtggaactcaaaggggaccatgcgggtgtgtcgcatggaccgctaggaggaagcgggaggctctctgggggttctgtgaccccttcagcacttgccagagtaacagggtggggtgcttccatcttggcctccccagcccccctcggagtttggcgacctccagttctgcctcagctacaacgactacctgagccgcctgacggtggttgtgctgcgtgccaagggcctccggctccaggaggacagaggcattgtcagtgagttcctccctttcctcctggggaaggtcccacccaccgagcttacagcctggggctacagtccaacctcatccctgaccatccagtttctgcttgcatacacctatcatggagcgctcactacctcacaagacgtgctgtccctcggtcgacagttctggtgcaggaagcctcttcctgtgttgaacccaaagctgcatctccttggcctcccctacggagggttctaacccagccgcaataccaggccctgcccctcctgtttcccgaggcagcgtcttggctctttgaactgtcctgcctgcctccacctccacctttccatcagcggcatgggtccagttcctccagggtgaggcccgcacctccctccccacaggggaagagcccccgactcaatgggcactgatgcttggcctcccagaatacaggagctgcagaaggggaggccttggttcaccccacatgtcccaccccatttgggctcaccccacacatcccacccatcccagtgaggtggtggtcagccacctgtttgtgttcacatctggggtcaccgtaagccaggcaggatccagaccttccactgtgactctgaccctcacccaccaaatcttagccctctgtacaaggtgtttaaggggccccagggggcctgggggcccagtgagcagccccccaacagggagggacaggcttgcggtgctaggctctggtaaaccagggcctgcaggagccgtgggtactttcctgatgcaaagaggaaggaaaaggaagggagcggagccccgcctgggccgcagggcagtgcactcctcagccggcttcctctggtcacgccggcggggccgcagcactgtgtgaggggtggggccctggcacctagcttgggcacgtgccctcctagccggacctcccacaggcaggggctctgctcccacctgcctctgccagcccactagtgctcaccgttccctaggtgtgtttgtcaaagtgtctctgatgaaccacaacaagtttgtcaagtgcaagaagacttcagctgtgctgggctccatcaaccctgtgtacaatgagaccttcagcttcaaggccgatgccaccgagctggataccgctagcctcagcctgactgtggtgcagaacatggaaggggacagtaaggccacaccctaccctgggctgctgggatggggaccacgaggggctgccgagtgttcaggcagagtgagtgcctcctgtcctgacctcagaaggagctgtacgagctccctccctggttaaggaaactagtgctcagaaaggctgaaatattgcccaaggcctgggtttcaggcccagctttagtccagttgagctctgtctgtggcaccctagaaacaggttaagcagccgggcatgctggctcacatctgtaatcccagcaccttgggaggccaaggtgggtggatcacttgagctcaggagttcaagaccagcctggccaacatggtgaaacgctcatctctactaaaaatacaataattagctgggcgtggtggcacacccctgtaatcccagctacttgggaggttgaggtgggaggatctcttgaacccaggaggcgaggctgctgaatctgtcaaaaaaaaaaaaaaaaaaaaaagggccgggcacggtggctcacacctgtaatcccagcactttggaaggccgaggtaggcagatcacgaggtcaggagatcgagaccgtcctggctaacacagtgaaaccacgtctctactaaaaatacaaaaaattagctgggtgtggtggctggtgcctgtagtcccagctacttgggaggctgaggcaggagaatggcatgagcctgggaggcggagcttgcagtgagccgagatcgcaccactgcattccagcctgggcaacagagcgagacttcgtctcaaaaaaaaaaaaagaggttggctgggtgcggtggctcacgcctataatcctagcactttgggagaccgagaggggtggatcacgacgtcaagagatcaagaccatcctggccaacatagtaaaattccgtctgtactaaaaatacaaaagttagctaggcgtggtggtgcacgcctgtaggcccaactactcgggaggctgaagcagaagaatcacttgaacccgggaggcagaggttgcagtgagccaagatcttgcaactgcactccagcctgtccacagagcgagactctgtcaaaaaaaaaaaaaagaaaagaaaagaaaaagaaagaggttaagcaatggcctctgctgccctctcctggagcaaatcacccgagagagtgggaggggccaggcctgccaccagcccagggacctggtgctctgaccttcctcgtgccctccagatgagactttggggttctgggcgagttctgtcagccagctcccacactgccccacaccccagcacccactgccactctggggaaacagagccatcaggccgtggctggccacatggcctggacttaagacccttctccacggtggccagtgaatgttactgctgaatgtactctcggatggccgaggccttctttctagaggggccctttcctccctcagctctttggcataaggtagacttaatacggccccacagaagggtgtggggcagagctggtggccctcaaggagagagtctttcagggctctccttcctcccaatctcccagggggagaagcagcccttccagctgcagagcaaaggcagggcccctttggggcctgtcagctcccactcagagaggaggggagttgctacttcctcctggggaggaggagggaggaaaggaggtcactggggacggggcttctgtgctcaggagcacaccggtgctctccctcccctgcagagagccagcagctgggccgagtggtggtgggcccctacatgtacacccgcggcagagagctggagcactgggacgagatgctcagcaagcccaaggagctggtgaagcgctggcatgcgctctgccgcaccacggagccctgacccttcgcccagcaccgcggttccgctttgggagccgaccatcctcgcagttgcatgtgacagccacagccacacgcatggacgtttcatccaacagctccccgagctgccagccagcccgagccaggaggacgtgagtgctgatatgcaggagagaagaggggacaaagaagccctggcccggtcagcggctctggccatacagccttccgacacactccctcctccttatctgcggggctgcctgggctcggaatcccggctcctggtcctcacagccctgatttggaccagaatctcagatgctcagaagaaagatcctgtttagtgatgacccagctctacctgctgaatggacctgcagggtaaacttgggtgcctccatctgggaaagctgatgatgtgttcatgcagtcgatgaccctcactgctttttcagccagggtttctctgccttctgcctggcagagaaaacacactgctatggggaaaatcacagggagggcgctgtgaccagcgcactcaggcaccaagtgtcggcatggctcactgtgctgggtgaaggcctccccgagcattaggtcctccacggggctgtgtcaaatgccctcccacattgtgtcaagtctgcccatggcccaccctccccacagtccaaaaccacacagccctggttctccagctgttctgctgctgtttctgtgctctccctgattaagagcattcagttcctgggctctccctttgagcaggaaatggtgaaagcatgtggctatggtatagcccacagggctgagattgctgtgttgcagtattgatgtaaaatttgttaagaaggaagtacccacagatcactgccatcaactccccagaagttgcactcaagctagtgagcagcccttgtgcttgtcacagttactgtaacaggtagtgtgtatttgcacctggcatcgtgcagcctgcacgtcaacacgttgttttgtgtaactagaacagcacatggaaccactatctctttctcttttttccttctttttcttttttttttttttattttaattttttgagacggagtttccctcttgtcacccaggctggagtgcaatggcgtgatctcggctcactgcaccctccacctcccaggttcaagcgattctcctgcctcagcctcccaagtagctgggattactggcgcccgccaccatgcctggctaattttttttatttttagtagagacggaattttaccatgttggctaggctggtctcaaattcctggcctcaggtgatccacctgcctcagcctcccaaagtgctgggattacaggcatgagtcaccgcacccagcccgaccagtatctttttcttatgcagtgaaacaactttagcaaaagaggcaatgaatgttatactgagtttctacctctttaactccacctccaatttctgtcaatctacaaacacaagtgtcgcctcgcagtgtttcgtatgaacagaatatcttgtgtttgctttttgtcacttatttcacttgcacattttttgtttgtttgtttgtttgtttgtttgttttttgagatggagtcttgctctgtcgcccaggctggagtgcggtggcgcgatctaggcttactgcaagctccgcctcccgggtttacttacaccactgtcctgcctcagcctccggagtagctgggactacagacacctgccaccacgccctgctaattttttgtattttcaagtagagacggggtttcactgtgttagccaggatggtctcgatctcctgacctcatgatctacccgcctcggcctcccaaagtgctgggattacaggcgtgagccaccacgcccggcccacttgcacattttcaaagtagtccgcaaagctgtagtttctaatagcttcatagctcacatgtaataggggttctctgtgtgtttatagagcaggctactacagtggaactgtttctgtttcatctgacatccggatagatgccagccacccccacattccaaggtgagatttctgactagcagtgacttttctagggccgcttggaaaagttgataagtatccttttctgcaggacagagtagactggtatctctgactcatccctgaaaaatctaaatggcaagagactagctggctctctgctctgatggggaggaggttgttgtttgggctgttctctacagacatagtcagggcaaaaagcatacgcatgcttcccatggaccagagaaacctggcctgggttgtctcaaatcctgtccacaaggcaactccagaagaaagaagccctttacatttccataaaacactttagaatcagctagtcaatttccacaaaataaagtgctagaatttgattggatttaattgattatgtagaacaatttgggggccatttgacatcattaaaatattcaatcttcctattcattaacatggtatatctcttcactttaagtcttttgtatgtttctcagaactatttttgtggttttcagtaaagtgttcttgcacatccttcaatagatttattcttagacgttttatatttgtttatggctagtatatacagattctgttgctacaaaactatgttgaccttgttatccagtgagaggctttgtgacattcatttaaattgtaataatttgcagattatttttgtataatcatgtcctctgtgaatgacagttttatttcttcctttcttaatctttatgccttatttagctcttgccaaactgcagtggctgagcaattggacaagataaagaaataaaagtgatccagatcataaagaaagaagtaaaactatatctgcacatgacataatcttgtctatggaaaatcctaaggaatccacacacaaaaaaactactagagctaataagtttggcaaggttgcaagatataaaattggtatacaaattgcagtggctaggacctccagcagaatgctgactataagtagtgatagtgggtattcttgtctcatcctcaatctcaggggtggtgggtgtggcatgtggagagttgtcaatattcaccatgaagtttgatggttgttataggatttttaatgtactcattaacatatattctcaagctgttaaaaagatttttttaattacaaataaggttaaatttctctcaaatacttactctgcaccttttgaaataattttatttttctcctttattctttggatgtgatgacttatactaattgactgttgaatgtcaaaccaaacttaacattcttgtaatagaaaccagcagggtgtgtacacttttgtgtgtgtgcgcaggtttatacacataaacacaacaatacttggacttatttatttaaaatttagatttattagagggagcatggccataaaataaaataaaataaaatttagatttaagtcgagctcagtggctcacatctattatccccgcactttggaaggccaaggcaggtagattgtctaagctcaggaatttgagaccaacgtggtgaaactcggtctctacaaaaaccacaaaaattagccaggtatggtgtcacatgcctgttgtcccagctacttggagggctggggcaggagtattgcgtgagcccgggaggttaaggctgaagtgagtcatgttcacgccactgcactacagcttggataacaaagcgagactctgtctccaaaaataaaataagtaaataaataaataaataaaatttagatcaatttgctgttatatttttatataaactatgtttatgacataagtataaacaaaaaaataaaataagtaaataaataaataaaatttagattaatttgctgttatatttttatataagctatgtttatgacagactttcctataatattcttatcataatgttcttgcacttgaaagaatgtgcattctgcagttgtgtgcaggtgttatgtgtatttcaactgggtcaagtttgttaatcaggttggtcaaattatctacatctttactgatatttttgtctgtttttctataaattactgagagaggataaagcctgccactgttattatgaatttgtttatttctcctttgagttttgttagtttttgttttatgcatttagaggttgtgttattaggctcatacccatttaaaattgacgttttctggtagagtgaacctttattatgtgaaatggctttctctaccactcacaatggtatttttttcactttcccccttatttttgaattttcaatgttcttataatgatgtcatgtctcttgaatagagttgttttaatcaagtctgtcaaattttgtcttttgtgtatttcgtgaatttacatttattgtaattactgatatagttgtgttcataaataccatcttactacttgtttccatttgtcttacccatttttgtttttattttttcttttctgttgctttctttctgattatttttttaattccgtttccccccctaccattggttctacttacacattcttttataatttctttagtggtttcctccacagattacaacttctgtacattattataatctaatacaaattttactttttattgtttcccagacaatgctatgatctcacaatactcaatctctatttacctccattctactcttgcatgtatattattattactcattttaatttcacatatattttacacctaacgagacattattattattgctatgtgcagtcaatattcatttgtattcacccacatattcactctgtttttttttattatttcctgcatttctgtgattctatcatagatcagttttcttctacctgaagaattccctttagtattttttgtgtatgcacatctgctggcagcaaattttctcaggtttttttgtgtttttttgtttgcttgtttttgagacagggtctcactctgtcgcccaggctggagtgcagtggcatgatcatggttcactgtagcctcaacctcctaggttcaagcagtcctcccacctcagcctcccgagtagcgggactacaggcaggcaccaccatacctggctaattcttttgtattttttgtagagaagggatttcaccatgttgctcaggctggtctcaaactccagagctcaaacagtctgcctgctttgacctcccaaaggactgggattacaggccacctcacccagcctttctcagtttttgaatagaaacatctatttcaaattcatttttaagtatattttgtgaatataggattacaggttgacacttttttctttgaggaacttcagaatggcactccattatcttctcacttccatcatttctgttgacaagtgattttcagtgctattgtttctcctttgagagtaatgtgtcagtaacatgcactggctcacgcccgtcatcccagcacccttgagcccaggagttcaaaaccagcccaggcaacagagcaagatcccccccctctacaaaagaaaatgacaggagggaggcaggaaggaggagagagggagggaggggaaaagaaaaaagaaaagaagaaatgtgtccctcctacctgcctctagctgcttttactgttttttccttgtctttcatttgcagcagtttaagtatagtgtgcctgggttgggtgcggtggctcacgcctataatcccagcagtttgggaggccaaggccagtggatcacctgaggtcagaagtttgagaccaacctggccaacatggtgaaaccccgtctccactaaaaaatccaaaaattagccaggcatggtggcgcgtgcctgtaatcccagctattcgggagactgaggcaggagaatcgcttgaccttggggaggcggaggttgcagtgagctgagatcgcgcgccaccgtactccagcctgggtgacaaagaaaaactccgtctcaaaaaataataataaaaaaaaagtatagtgtgcctggatgcagttttgtttttatttatcctgcttggggatcataaagctttatcagttttggaaagttctcaggctatatttatttaactgttccttctgccccatcttcctcccttctaagactccagttacatatgtgttaggcctgttcaccacctcccacaagtatcttatgttctttgctgtattttccatactctttgtctctgttcttcagcttagagtttttattctgtcctatattacagttcaaagaatgttccttctgctaaatctaattgtagttaacccatatgctaagtagttaatttcaattattgtatttttaagttttaaatttccatttcattctttcttatagattccagttctttgatgaaagtctctattccacccatcaagtctgtgtctgataacaccaatatctgggtcattagtggctccgttttgttgtgtctgttttcccctccttcctgttttgtggtgtgtttgatcacttattgttgaatgctaaccattataataaattttagtggctccaggaa

SEQ ID NO: 752 - DNA, 3211 bp, Homo sapiens
  source 1..3211: mol_type = other DNA
tggccaggcaggcaggtggacgagtccaggcagcggctgagtcagtgtgtgtggaatgttctggccgctcccagctgcaccctgcccctacctgccaccacctcaccttcatcctcaggcgctgcggccctgagcccctgccaggaatgcacctttagcccaggcctgctcagtgagctccgccgacagccagccctgctcctcccgccatgaccctgcagacccctctgggcttccaagttcctgggggctgcagtgaacatgctccacctgcatggctggcaaaccatggtgggccccagctgtggtgcgtgctggggtagaggcaaggaagtgatgggaccgcagagatgagacccccagggatgagatgggacccccaggcagggcccagggtccagggcccaggagagagaagcagggagggagagagcttcctggtggaggacgcatcctacagtgggggcaagggtgctctgaggtccggtgaaggcagggactaggctgcccaggccctgcctgcttggctggggctgggggctgctgggaggtggctgggaggctgggcctgggcagctaagctggagctttggccagggtccagagcctccctcccttcagcttcctgctgcacagaaccctcgcccctggccaccccgtgctgcctccttgccctggcagacccagcactggctgctgctagtcagatggggtagcgggcaggggccggaggggccaccctcccagctgacccagcctcctgggccgcttcttccaaaccagcagggtagaaagatggggcacccaccagtctctcccagtgccccggccccagctggcaccacagctatacctgggcttattccagaccttgtcgccgggaccccctgtgagttgtgggattcccaagaggggtgtggggataacccagccaagtgggggctgcagctgtccacagatgcactcagcctggcctctaccccagggccccgctgggctctcattgccggcgcccttgccgcgggcgtcctcctcgtctcctgcctcctctgtgctgcctgctgctgctgccgccgccacaggaagaagcccagggacaaggagtccgtgggtctgggcagtgcccgcggcaccaccaccacccacctggtgaggagcggctccttgctcactcagtccagagagggcttgaaatccaggctccagagcccagggcagcgaggcgagttcagccccagggatggtttaacccccacagaggcagggcgttgaggaccttcctggcagggaaagtgggtgaacagaggtgagaaggaggccatgcaacaggggctgccccatgggcccgagggagccacagcgggttcttgaggaaggcagggggtaccccagatgccacgttttgggtgggtttggccggtctcacagagcgaagccgacgatttgtgcctgttgggtggcctggcctggaggcggggggtcttgacccatgtcatgcaagggctgcccgggagcccagggctctgatgaggcatgatgtcagcaccacctgccccttgtcccaactcactccaggtgcaacctgatgtggatggcctggagtccagcccgggggatgctcagcaatgggggtgcctgcagctctccctggagttcgactttggaagccaggaggtgaagggccccgctgcgcaggaccagcggttctgcgagtttccggaaagggtgacgggggaagggcagaccccatgccctgggtggtggggagctgacagggcaggggcccttggctgagcccaccccgctggctcccagatcagggtgggcctgaggcaggcagccgacctgaggcctgggggcaccgtggacccctatgcccgggtcagcgtctccacccaggccggacacagacatgagacaaaagtgcaccgaggcacgctctgccccgtgtttgacgagacctgctgcttccacgtgagtcagggatggtcggctgggtgggcctggacggctggatgggcctgggctgggtgggcctgggcagctgggtgggcctgggcagctgggtgggcctgagctagggcagcagggcctggctcacgccgctgcctcagatcccgcaggcggagctgccaggggccaccctgcaggtgcagcttttcaacttcaagcgcttctcggggcatgagcccctgggtgagctccgtctgccactgggcaccgtggatctgcagcatgttctggagcactggtacctgctgggcccgccggctgccactcaggtgaggtgctggtcaccaggccacagcccaaggcagagctggcagggaccctgccctatgggccatcggaaagacaggcctgatgggcagcattttcgggggtctgagccccaactcggccagaatcaccctcccgggctgaagcccctcttgctgcccacagcccgagcaggtcggggagctgtgcttctctctccggtacgtgcccagctcaggccggctgaccgtggtggtgctggaggctcgaggcctgcgtccaggacttgcaggtgagggtcacacctgcccacgttgttgtacagagggggggcccgtgctcagccccgagccctgggatgccccttcggcaaccttgccctcccagagccctacgtgaaggtccagctcatgctgaaccagaggaagtggaagaagagaaagacagccaccaaaaagggcacggcggccccctacttcaatgaggccttcaccttcctggtgcccttcagccaggtccaggtgggccaccgggaggcaggggcagagcgagacccagtgccagaccacgatgactgtggtctttctcccccaactccaacctctggcctgtctctgcacagaatgtggacctggtgctggctgtctgggaccgcagcctgccgctccgaactgagcccgtaggcaaggtgcacctgggtgcccgggcctcggggcagcccctgcagcactgggcagacatgctggcccacgcccggcggcccattgcccagcggcaccccctgcggccagccagggaggtggaccgcatgctggccctgcagccccgccttcgcctgcgcctgcccttgccccactcctgaatgcaccacatgcctctgtctccccgctgagcccaggcacttgcccaggccgccctgcaggaccactgcaataaacgccttctcctgcca

SEQ ID NO: 753 - DNA, 32744 bp, Homo sapiens
  source 1..32744: mol_type = other DNA
gctcgggcgccgagtctgcgcgctgacgtccgacgctccaggtactttccccacggccgacagggcttggcgtgggggcggggcgcggcgcgcagcgcgcatgcgccgcagcgccagcgctctccccggatcgtgcggggcctgagcctctccgccggcgcaggctctgctcgcgccagctcgctcccgcagccatgcccaccaccatcgagcgggagttcgaagagttggatactcagcgtcgctggcagccgctgtacttggtgagtcgcggacccacgcggcagtcgccgacctcctccgagacccggactcgtgccctgtccgcagggtccctcccgcctcccccgcctctcgcctctagcctctcgctcggggcggaagtggcggcgcggtccgcgtcaggggcgcgcctgcgctgaccgctctcttgctccttttggtttaaaaaaaaaaaaaaaaaaagcatacttgagctgagcagctcatggttagcgcaagcgcagttagttctggagggcggtgccacagcggcttcttggggagcgcgtggatgcgccaccagcgttgcgcggcccgggtctgggggtccttgggaaagccgtgggggcgctcgggcgcgcgcccccgggccgcagcttcgccgtagctcccacgccgctgtgcttggttcttgctcgcggacagctctttctctggccgggtgttttgtggccgggtgggcagctggcgtccccgggagcggtgagggcgggggcgggcgagccgggccgcggcgtccgggtccagctggcgcccgcgcaggacctgtgggagcaggccgctctgggcgccgggccggccgccgcagccctctgcgaggcgaagctcgctctcctggcggagccgcggtggttgggggtggctcgtggcctctggcgagggcagcgctctcgggaccctccgtcttcattttcccccgtggcccagcagcgcccagcgtgggttcggcccccatagaaccttcccggaacgaaagaggctttgcttgtgttcgtccagtgatagcgtgtcattctctttatagttttccttactgaggtatactttccctacagtgaaacgcagctttcatgtgtgctcccagacgggtgtcacaaatgaatcccctcttgcaagccccctcaaatcaaaatagcctttccttgccctgagaaagtgccctcatcccctccccgggggcacggtgttccgatgcctatcgccctaatcgtgcctgttcagctcacatagatgcaatatgtagtataaacacctgtgattcgctttttttatgtcaactagactaccttttaattcaaacaaaactttatctcttttaaaatgatgtaactgctttccccttcgtttaatccttgtcgtattattcccaagattgaatttggtgacggttaagttaatgctgcttctgatgtttggttctctctgtgtaaagtaaaagacgggctttcctgtaaatggatgatcctgggtttttcccctttccatttaattagatggcagtgaaaaatgtgttcagaaagtaacgttttcttcttgaacacattagtgggaagtataaatattctgattcccatgatacagagtatgttagaatagggatctaagttttaaagaatgctggtaaggactcttccaattatagacaatctgaaacgcaaattctggtaggaatcttcatgtgagagagcctgccagctgcatcttctccagttacatttgttttagcagaggctgctgtctctctaagggataggttatatatcgaaatagatttgaaaagagaaaagtgaatataacttaattcagcttaacattttggtttaagaaatttaattttctttggtatcattaatatccttgaaaattcaatgagaattgtgattcctctttccagaaaaatgaacttaactcgcatccactggagatttcacatgcattttcaaaaagataaggaaatccttctatagattcttaccgaggaatcctgtagtttccttggttggtcaatgctcatattattttttcctagttgaaaacaagaccattagtttggtcagtagaaaccatggcatgcacactggtgttacagtaaaagtaggtcacaaaccaagaaagttagtaatggaaagcaagtcaggaagtttgagctatgtgttctcctgtggccttagaacatccattcagccattccacaaatatgcccggacccccagtggagttgcagcttttgctcctggccttggggattcagcagagaatgctcctggcaagtttcctaccctcgaggtgctcactctagggcttattcttttggggcctcattgtagttccatattttcattcattcgttcataacatgcttgttatgtgctagtgttagacactgaggattcttgttaaaagacaggagtcccagtttttaaggatgcagccctgtaaataggtaagctgatgaaaacgttaaagtgatacatgtaaagctagcttgaagcacagggtcttgtggagttgagttacctaggagtcctgtatttcccaaaaaggggtacacatgggagttctggtgaagcttctcgagggagggaggacctcacctaagtcttgaaagacattggccaggggaagaggacaagggaggtgaagagaattactgttccagcaaggagggagtgcacaaaggcactgagggaatgctgagagaaccacccacagtttagcctggagactggtgtgaagttgagatgctggagagtaaggcagagcctagatcagactaaggaatttgagctgtttaataggaactcattgtggaattgtaagtctggaaataccatgatcatatttgcttcttttttttttgacagagtcccgctctgtcgcccaggctggagtgcagtggtgcgacgtcagctcactgcaacctctgcctcctgggttcaagtgattcacttacctcagcctcctgcgtagttgaaattacaggcacacaccaccatgcccggttgatttttttgtacttttagtagagacagggtttcgacatgttggccaggctggtctcgaactcctgacctcaggtgatccgcctgcctcggcctctcaaagtgctgggattacaggcatgagccactgctctgggctgatcatatttacttgttagcaagatcgttctgactgctagcagactggatgaggaaagtgtaggcacgcagcacagggcagtagtcggttggagtaaacctgaagagacatgatgagcttctgttaggcagtggcaggagggatggaggggagatacagatttgaaatgaaatggtaaaggggtatacgttatgtacaagtttggttttgaaactttaattctgtttgaggtacctgcgagacactgaaatgaagctagttgaatgtataaatttggagttcgggagagagggtctgagtaaatgtgattttggaaatcatgaacacatgggtgatatttgaggtcttagacattgatgagatcatctagggaagatacagagcgtttggaaatatcaaaggccaaggacagaatcttgacagacaacatttaaaaggatgggtggagaaagaggaacttgcaaaaaagactggtgaggaacaaccacagaagtggggaggaaagcagtggagggagttgagggtgagcagggccacctgacaggtaagggccagcctgagagggccatgacattgagcagctagattaacagataccttaaagggagttgtgtcagcggactacacaagacagatacctggagttcaggagagaaggtaggaggaaatgcaaactaccaagtgtacactgctctttttagaagcccaacttgaagaagtggggagaggtagctaaaatgaagcaagattgtgtgacttctcacttaaacccttgaacggctttccgttgctcacagtgtaaattcagcccctcctccggctcacaagacctcatggcctgtgtctcttgcttgatttcccctatcactttcctccctcttttccactgtgttgtattcttggaagtgtgtgtgtccattctccccttagggcgtttgtaaatgttgttctctttgccttggcacaactttccccccttctctttcctttcttgcttaaactgcctcctactcatccctgaagtctcacttccttggcaggccttcttgacctgcccatgctgggtatgagcccctgttgcgtacttctttagcatcccaagacttcccctttcatagcgggaattggatgtcatacagcagcaaatgatttcgggaacacaatttgcattaagcaaaccactatcttgaaagtaacacagcttgagtaggaaaaaagtgtttaaggtggctttctgctttgtttagcacagcagtgggtgatgtttctgataatgtttttgaagagttgtgctttttttggtaatgctcatggagctgggaaaagaaaggctttgctcttgagcaaaaactgagtacaactaaaagctggacttgcttagtggtaggagaacttgataccttgttgaaattctagcgggaaaaatgaatttagtattttgagtctggaactctggtcccttattcctttttgctccttttgaaaagtgtcttttatttcatgagtttgataataggaggtttcttagaaatgaattattgggttggagcagaacagactctgttaatctgagtttatattttttattacttcttcagagtttcatgaaggcactgccagtgctttgcacagtatcaggtgcttagtaagcacttgaaaatatgtgctgaatgaatgactttttacgaggaaagggcaacttgatatatttatgtgattgcagggatgaacctaaagagagaggtggaggttgaaatagaagggatgattgttggagccagaaatcttagaaagcaagagtcaatgggaccaagagcacacaggtggaagaattgatcgtgaaagagtgctggccaggcggtggctcatccctgtaatcccagcgctttgggaggctgaggtgggaggatcacttgaggtcaggaggttagggctgcagtgagccataattgtgccactgcactacagactaggtgacagagtgagatcctgtctctaaaacaagaacagcaaaacaaagggtgcagttggaaaagtttaatttggtctgattgtgtgaggttaattctgactttttgagtaatgttcatgatccctttttggcttttccttttgtcactgctgattgctgtcttcatcaggctgagctttgagaaaggcagagagaaggaatggagtctgtgtgcctactgaggaaaagactaaaactggggaatcgcaaaagctatgttatgggttgtttctaagaagtgatggctcagaaggaatttggcttatttatttttaaattcctttcttttttaaagagttctcactctgttgcccagtctggagtacaagtgcagtggtgcaatcatagctcactgcaaccttaaactcctgggctcaggtgagcctctcacctcagcctcttggaaattggttgattaattagggtttataaacaatggaactcctgactgacttcatttttctttttttgaaaccaagtcttgctctgtcccccaggctggagtgcagtagtgtgatctcagctcactgcaacctctgctccccccaggttcaagcagttctactgcctcagcctcccgagtagctgggattacaggtgcccaccagcacgcccagctaatttttgtatttttagtagaaacggggtttcaccatgtttgtcaggctggtcttgaactcctgacctcaggtgatccacctgcctcggcctcccaaagtgctgctgggattacaggtgtgagccaccacgcccagccacatttttctttttctttctttttttcctttttctttctttttttttctttttctttcttttctttttgagactgggtctcactttgtcacccagtctggagtgcagtggcgtgatctcagctcactgcagtctcgacctcttgggctttagacatcctcctgcctcagtcccccacgtagctgggcctggctaatttttttgtattttttgtagagacagggtttaactattttgcccaggctggtcttcaactcctgagttcaagcaatctgtccacctcagccttccaaaggcttaggattacaagcatgagccactgtgcctggccatttttcttttttctttttctttttttgagacagtcttgctctgttgcccaggctggagtgcagtggcgtcatctcggctcgctgcaagctctgcctcccaggttcacgccattctcctgcctcagccttctgagtagctgggactacaggcgcccgccaacactacaggcgcccgccaccacgccaggctaattttttgtatttttagtagagacggggtttgaccgtgttagccaggatggtcttgatctcctgactttgtgatccacctgcctcggcctcccaaagtgctgggattataggcatgagccactgcgcctggccgccatttttctttattagaaatttgtagttcaaatattgctagagaacaatttttaccatttgtgagtcagctaatttttagaagtcagatatcaagtgcacactgttcttctcatacttacagcggggcagccagttaggcaggtgaatcaaagctgtcttattctaaaacacttcccttgcctactagttacacattctcctgcctgctgtctaatctcagtgcttttacatggttgcacaaactctgaattcccttgaagattggctactctctcacaccttggagtcttcatgtgttggatatactccatgcctaccatatctatttgggaaacatcttcaagactagaccgtagtctccttgggcaaagttaaatgctcccccttctctcatttcttagttctctatattcttttattagaatatgaaccacattgttttgtaactgtctacttgtctgttctgtgtagctccttgagggtggtctttttttttctttgttttcccaccacctacctacgggacctgaaacatgttagatgctcagtaaatattcagtaaacacaggaaaactgttcccttttaaaatgtcagcaccttagtttattccaaacccctcatttatggctgaggaaacactgggccaatacagtgttgtgacttatctgatgttacaatatctgctagtgtcataactgggactcaaatccagtccttctgattctcgtttcagcactgccctaatttacccatgtgactacctgtagtgctttcttcttatgatctatttgagatcagtggcacagagggaatcgtcttaattttgatggctaggagggagtggatgtgttataataggtagggtcattttgggacttgaggcctttaaaacagtgtctgggatccagggatcagacttgaaaggtatttgcaaatctcctgaaactgctaaattttatgtacgtgtgttcccaggtatttcgtttctaggtgattctgtagcttttgtcagtttcttagtggatttgtctgtgatccctcaaaaggtaaagaccactgcttgaagggaaagcagccttgggatgggtgccccaatggggaatgtatacctagaaatcatattgttttgcctttgacatgtgtttatagattactgatatctataattacggaaatccagatagttgcgtttgtctcctagcttttctagttgcctcttttttgatttcttgattttaaccagaatcttctttttttcttgagaaggggtctcattccgtcacccaggctggagtgcagtggcacgatcgtaggtcactgcagactcaaaactcctggctcaagtggtcctttgcctcagcctcccgagaagctgggactacaggcacacaccaccacgcctgacaaatttcttcttcttcttcttctttttgttgttgttcttgttggccaggctggtctggtcttgaactcccggcctcaagtggtctgctcaccttggcttcccgaagtggcgagattacaggcatgagccaccatgcccagcccttaaccagaattttgttttgttttgttttttgagacagggtctcactctgtcacccagactggagtgcagtgatgagatcacggctcactgcacagatgcacgccaccatgcttggctaattttttatgttttgtagagacaggttctcaccatgttgtccagactggtctcgaactcccgggctaaagcgatcttccggcttcacccttccataatgctggggagccacagtgcttggccaaccagaatcttaaaagccctttttactttttccagatagttactctgcagagaatttctgattcccagttggagaactgttacagctctctcagtcccctgctgttcttttagctaccttgtctttgtcctcttacctgtccactctctactccccttcttccctttggtctccaaatagtccagataaaccagagagatggacagataaggtctgggtacgcgaaattaaaattaacatagtgtgctcttcactttcttgaataaacgttacgtatgatttgtttcccttggaaatcctcatctagattctctactctctattccttaacttaatgccccattaaggtagttttttcttaatggaaagctgttgagagtcagaggatatttaaaccaactaataaactgaacttttaataataccacccttactttggataagagtgattagccatatactaaatcctcaatcagtttagcatgtaaaatttaagacatagcagctgataactgaggaagagatacatttccacaggctaactttaaagaatataagctctcactttcctgagtagaagaaaactaaacttttctgttctatgctttttttttttttaatttttatttttattgatcattcttgggtgtttctcacagagagggatttggcagggtcataggacaatagtgaagggaaggtcagcagataaacaagtgaacaaaggtctctggttttcctaggcagaggaccctgaggccttccgcagtgtttgtgtccctgggtacttgagattagggagtggtgatgactgttaacgagcatgctgccttcaagcatctgtttaacaaagcacatcttgcactgcccttaatccatttaaccctgagtggacacagcacatgtttcagagagcacagggttggggggtaaggtcacagatcaacaggatcccaaggcagaagaatttttcttagtacagaacaaaatgaaaagtctcccatgtctacttctttccacacagacacggcaaccatccgatttctcaatcttttccccacctttccctgctttctattccacaaaaccaccattgtcatcatggcctgttctcaatgagctgttgggcacacctcccagacagggtggtggccgggcagaggggctcctcacttcccagtaggggcggccgggcagaggcgcccctcacctcccgggtggggcggctggccgggcgaggggttgacccccccacctccctcccggacggggcggctggccgggcggggggctgacccccccacctccctcccggacggggcggctggccgggcggggggctgaaccccccacctccctcccggacggggcggctggccgggcggggagctgacccccccccaccttcctcccggacggggcggctggccgggcagaggggctcctcacttcccagtaggggcggccgggcagaggcgcccctcacctcccggacgaggcggcaggccgggcgggggctgatccccccacctccctcccggaaggggctcctcacttcccagtaggggcggccgggcagaggcgcccctcacctcccagacggggcggctggccaagcggggggctgacccccccacctccctcccggacggggcggctggccgggcggggggctgaaccccccacctccctcccggacggggcggctggccgggcggggggctgaccccccaacctccctcccagatggggcggctcgcctggcgggggctgacccccacctccctcctggacggggcggctgccaggtggagacgctcctcacttcccagacagggtggctgccgggcggaggggctcctcacttctcagacggggcggctgccgggcggagggtctcctcacttctcagacggggcggttgccaggtggagggtctcctcccttctcagatggggcggctgggcagagacgctcctcacctcccagacggggtcgcgaccgggcagaggcgctcctcacatcccagacggggcggcggggcaaaggcactccccacatctcagacgatgggcagccgggcagagacgctcctcacttcctagatgggatggcggccgggcagagatgctcatcactttccagactgggcagccaggcagaggggctcctaacatcccagacgatgggtggccaggcagagacgctcctcacttcctagacggggtggcggccaggcagaggctgcactctgggcactttgggaggccaaggcaggcggctgggaggtggaggttgtagcgagccgagatcacgccactgcactccagcctgggcaccattgagcactgagtgaaccagacaccgtctgcaatcccggcacctccggaggccgaggctggcggatcactcgcggttaggagctggaggccagcccggccaacacagcgaaaccccgtctcccccaaaaaaatacgaaaaccagtcaggcatggcggcgcgcacctgcactcgcaggcactctgcaggctgaggcaggagaatcaggcagggaggttgcagtgagccgagatggcagcagtacagtccagcttcggctcggcatcagagggagactgtggaaagagagggagagggagaccgtggggagacggagaccgtggggagagggagaggaggcagagggagagggagaggcttttttttttttttcttgagacggagtcttactctgtcaaccaggctggagtgcagtggcacgatcttggctcactgcaacctccacctccctggttcaagtgattctcctgcctcagcctcccaagtagcagggactacaggcatgcgccaccacacccagctaatttttgtatttttagtagagatggggtttcgctgtgttggctgggccagtcttgaactcctgacctcaggtgatccacccaccttggcctcccaaattgctgggattacaggcgtgagccaccgcgtccagcctgttacattcttaattggaatagcattgccctgcagtgccattatctgaaatagcttttaagaatgaatgtaatgccattttaaatgtatttaaatgttgtgccgatttaatgttctatgtacggtacagtactactaatggttcaagaagttgttttgacttaacagtgaaatccttgcttttaaagatcatagatacctttagacacctttaagatgaaacatgtttatgagaggaaatgtccgcacaaatacaatcccccgcaaacttagcatgtggttttagtaggttcataggcccacctggtgatccctaggataagaaattgtggtcaagaaactgatttcaggggccgggctggtggcttacacctgtaatcccagcactgtttgtctcaaaacaaagaaactggctcaaggttggatacttttcaaacgagaggaatggaggaagggaatgcaatgaataacttttcaaatccagtatgtctgatttaatatgccgtttgctctgtcagtttcatttggttcgtgtcactgatcatttataaccttttttcaaactgctttcattcccctaaggaaaatctgatactgaattattttatttcttctttcactatatttgaacggttttatagtctgaaagctatcaatttctcattacagtttacttcatagtacttctaggaattcttcctgtggtttgaggtaaggctacaggattcctagagtttgtacccctctagtcccagtaaaggacctggtacatcaatcagggtagccctagaaagttggagtaacttcgtaacagtgggaactgcttctgttctatgttttttgtgggttttttatttgtttttgtttttttgtttttttgttttttttttgagacagagtcttgctctgtggccccaggctggaatgctacggcacgatctcggcttactgcaacctctgcatgctgagttcaagcgattctcctgcctcagcctcctcagtagctgggattacaggcgtgcaccaccacgcccagctaattgttgtatttttagtagagacagggtttccccatgttggccaggctggtcttgaactcctgacttcaagtgatcagcccacctctcagagagctgggattatacatgtgagccaacatgcctgccctgcctcattctttatactacagtaaagtcccggttgggcaataatctaaacataaaagaaatgaaaccataaaattatataagaaaacaatggagaaaattttttgtaatcaacagagtgaaaaaggattttttaatgccatgtcacagaaacctagagaaaaaaggtttaagtttgatttcataaaaatttaaatttttgacataaataccataaaggtcaaaagataaaaaattttaaatattttcaatatataacaaaaactaaactttcttaatatgtaaagaactacatatcaaaaagagagcggaaatacagatggcttttaaaaacaggtaaagctgttcaccttcacaataataacaatttcaaattatgactataataataccatttttcacctatcagacaaagatgaaaaagttcattaatataattgtgtaggtgaagctcaggcactttcttatattattggtgacagtatacattgatatagcttctttgaaaggttattcatagcagcattatttataacagctaaaacctagaaataacctatgtgtcccattatagatgactggctaagtgatgaatactattaaattgttaaaaagaactcattatctatatggaagtacttttaatatatactaagtgaaaaatcaaagtgcaaaacagtatgctaatatctgttttgtgagggtgggatggatacttggatggaggaagacagacaggcagtctggcttatatatggatagaatgtctcggaaaatatacaaggcactggttacagttatcacctaagggaaaggattgagggagaggagaatgtgacttaactttttcactatatacccttttgtacggtttaatttttgccaagtccatgtaatccatgtatacatagggagcatatgtatataaatatatgtaaatataagtaaaaaaatatgtatgtgctgccgggcgcggtggctcactcctgtaatctcagcactttgggaggccgaggtgggcggatcatgaggtcaggagatcgagaccatcctggctaacacggtgaaaccccgtctctactaaaaacacaaaaaaagtagccgggcgtggttgcgggcgcctgtagtcccagctgctcgggaggctgaggcaggagaatggtgtaaacctgggaggtggagcttgcagtaagccaagatcgcgccactgcactccagcctgggcaacagagtgaaactctgtctcaaaaaaaaaaaaaaaacaacacgcttttctctctctctctctctctctctctctctctctctctatatatatatatatatatatacacatatatatatacgtatatatatacatatatatacgtgtatatatacatatatacgtatatatatgtatatatacacatatatatacacatatatatgtatatatatacatatatatacacatatatatgtatatatacacatatatatgtatatgtatatatatacatatatatatatatgctaaagttaagtactggattcctatctgtatctgctacctaactgcagtataaatcttggaagttgagtctgttttctcatttgtaaccacctcttagataacacacataaaagcacatagcacatgcctgacacacagtagggttcagtgacagtgagctgttttagtctctaaactctcttcctcaaagagagcttctcaaagaaaaaaaaatgtagtgaagaaaagaacttactccaccagggatcttctctccccagccagtggcaggcatattaagggctataagtaagtggttattttaccatcctaaagtaatggtgtttcaaagtatgcaagattcttcatacttcactgtgtccttttctgagcatctttgtagagagtatatgcacaaacatctgactaacaaagggaacacttttcatcatataatttaggattcacttagagacctaaagtataaagaaagaaacttaggtatgttagcccataaggagaaactcattatcaatttgggattatcttaaggtcctaccttataaaattaaaatttaacagaagattattctttttcaatttcctaagttcttatttgctactacatcgtagcagttcgagggagaatttggtctaacgatgtaatgttttctgtatgccatacatagaacaaagctatgtacgaaatactaaaaatattatttgacattatttaataaaatattataactatttcaccccgataatgatggaaattaagttgcagtaatatagatttttaaaataaaaacttcaaaaccaggcgccatggctcacgcctgtgataccagcgctttggaaggccgaggcaggcagattgcttgagaccaggagtttgagaccagtctaagcaacatagcaaataaaaataaaaaattagccaggcatggtggtgtgcctgcagtcccacctacttgggaggctgaggtggggggatcacttgagcccctgaagtcaaagctgcagtgagctgtgatcacaccactgcattccagcctgagtgacaaggcaagactttgtctcaaaaatataagtaaaataaaattaaaattttacttgtttatttttttgagacggcgtctctctttttcccaggctggggtgtagtggtgtgttctcggctcaccgtaacctctgcctccggagttcaagcgattctcctgcctcagcctcccgagtagctgggattacaggtacgtgccactatgcccagctagtttttgtacttttagtagagacagggttttgccatgttggcaaggctggtctcaaactcctaatgtcaagtgatccgcctgcctgggccccgcaaagtgttgggattacaggcgtgagccaccgcacccagccttaaaactttaaaattcagaatatgagcctttgttttatagcttcacttgttaaaacaaatcaggagctgggtgtggtagctcacgcctgtaatcccagcacttggggaggctgaagcgggcagatcacctggtctcaatctccctgaactcgtgatccgcccgcctcagcctcccaaagtgctggaattacaaacgtgagccaccacgcccggcctgaagtttgaagtttttaaaaagaaagagttgttaggcataattgtgtaaatagaggtaaaaattgacagcaagaaaggcagtagaaaactatgacaaatgaaggtgatggctcacgcctgtaatcccagcactttgggaggccaaggcgggcggatcacctgaggtcagtagttcaagacaagcctggctaacatggtgagaccctgtctctactaaaaaatacaaaaattagccaggcatggtgatgtgcacctgttatcccagtcacttgggaggctgaggcaggagaattcacttgaacccgggaggcggaggttacagtgagctgagatggcgccacttcactccagtctctccagtcagtccagacagagtgagactcaatctcaaaaaaaaacaaaaaacaaaaaacaacaactatgacaaataagtgtaatttcccaggactattaaggtcttgtaatcccatgcactggaagcttttgttgttgttttctgatttatcattgaagtgaccaaagcgcagtggtaagaacaagcctttgtgattacttcacactagagaagggtctttcccacatatttgagacttaaggagttgatagtgaacagtgtaagcggccacacaggtgtgggttaagaactgatgtgtgtattcactttctgtaaagatgaccaaacatatgttgttagacaaacgaaaaattcaccccaagatcattgagggcatgcaaaatagtatgaggtagaggcagctgtaattcaggtgtccaaatacaagagcaggtggagaaaagaaaagaaactgagaacagtaaagagtttttaaagttataacacacaattgttaaaatagaatgttcagtaccaagtagcagagtagataatgcagaacactgaggtggcttgagaaaaatctctcagaactcaggaaagaggtgtgcgaaatgagcgttaggagagagcacttccccaagtctgtgatagaaattcctgaaagggaacagaggagactgaagcgaaactctattaagcgacaaggaagactcaaatggagaagctaacccagttccgatgaagacttggcacatatctataatgtattttttttgaagtcagccaaaagaaagtttaaatttgaggtacatctgaaagagtaagcaatacagaaaaatcttgacaacatctgaggacaaaaaaaaaagtactgatactgttgagtgtgaggcaaaacctcactttcagtctttcttgagaaatattggcaaaatatgcccttaatacaggagttccatttttatttcatttatttatttatttatttatttattgagacaggttctcactttgtcacccaggctggagtgcagtggtacagtcactgctcactgcagccttgacctcctgggctcaagtgatcctcccagctttgcctcccaagtagctgggactgcaggcacgcatcactacgcttggctttatttttatttattatgtgtttatttttatttttattttttgtagatacgtggtttcaccatgttgcccaggctggtcttgaactcctggcctcaaatgatcctcctgccttggcccagagtgtttttgttttttttttttgtttgtttgttttttgttttttggagacaatcttgctctgtcacccaggctggaatgcagtgagtggcgcgatctcggctcactgcaaccaccgccttctgggttcaagcaattctcctgcctcagtgtcccgagtagctgggactacaggtgcccaccaccatggccagctaattttttgtattttttagtagagatggagtttcaccatgttagccaggatggtctcgatctcctgacctcgtgatttgcctcggcctcccaaagtgctgggattacaggcatgagccaccacgcccggccgagatatatttcacataccataaaattcacctaaaaggtacagtttagtggtttttagtatattcacagctgtggaactaaatcttaatttcagaatattttcaacaccccaaggagagactgggtacatacagttattctccattctcacccacatcccaacccctgacaaccactaatctactttctgtctccagatttccctgtcctggtctcataccatgtgtagtcttttgtatctgtttttttgttttgttttgttttgttttgttttgttttgttttgtttttgagaggagtctggctctgtcgcctaggctggagtgcagtggtgcaatcttggctcactgcaagccccgcctcctgggttcacgccattctcctgcctcagcctccccagtagctgggactacaggcgcccgccaccacacccggctaattttttgtatttttagtagagatggggtttcactgtgttagccaggatggtctcgatctcctgacctcgtgatccacctgcctcggcctcccaaagtgctagggttacaggcgtgagccaccgcgcccggctggtttctttaacttagcataatgttttaaagtttcatctgtgttgtatgtatcattactttgtttcttcttctaagttagtaagattccattatatagatatataccattttgtttatccattcaccagttgatggacaaatgattgttttagctattattaaaagtgctaccatgaacatatgtgtccaagtttttgtgtgaatgtatgtattcgtttctcttgggtatgtgccttggagtagaatagctagttcatatgttaactctttgttcagcatttgtttttctaaagtggctacatcattttaacctttagttttttgttttttggttttttttttgggagtggggtggggctggagtgcagtggcgttatctcggctcactgcaacctccgcctcctgggttcaagcaattctcgttcctcagccttccgagtagctgggactacagacacatgccatgacgcccagctcactctttttgcccagctcactctttttattttagtagagacagggtttcaccatgttgcccaggctggtctcaaactcctgagctcaggcaatctgcccacctcagcagggtttcaccgtgttgaccaggctggtctcaaactcttgacctcaggcgatccacccacctcagccttccaaagtgctaggattacaggcatgagccactgtgccccgcctctctcttttttttttttttttaataaagacagagtcttgctctgttgtccaggctggcatgcagtggcgtgatcacggcttactgcagctttgacctcctgagctcaagtgatcctcccacttctgcctcccaagtagctgggaccacagatgtgtaccaccatgccttgctaattttaaaattttttaatagagatgggggtctgtctgtgttgcccagactggtctcaagtgattctcccacctcagcctcccaaagtattgggattgcaggcatgactcacagcgcctggcctcagtttctttcaagaccatcctataacaccaagttagtttgaggattctatgaatgtctgcttaaagatatccttctgaattctgtgattctcttgaaaggcttgttgcaatgaaaaacaaagtataatgatgactttatgtgaagtatacttttggaatttcttaagcagaagtcctgagacttttgagagtccctgtatttaaacagtaccatttaggcacagttactgcttatgaaatgaagagtagctagatgaatataaaaaatcttactcttacatttcaacccagcattatttgaacccagcaaaattatttctatagtagaatcaatttagttccttattttaagccatgcatatatatctcaaagcaaatttcaagagggattaaatgttattatgtgaaaatattaggaggtgaaataataggagaaagtaaacacattgaaagtaggtatgttcaggccaggcgcggtggcttatgcctgtaatcccagcactttgggaggctgaggcgggcagatcacgaggtcaggagatcgagaccatcctggctaacacggtgaaaccccgtctctactaaaaatacaaaaaaaaattagccgggcgtggtggcgggcatttgtggtcccagctactcgggaggctgaggcaggagaatcgatttaaccctggaggctgaggttgcagtgagccgagattgcaccactgcaccctagcctggcaacagagcaagactctgtctcaaaaaaaaaaaaggaaagtaggtatgtttacaatttaaaatctttgggcatggagataagctataaggccattgatcagaatggaccatttcataatgttccaaaaattagactactttggaaaaaggtggtgtgtggtcttaatgtaggcaatgcacatgtgtgtttaagtttcaaatacagctaaggagctaagtggaattttttttttttttttttaccaaatagcgtgtattaataatagctcagttccatttactgatttgtttttcctttgtttatgtcatatattatctttccaagagattgtgagtttatgctactgccaatttggtatgagggcctgtttttaaaagagctgcatgatattcacttggatgtaccacgatttattcaaccagtcttttctttgtcattagacatttagtttatttaaagcctttcaacattataagtaactgtgaaagatatctttgtgctatgagttgcctacattttggatcattgccactaagaaagaaattaactagtgactcaattattccttgctttttttgagcaaaaatcatattaaaaataattagatttaaaatttttggttaaattatactttaaagcaaagatccttgccatttagatctagtttggtattaaatgagaacggtggttctctactgtgttggtgggggatatgttcatgatggattttgctgtggaaggacatttggcaatgcctggagagagttttggttgttacagatgcagggaggggtgccactgacatctaatgggtagaggccagggatgctgctgctaaacatcctgcaatacacaagacagtccccacttgcccccccccccccaaaaaaaattagctagcctaaaatgtcagtagtgctgaggctgagaaaccttggattaacaggtttcactgctgatgggaaacttttttttttttaacagggccttactctgttgcccaggctagagtgcagtagcaggatgctagctcactgcagtcttgaactcctgagttcaagcaatcctcctgtctctgcctcccaagaagctggaactacacatgcacaccaccatccccagctaattaaaaaaattttttggcagagctggtgtcttactgtgttgcccaggctggtctcaaactcctaccctcaagtgatccttccagctgggcctcccaaagcaccaggattgcaggtgtgagccactgtgcccagaggaaacattcggaatctgtgatagaaggggaaggttttagctccagaacacaagtagagctggctttgccttatgtgatagacctagtgaatagctcagctgtctgctttcctaatgccatttagacagatactgtatattttattgcttatgcaatgtgcttataaaattgtttatttttgtgtcttgggtattcctgaaaatgcctcatcagtgtcagatctagttgctgttgagatttggttttgctgcgtatattacagacctgatttagctacatgggaaagaaaattaatcaatagctgatttaacaaccaggagtttatgtttctcatgtgatatgaattctggagagagacttaagggctgttactgtggcttcttgatgtcacccatgactcaatgctggtatttctgcttacctttcttaggaatgtgcattttaccttgctgtcacaggatggctcctgcctgttcccacccctcacccccggcagcaaaacctatgttccaggcaggcagcagtgaggacaaaggtacctggagccagtcctctttgtcagcgttttcctgcagccccaacccagtggtttctgcttattcccattggccagactgtcacaggaccttagaggctgggacaaatagttttcagctgggctcattgtggtctgaaaacaaaagcagttacctttagtaagaaagaaaggatattggggctgggtgcagtggctcacgcctgtaattccagcactttgggaggctgaggcgggcggatcacttaaggtcaggaattcaagaccagcctggccaacatagtgaaactccgtccctactagaaatacaaaaattagccaggcatggtggcgcatgcctgtaatcccagctactcaagaggctgagacaggagaatctcttgaacccgggaggtggaggttgcagtgagctgagattgcaccactgcactccagcctgggcaacagagtaagactctgcctcaaaaaacaaaaaaaaaaaaagaaagagaaagaggatattggaataaacgctaatatgcacctttgggagctgctttttgaaatattggttcttgtaagttcactgaaattttttttataaagtagaacaatattggagatttgaaagaatggactcaatgcaagagatcttattagctgagaaaatgtatttatgttatgaatgtatttcttaaccccaagaacttggctgttgtattgtgttttgtaaattttaaatctccctactactatactgggggccttaccctcttttgtatagtgcacacaaagaagtgtgtttctctgggctaaaaatagaaatctgcacctgacagatggccttaagtgtggaaaatgggtgtgtgtgtatcacagaagtggaagaagtggagggagtcctgctctgcctgttgttttaagcctcccctccctgcaaatctatatctttcctatacactagtaatggtcaataggtttttgttgttgttgttgttttaatcccatttacagtagcgacaaaacttatcaggtatctaagaataaacctttattatacatttatgctaacctttagcatacctttatgaagaaaactacaaaattaattaaaatatcatgaacggcaatgcaaatggggagaataaataggggacaacttgccttccagatgcattgattacaaagctgtagtaactaaaatttgatactgtctcaagggcaagcaaatgcttctgtgaagtagaatgaggatctagaaacagactcctgcgtgtgctgaaacttggtttatgatagagcaggtgttactgataaatgcagaaaccaataaatggtattaagtcaattaactttccatttggaagggataaaattaaatttctcttccacgtgcaggctaataacagtgtcttatatcttgcaaaagtacttaccagtccattcacttccagaaaaatggagaagtttcatattagaaatttgtgcatcatgtttcataaataaaaacttcagatactcggctgatggtgttggctcaaacctgtaatcctagcactttgggaggctgaggcaggtagatgacttgagcccaggtgttcgagaacagcctgggcaaaaagtgagaccctatgtctataaaaacaaataaacaaaatggcacctaacttttaaaatgctttttcttacatgtaataatgtgagcaaaagcataatttaatttttcctattaaaatgctttttttttggtttctgttacatttctgtatttacttgaattcttagaacactgtttcctgggagatcaaacctggccattctggatacatcagtagtgagagcttagtgcggacatagccttacagaatgtcttctatgttgaaatgcagagaacccgaaggcgcctaggatgagcctcaggcctgctggttgttgcagtggcgcaatctcagctcactgcagcctccgcctcctgggtttaagcgattctcatgcctcagcctcctgagtagctgggattacaggcgctcgtcaccaggcttggctaatttttgttttgttttgctttttccgcctcactctgtcacccaggctagagtacagtggtacgacctcggctcactgcaacctcagccacccggtttcaagcgattctcctgcctcagcctcccgagtagctgggattacaggtgcctgccatcgcgcctggctaatttttgtagtttcagtagagacgaggtttcaccatcctggccaggctggtcttgaactcctgacctcgtgatccacccacctcggcctcccaaagtgctgggattacaggcatgagccaccgcgcacagcctaatttttgtatttttttggggtttttttttatagagtctcactctgtcgcccagactggagtgcaatggcacgatcttggctcactgtaacctccacctcccgggttcaagcaattcttctgcctcagcctcccgagtagctgggattacaggcacccatcaccacgcctagctgattttttgtatatttagtagagacggggtttcgctttgttggccaggttggtctcaaactcctgacctcaggtgattccccgcctcggcctcccaaagcgctggtattacaggtgtgagccaccacacctggccaaatttttgtatttttaatagagctgggttttcacaatgttggccaggctcgtctcaaactcctgacctcagggaatccgcctgcctcggcctcccaaagtgttgggattacaggcgttagccactgcgccaggcttgttgctgaacatttatggctctagaaataattttttttttaaggagaagtaatgacaaacatgatagaaataaaatttgaggatatttctgggttcaaaataaagtaacagttaaatagcgtgaacatgaagaaataaatattttcaggtagaaactccaaaatttaggtagatgctgtgagttttagtcagaatttgaatatgatgtggctgaccatagatacctccattgcattaattctgcttcataaagtgtttgatgcttgcttgtaggtgttgaatagagcctaattagcagtaagtaaacagatctagagcacagactttggcatctgaaggaccttggttcaatgctgggactgccacttactagctatgggatctttggtggatttttaacctttgaaagcctttcatccctcacagatataatggggaagaaaatcgtttccattagtattgtgaggattaaatgattaattgatgtaaacaatgtgctttccatagtacttggcatatcataagtgcttcatgttattttacgctggctgggaagataagttttgctgtggagaatttaagagggatattaaaatatatttttgttattttaaggaaattcgaaatgagtcccatgactatcctcatagagtggccaagtttccagaaaacagaaatcgaaacagatacagagatgtaagcccatgtaagtacttgtgggtttgtgtgcatgtgtattttttggtttgttttaggaggcaggatgtagtgaaaaggagggcttggggtcagtgttgataaatacagtaatttttttcctatttacgtaagacacgttctttaagaatttaaaggtgtagaatagtggaaggaaaaataattacccataattatttcatccttcaaacataggcaccattattttggtgtatttcccacaacctgtttttcttatgcacagttttcctttctttaaaataattgtaattatagatgtctatataatatccatatgtatttccttttcatatcattccatcccctttgtaagttttgcttaaaatagttattggtgtagtttggtttttttccttccccaagttataagagtagtatgtactcgctgtagaaaacttagaaaacagagaagagtataaggaacaaacttatttaaaaataaataataacttgggtttatattctttggagtttttaaaaataaacatgtactttaaacggaaaattagaatcttgccacatactcatttgtagctcttttcttagcagtacattgtaaacttttttttattataaacaatttttaattgctttgacagtggctttggatataccactcttttgcataagttccctgttgttggacatttagattatgatgtatacacacacagacgcacacaattgtgtgaacaattataatactagagttctttggtgtattcatcatcatgcggtgattttattttttgttctgattcatgcagcttattcagatattaaattgggcctccttcgtgcttcagcatatttccctatgtttgactttagtgggctaaacataggttttctctttagggctccctgttggtagggacttgaaaaacagtatcagattgatcacattctggtttttgcttgttactgattgttcgcctgttgactagggtatggtgctgcctgctaagatctcctgtgtaggttgaaccatttcactgttcaaggacacagactgtatacctttatatacattgtagtcattggttatagataagatatttagggtctggatgtaccactgaaaaatccatcagttactggaaaaaaatccttatttttattcttacatgaatagaatgtttttcttatgttgaccaaatacatttccaagaagggtgtattggctgattttgggcaaatcaaatgagaagcagtctctgaaaatctttcatgtttgttataaattactattaaatactatgtttctcttaatgcttttttctttactaccagttagaagtgttcttaaagacaagtagctagaagagtggttttccattttcttcagttgcagcacacttgaagatttgacccacttcctctgaaacaggtggctcatcacggtggcagttccagtgtgggtgtgcgttcagggaatagcgggtgtgggcagtaattctgatacttaggtgcccttcccctgcctccaaatctctgattgagaatcactgagctacagagaataattctctaatgttaccatgagttttgaagacagtattttccagttgtacaccttgctttgatgcctttaattttttaaaaacttttgattttgaaaattgtagatttggatgcagttgagaaataatacagaaagatcgagtatacccctcacctagtttcccccagtggtaacatcttgcataactacagtccaatatcacacctgggaacctgaaacaatacagtccatccaggtttcaccagttttacatgcactcatttgtgtgtgcgtgtaagttctgtgcagttttatcacgtgtagattcctggaatcaccaccacagtctagatgcaaaccagtggagcattcccatcacagggtcacttgcactgcctttctggggccacagtctccttgcttggatcctccttccctaacctggtgttgcctttaatttttatatatttgttgtaattgcaattattggatgcactacactacatttgagtcccctaattagttttatcgaattgatctaaatgggatttttttttttttttttttgagatggtgtctcactctgttacccaggctggagtgcagtggcgtgatcttggcttactgcaaacccctgcctcctggattcaagcgattctcctgcctcagcctcccaagtagctgggattacaggtgtgcaccaccatgcccggcttatttttgtatttttagtagagatggagttgcaccatgttggccaggctggtcttgaactccttacctcaagtgatccgcctgcttcagtctcccaaagtgctgggattacagtcatgagccaccatgcccagctgataattttattttaactggaattgagatgttttattttaaagtaaaaacatttgcaacttaagttatcctcaagtatatacatcaataaaacttatgatttttctcctcagcttttagacttatgttgtatacctgcagttgaaggctgcagggagactctttaaaatatgcgttatcaggcctccctccatcatcattgggaccaggctcttcctgtatgccttctcattgaaaagcacttagccttgagagaaccaagcttccctcctgcggaccatgcagtggttgtcctctggagctgtgctctgctgggagcagcccccagtgcatgttctccttactcttcttcttctttgccccctccctccccacacatgcctccctagtaagccatgttctcctgatctctcagaaagagactgctcattcttgcttctcacgtagccacaggattttctagtctgagccaatatgcttcagcctgcaaatggaaatgatctcttccaaggcttgtgctggccagcacatccccacaccgccttggcacctctcctctcctgacttcagtcattcactgtctttctccttaccctctccttcccaccttcctcatcctgggtgacttcatgtctctgggaaagaactacggctcattgcgctagagttcctagacctgttcagctccgctgacattgacctttagtcatcttcacctctgaaatctgaaactctgctgccttgagggctactttctgtcattccagctttcacttgcttactcccactgtacctgctctttgacttcagcaggatctttagttgactttttcatgtattgtgaagttggaaatgtattgaattgaaatttcgattaaaaaatgtagtgaagcatattactttgtcctctaacctaactattaataactttcttgttgtttttatatttaaaaaataactctggattttttaattccaccattttgtgaagctccaacttaggaaaaatcagtcattcatcctctctgcactttgggcaaatgagcgtgtgccttgggtggactccagtgttaggtgggcttggggttgccttgctgtcctcatgccctcgtctgccccactgccaccgtgttccagctctgcaccgagtaaattatctctcagagctcctcaccatgctcaggatatcgtcctgctttcaattctacagataaaaattgtaaaaatcaggaaacaccaccttagcttcatgttctatcacctggaaactcactttcttttgcccctatccttccctaaagtcccaggagagaagcctcccctccctctgtcctagccgaatccttcgtccccatcctcctcatgggccctgctcttcatcatcactgctttttgtgtgttttcagcctctttctatctcataacttcttctcttttgtataaatatggttcgctctcttttgtctcaacccttatatcctaccccagcccccacttcctttcttacctacatggatggacatttcttacctgtacacaggcttaaaagaatcaatgtgccatttgtctctccaccctccccaccatgcacacttcagcccatgcttcttctccagcctccccactgaaacttattctaaaagcactgtagctgtagttgtcaaatgcaatgagagactttccactggtttccttctctgtgacttttgacattattctcctgcttcagcctcccgagtagctgggattacaggcacgagccatgacgcctggctaatttttgtaattttagtagaaacagggtttcaccatgttggctgggctggtctcgaactcctgatctcaagtgattggcccacctcggcctctcaaagtactaggattacaagtgtgagccactgtgcccagccgaccgtgccttttttcctaaccccgtaatttttctgattttcctctttggcccctcccctattttcagggtgtctcctcctcactttgcctttatttcttcaggagtctgtttctctctccttctcactgtaacacttggatgaatgatctcatctgctgtgggcctagtttccatctctgcttataaccccaaatctcatctgcagtcgtggacttttctgtctacaggtctgtgtatccaagtcatcatctctgtctgggtgtcctgtagccacctcagactcagtatacactgagtgagtgttcctccctgacacacttcactggccttagccccacacctgccttttctccttttccccatgtttataagtggtgccgttatttacacattttctgaagccagaaacagattcttccctcattcatttcccacgtcactaatactaatttccatttccatgatgtattcctatttctttttcttttttctttttttttttttttcaagacagggtctggctctgtcactcaggctggagtgcagtggcaccgtctcggctcactgcaacctccgcctcccaggctcaggtgatcctcccacctcagcctcctgagtagctgggactacaggtgcatgccaccatgctgagctagttttttagattttttgtagagatggggtttcgtcatgttgcccaggctggtctcaaactcctggactcatgtagtccacctgcctcgacctcctgatgtgttgggattacaggtgtgaggcaccgtgctcagcctccgtaatgtatttcaaatctgttttcttctctgttcacattggcttggttcaggccctactacgcttttcctcgtcattacagtagcctccaaacccatctccttgtttcccttctgttcccacttcagtccattttcatggtatctggagtaatctttgtataatgcaagtgtgttttccactctcctctctaatagtgctgcacaatttttatgaaaaagttaaacttctttagcattatcatactgggctttttggagattgacccctttacacacctctctaaatcttttctacccattttcctagaaattattcatttcagtaaaactgaatcacttggagttcttctagcgtgactggtttttaatacctcagtggcttcaaatatgtcattccctttttgaaatattcttcccctcctctctctgacccatctcaatcaaagttctccttctgcaaataccagctcaacaacctctttcccgtgagtggtattctcatccagtggaggtggtggttctcgttcactaagtccagaggggctcaggaatgtgtattttttaaaagctgggatggtgttgctgtaccttttccaactgatagtcattatgtaatttaaaaatgtgtttctggctgggtgctgtggctcatgcttataatcccaacactttggaaagctgaggtaggaggattgcttaaggccaggagtttgagaccagcctgggcaacatctctacacagaacttttttttaattagctgggacgtggtgatgcatgcctgtagtcccagctatttgggaggctggggcaggaggatcacttgagaccactaattcaaagctgcagtgagttgcaatggcaccagtgcactccagcttgggtgacagagcaagactgtctctaaaaaattttttaaatgcatttctatacatagtacttgacagttgctgatttggttcagaaaacatttgttgaaaaccagctacatgtttgatactatgctatgtatcgaataatttatggtatacttgaggagattaacacataagcatgttacagatattgtaagatatgacagtgcattgatggagctgagaagaggctctgcccaaggaggcagggatggcttttaagaaaaagaatggtagcctgaactaggtaaataaaggggaatggaaaaagaattttttaaaaattcagagtcccagatctttcttttctagatttggattcagccggtctggaaatgtttatttttaaacaatcttaacatgattcttttacactcactatggcaccactcctcagactgacatatggaaactacatttggagttctgaatacgagaaacataaaggaaaaaggatattttaaattaggaagaatttgggctgggtgcagcagctcatgattgtagtcccaacgctttgggaggccgaggagggaggatcgcttgagcccaggaatttgagactacagtgagctgtgattgtgccactgcactccagcctgagcaatgtgagaccttgtctcaaaaaaggaagaaaattgaaaggatttgaagaggtccataatctgctacaacctagagatgcctcagttgtctcagttaactgtgagacattgtagaagagatggacaagaacttcgttgtttgaaaagagagtagcttgtaatggttactttgggaaacgtctttatactattagagactaccaccaaattttgagatcttcctatttgcagtacaggtagaaatcccagtttactatttggtctaaaagggagtgccagcaattgagtcaactgtcatgtcttttcactggccatgaaacaatctgtgtgtgtgtgtgtgtgtgtgtgtgtgtgtgtgtgtgttaaaaacccataccataaatttcttgtaggtgtatattaacagtattgttaactgtatgcacattgttgtacaatagatttctggaacttttccatcttgtataactgaaactctaaatccattgaaaaactccctatcttcctcttcccccagcccctggcagccagcattctgctttctgtttctatgagtttgattactttagacactaaatatatgtgtaatcatgcagtatttgtctttctgcgactggtttatttcatttgacatactgtcttcaaggttcatccatgtgaaacagtcagattttaaaggaaattaacacagagactcatgattctggtagtgtcaggttacatagtccatggtttgttgctctacaaaacaaaaagattctcaaataaacatactttttaaatgagttactagagggggaagaaggaagggaaaacttctatgctttcggcacgctccctgcatgatcttagcaaatggcataactactttgaatgcagatgtcagtatcagctctgagatttgtatgcagctaataaagtagccccaagatgtattaagcaaaaatgaatagaattttgggg

SEQ ID NO: 754 - DNA, 32742 bp, Homo sapiens
  source 1..32742: mol_type = other DNA
agcggcttcttcaagaaacagatcctgcagcataatctgccagggccctggcaacaggaaccggtccttcaggcagcgagcccagggagcagaatcctggcgcccccggcgcgcggccctcagcgtgctcacgccgctgcgccccacccagcggtgcctgccctttggtcccccgcccttctctccattttgtcctcagccccagcagccgcccggctggctgcagaggccgaggggccgagggcaccggagcgcaagggattccgcggcaccacgtgtccaagccgggctaaggcgggcggagcgggccgggcccggctccccgggcctgagcgcaaaccagcagcgacgcggggtcccgtccgcaccggcacccggcccagccggggcccggtctcccgggcgcacgtaggtgcctcctcctggacagcgcgatggggcccttctgggcgagaaagggtaagaccggggcgcctatgcggtctctgctgtcagtgcccgcggacacgggagggcaactgatggtcttcggtacaatgagggcagtgatggggcgctccggaccccaggaccaccctttccaatgcgggaggtatccagggtgctcggcgatgcacagaagaaggtcgtggaaaatggggaatcaagggcactctcagcacatggaggccaagggaaaggccctcctgtttgattggtttgattggttgttgagacggtcgggctggactccttgttgcaacgagcaagattagccaggctaatgtataggccgtcggttttgaatctccctttactggttgttctcaggagtgggtttggaaatggtggcttttgataaggaaggttcattaagaataggtgttctccaggaagcctccattgagctctccaaagagggagacagtcccaagtccccagaggacacttttcaagtttctgcttcctggagaaactttcttaaagactattccaggtgagaaaggatgagccattttccattaatgtgctgttgaagggctacgttgatgagctcaaaacctcctcatggtgggtggtatcaacaggtttggatttaaaatagaggtaaattgtacagtaaaagatatctgtgagcttaatttagtatgtggaaagagattctgaaagctttttaaatgaaagaagctactggggaaaatcggaaaatcgttgcttttatcttccccagtgtccagcaggtagtgctatcaaggaaaacaggagactccactgctaggttcctcttgcgtcctctggccctgaccccagagcctgtgcagcagaagcaaagggcagctataacatctggatatctcttctcagaaaagggccacatttgaaccctacagatcagaatcttcaacttaaagtttctgccagatcagattcttcagtaggcacatgttaggaatgtttgccttttcctccccatagggcgcccttggggcaaaaggagtcaggtattctctatgccaagttttctccacttgtacatttggagagcagtagcacctgtcgctgagagatgagcccaggtgaaatcatttttttttatatgcttcagattttaaagcagcaatacattatcatagtgcagattttgattgcttaatttattttacaatagtactattttaatgcagaatatatttaaaatacgctcttcaattcataatgatctgtacatatttaaataatattttattcactttatttgtatttaatagtctttaaggtgatatcataattgaaactaagtaattgtatgcattcataaatgctgatgcactgaacaaaaaaacaaaaaatgggtccaaaactttatttttacagatgatctactgaggcttgcagagagtaagtgagtaatttagccagtggcacacttagaaccagctgtctctaatagtcatggtttttttttttttttttttttttcatattgtagtaacagtaggtaaaagataagcacaaaagagtaatactacaaactagtagttgacaaggtttggagatgggatgagggtgagaagaatgtgacactaaaagtgtagcatgaaggagatctttgtgaggatggcatagatgtgtatcttgattattgtggttacacgaatctacatataagataaaatgacaggcctggcatggtggcttgcgcctgtaatcccagaactttgggagcctgagaaggatgggttgcttgagtccagtagtttgagaccagcctggacaacatggtgggaccccatctccactaaaaataccaaatataaaaaaaataggtggacatggcagtaggtgcctgtagttccagctactgaggaggctgaagcaggaggattgcttgagcccagggtgcagggagctgtgatagcaccactgcactccagcctgggtgacagatcaaaaccttgtctcaaaaataaattaataaattaattaaagaaaattttaaaaaatcatagagctgtaaacaggcattgcaccaatgtcagttttctggctttgatatgatactgtagttatatgatataaccgttggggaagacccggtgaagggtacatgggatctctctgtactatctttacaacttcctgtgagtctataataatttcaaaataaagaaactgtttttacagtcattttgtaagtacatcaaattccaacattggccatttttctaaatctgaatgtatacaaaatatttcattttactatatattctaagtatgtaatacatacttaaaatagttatggtacaaactaacacctgcatataactttattgatatttaaaagaccatacacaccgttaagatgtaactaatcatgctggagtatcaaatagcatcttagcaataggtattaatttcattttagtcaatttctgtttatttaaaattttggaaaacaaagagaaagtgttttatttaaatagtacttgtgtgaaaataacagctggtgtttttattttcttctctctctttttttttttatctgtgtaaaaatactgaggttttgagtctgcatccttcttcttagcaggatgttttctgtggttcaggtgacagaacccagagatatcaccaagcagacatgatagacgggataggatagaaaaaaaaagaacaaaactgatgttcataaagatacctcactgaaagaaattaggaaagtaaattaagttatttgaaatatctgaaaagtcttttatggatgttcagagccaccctcaccaacatcagggtgttttttctttggggttggccaccaatggcagaagtcccagaatacctaaatatatccccaaagaaaacagagactaaagcttctgtggtcttgtagaccgacagcaggtactggcaaaggaaagaaaggttcctgtgtacacacttctgacaaaagaaatgttttgtatttccagtacttcagaactttccagaacttcagtttttctagtatacttcacaatttttatcatctctgaatatgaatcatactatttacttattcttacttaaattaacacattgtttttttactcagatttatcaaaggaataatgcccacctatgaaataatgtttcatctgttagttacatttctcctaatatgtacaaataaatatatattatagctttataaaagacatccatgaaccacctaaaattatctgtgtaccacctaatgtatcaggaaacactgtacaatgacacaaccttgggaggtgctccaggacctgatgatgaggagaagcctagctatacagagtaagtagagaaaatattaaattaaaaatgtacctctagattatttttcctatatggtcttgtgaattgtcaaaatgtggttagaatgagtacttctattgttagagcagtccatttaattattgggaagatccatttatccttatattgagagtagatgtgaactcacctaattacctctactgtatctctactgtcacccaaccaaaaattctctataataataccatgtgacattttgccagatgcctcatcaaagtccatatgctttgccagttctaacactatctgtaataagagaaaaaaaatctagacttggtccaagtaattcttagaagcccaggatgatctctgtcacttttttcttttctaagcacccagaaaccaacattttattaacttgtgccaaaatattgcccaatatttcatttcagcctcatcaatcagtgttttacaggctttcccttctctctggcttttgaaaatcagaactatatgcttggcttctatatttctaatatcttggaatcccatgctcagggtgcttcatagacattaacagtggtgccataattctatttgtatgagatgagattgtaaagcccagttcataacttgttaaatgtcttaagagaagctagtgacatgacttgacctgagctttattctcttttgccaagttttattttttcctttttagtttggaaataatttttacttgacagagaagcaaacgagtcactagaaagttatgtgttctcttagtttttcatcagtattaaatgaactgtaacaagtagtgagtttatacttttcttttgcttcttacttaaaatataaagtgaatatttttctatttcttatggtaagccatagttcaaaattagagtccagtcttcttgaaactgtgaactgaagttttaccatatcaaatgttcttgggaccagaaccttagatttttccgttttttgcattaatagtagtggtatttattatcataatatttaattcagcttttaaattaaccaaacatcattattttatctgaaaatggtgggatgtgagagagattacaaaataagaatattccaaatgaccttctaagtaaagatgtgcaagttgaatacagaaagagaaagaagtaagaaattatctatttctctgaaaataaggaatgaaatatgaatttaatctcagaagagtacatattttcttattccctaaagaaaactgtgaacctttggtgacccaactaaagacagttttctgacttaaaaaccttaaaaatcaatttaggttcaacttattaactgtgagaatgttcttcccaagggcagaactgatgtctttggtagtataaatgaagaatgggtggaaggtaatattaacctgttctcttccttctttcttgatttaacctgtgcctggggaaactcagttcataatttcatcaattttgcaccattaatacacaccaaattaactttaaatggtatggaatgatagtctaagtgagtaggagccattaaacctaatgacacttaaatgtattcatcacattgatgcgtgtcttttaaagggccattatgtttttccacaagagagaaggggtttgaaagcgtaaactttatattatctatatgaacattctttagtatccatttggttcttaaaacatattaaaatggaaggtggctataataaagttgtttttaaattttaatcaaaggggaacatttcctgtcgctcccaagagtaaggctgtcggggggtgctttgtccatggtgctgaaacgggctcttcctcagtgacctcactacagaattaggtacagaaagaaaaaaaaaaaaggcatttcttccagttaatgacttacaagaatacaaatattgactttaaaaattatgtattcttcagttttataaccagcatggaaatagaatttgcagacattactagcttgtatatttgagtgatgtgcttgtaggacgaattgacaaatatttgtttttaacctatctgaagtacagcttggaaatttttatcactttactcctacaatttcttgattcattaagttaataatatttaaaggttgtcaatttctatttcttttctaaaaactcttcatttcgtaattttttagtcccatagtattgctttgtctctgacttttattacaatagatactttggacatttttcatataattttaaataaaaattatgcctcctcaaataatgagccattatttccattactatttatatgtttgtagaatacttattatccataacaaattgtcaagaaatacttaatgcatataattgtgagaattatgaagaatttttatatatggcccttgcccctgagaaaccttaaatataataattactgcatttgcataaaaaataaaataacaacaacacaaagcagtgtatattactagaatttaaggtcattgagggaccggacctgtttgattttttatagctttatctcaagtatgtaacacagttcctaactcatagtgagtgcacaaaaagtatttgttaaatgccatagaacgttagtgaatgaataagtgcaaaaagagctagaattggtggcacaaatcagatgatgttgatttacagctacccacttaagaagaggtatgcattgtctaattattatgttacagaaattgatatacatttatctgttttcctccatgcattaaattatgaaaagcaaaaataagtctaacatgttttcgtgtatattaaatgttaggtattttttaagtgttttacacatgccacttcacttattgctcactacaattattacaatttcctctttacaaatgacgaaagttaagagactgtcttaagtaacccagtcggtaattagaaattcagaatgaaactcagcctgtctaatgctgagtttttaactattactatgccaaacccccaaactatccttcagcattaaagagcttttgtaattttcatgacatcatgtgaattctagctctttagaaatctttctcttgatctgtttatggaagatctgttacctaggcaaccttgcttttctaattaacagtagagaagtcattttcctccctcttcatagcaggcaaaaggaaaatttattcatggggaaaagcataaaatccaagagccagagccatcctttgggtttatgtagaaagaagaggaagaaaaatgacagagtgggaaaagaatagatagtcctctctaccctctaccctaagttggaaaggttttgtggggactccagtgattattctctaacaactagaatgttctctcctacttctttttgaagtgaagtagctgtggcatgaagttcagccaaagacttttgaaacaatgttccagacagaggcttatttttcagtttccaacaagaccaatatcaaacaccctgagctagattgataatgtttatacaattatattaaacttacatacagatgtttaataagcccattatataatttccttacagtatttcccagtctgatatttcttatgtttatgccacatttttaaaccaaaacttttaaatccagcatctattattcagctcttaccactaatgaagtttgtccagaaaacttatcaatcatcctgaacttaactcacttatgatcacttttcataaagaagtacaaaaagaacagatttagtagcttagctgtgttaatcacataaaattcttatcattcttaaatttgcatctggacatccagctagaaacttaaaaatgaaagttaactaagcccaatagttctgaaaacattccacatactgacaatacctaaacacttattttccttattggaaaacaccaaagacaatctgattttccttgctgaaataataataaagttatgcattaggtgaagtgtattagtttgttctcacactagtaataaagacatatctgagactgggtaatttataaaggaaagaggtttaattgactcacagttacacatggctggggaggcatcaggaaacttataatcatagtggaagagaaggcaaacacatccttcttcacatggtggcagtaaggagaagtgcaaagaaaaaggggggaagctccttataaaaccatcagatcttgtgagaacacactcactatcatgagaacagtatggaggtaactgctcccatgattcaattacctcccaccaggtaactcccatgacacgttgagattatgggaactacaatttaagttaggatttgagcgacggacacagaaccaaaccctatcattctgcccctggcccctcccaaatctcatgtcctcatatttcaaaacacaatcatgcctttccaacagtcccccaaagtcttaactcattccagcattaacccaaaagtccaagtccaaagtctcatctgaaacaaagcaagtcccttctgcctatgagcctgcaaaattaaaagcaagtaagttacttcccagatacaatgggggtacaggcattggacaaatagacccattacaaatgggagaaattggccaaaacaaaggggttacaagtcccatccaagttcaaaatccaatatggcagtcattaaaccttaaagttccaaaatgctctcttttgacttcatgtctcacatccaggtgatgttgatgcaagaggtgggctcccatgaccttgggcagctctgcccctgtggctttgcatgagacagcccaactcctggctgctttcacaggctggtgttgtctgtggcttttccaggcacacagtacaagctgtcagtggatctaccattctgtgatctgaggacagtggccctcttctcacagctctactaggcagtgcccccaaccccacatttctcttcaacactgccctaacagaggttttccatgaatgttctgccctagcagcaaacttctccctggacatccaggtgattccatacatcctctgaaatctatgtggagattcccaaacctcagttcttgacttctatgcacccacaggctcaacaccacatggaaagtgccaaggcttggggcttgcaccttctgaagtcatgtccagagctgtaccttagccccttttagccatggcttagaacagctgggatgcagagcaccatgtcctgaggctgaacacagcaggggagccctgggcctggcccatgaaacctttttttcctactaggcctctgggtctgtgatgggagggactgctgcaaagatctttgatatgccctggagacattttccccattgtcttggtgattaacactgggctccttgttacttgtgcaaatttctgcagctggcttgaatatctccccagaaaatgggtttttcttttctattgcatcattagactgcaaatgttcaaaacttttatgctctgcttccccttgaatgctttgccacttagaaatttcttccaccagataccctaaatcatcactctcaagttcaaagtttcacagatctctagggcagggagaaaatcccaccagtctctttgctaaaacatagcaagagtgacctttactctaggccccaacaagttcctcatctccatctgaaaccacctcagcctgcacttaattgtctatatcactatcagcattttggccaaagccattcaacaagtctctaggaagttgcaaactttcccacatcttcctgtcttctgagccctccaagtctctagaaagttccaaacttttccacattttcctgtcttcttctgagccctccaaactgttttaacctctgcctgctaccaatttccaaagttgctttcacattttcaggtatcctcatagcagcaccccactccaggtaccaatttactgtattagtctattctcgtgctgctaataaagacatatctgacactaggtaatttataaaggaaagaggtttaattgactcacagttttggatggcttgggaaacctcaggaaacttacaatcattatggaaggggaagtaaacatgtccttcttcacgtagcagcagtaagaagtgccaagcaaaaaggggagaaaccccttataaaacatcagatctcatgagaactcactcactatcacaagaacagcatggaggtaacagacaccatgattcaattacctcccaccaggcccctcccatgacacgtgcagtttatgggaactacaattcaagatgagatttgggtagggacacacccaaaccatatcatgaagtgactgacatattattgatatgctttccagtcctgtatatatcagtaaatatctagaggcttgtaaattaaatgtgtgatcgtttgctccagaatattttttcccagttattgaattacgtatgctgttatccaattattgtatataaaaagaagaaaagaaacttcatcatttttaaagaccctaggagaagggatgagatagcacataacacatcttaaatttcttcttaaaaatttgacattacatagcaatccctgctttacattccctctgtacaatgaaaaacaatattaaacataatttgaaattaaatttttcctatactttaaaatatatcatgttaacacatgaataagttgcactgctaggttttcttttactctttatagccttaactttttcacattatttttcatcccattatactaagcttaatctatatttcactcccctaaggtatttctttctccttttatactaactgcttttatgtacattaatgaaaattttgcacgccaaggagaagaggtgaaaacattcagacacacactcttgacttccttaatggacattcataagaagtgaaacatttcttttctcagtgtctctaatatatgttacaaatgagatcaggttaacattaatgtgaccacaaacttccagctgttcaaatttacacattcatcgtgttgctcgttttactagtgcacaagggaaataccatcttctgggacttttcttcccatcaggatatttaagctggaagctttgtcaggctgcgtcagtgttccctgagtaagcaggaatgcaaactgcaattttagcattagcattctacttagaacaaagggaggtgcccggaagcagtacacattagtgcagagttttctggtttccctttaaagagaaggcacagccatttgactcttgagcttatttaaacaagtcaccagtccttgactccagaactgaagctttatatgttctttctatttggctgagccagtaatttttgattgcttcttcttcccaagaggtaagtttgcttgctgtggtaagggaggtatatttgttttgctaaggggttatattcttgtcaaagatttgtcgtaaaaatattaaggaagatgtggttaactaaatcacatttcataaaatgttgctgatattccaaataagcctagttttggagttagaaatgatcgggagaaaatttaagttttcaagggagcatttaaatagcaaagaatttgtacagtctgactgtacaatttcctgcaaagaaattgtaaatcatgtattataaaattgttcctaatttgtcatttaaagctgttttccttttatcaaactgtacaaaactaatttctttcggttcttcactctgagtctctctgatccgattgaccaggagagagctgctaactatagtagcatgctgccattcctgcacttggcaggttgacagtagttgagcgaaggagtttaaattagtttctatttagagtttatcccagattatataataattttgtactgcaggctttgctctagaatgtaagtgaaaattaatgctcttgatctagaaacattttaaattgaattaatttgaatgtgatatgctagttgttttgtagttgtacaaattgaatacgtctgtagtatatgagagtgtatacgtgttctcctggttgggagctttcacaggttagggttgaagtgccatatctgctcttaagtaaatgtgttgtattatttattgctaaactatcaagtatatacattttcaaaaacagctaccatgaaggtaatggtttagtttaaaacttggagactcttgcaggtgaaactggatttaaatacagctatttttcttattggctccaataccatttggcattaagtgggtaccagttaaactcccacctcagcaagaggggaaaggttgttggccagtgctctaaaggcagttttatctctagcaagacttataatatttttgcaggcattcagaaatctatcctgaaatagaggtaattattgttactgtcagagtcatctcgttcctaataacatagagagctgtcttacttgtgctgtccttaattcctcacacctacctgatgtcccaaacctcaccttgtttgaggtcacttaggtgtaatagcaaagcaattacataagaatagtgccattattgtgcggacaaactaagagcaatgttttccaaccttaactgcacattggaagatgttaccagaaaggggtcccgatccagaccccaagggagagttcttggatcttgcacaagaaagaattcaaggcaaattcatagagtaacatgaaagcaagtttattagacaagtaaagaaacaaaggaatggctactccataggcagagcagcagcatgagctactcgttggctatttttatggctatttcttgattacatgctaaacaaggggtagattattcatgagttttctgggaaagggatgggcaattcccggaatttagggttcctccctctttttagaccatgtaggttgatttccttatattgccatggcatttataaactgtcatggcgctggtaggagtgtcttttaacatgctaatgaattataattagcatataatgagcagtaaggatgaccagaagtcactttcatggccatcttggttttggtgggtttaggccagcttctttaccgcatcctgttttatcagcaaggtctttttgacctgtaccttgtgccaacctccatcctgtcacttagaatgtctaacctcctgggaatacagcccaataggtctcagccttattttacgcagcccctgttcaaaatggagttgctctagttcaaacgcctctgacagaatcacatggtgggctccatgcatcagtattttttaaaggtcttcttgtaattctaagatttatcaaggttgagaacctctgccttagtaagaattgtcttcctgcatgattttaaaagttatttgaagctgggcatgctagctcactcctataatcccagcactttgggaggccgaggcgggtggatcacgatgtcaggagatcgagaccatcctggccaacatggtgaaaccctgtctctactaaaaatacaaaaattagctgggcatggtggcgcacacctgtagtcccagctactccagaggctgagtcaggagaaatgcttgaactctggaggtgaaggttgcagtgagcagagatcacgccactgcattccagcttgggctacagagcaagactctgtctcaaaaaaaaaaaaaaaaaaaaaaaaggttatttgaaactgctcttccaccccacccccagacagcaatatcaagtagtacattatctacttataagacaaagtgagaactggagtctcaagcttaacctaacaatcttaagttatgggacatgacataaaattcataggggtgcaaatgtgatgcttcatctaaatgctaatatacttgaggtcaactctggaaaagtaaactttaaaagagtgtgacttttaaagtttacttttactctttttactttaaatgttacttttccttttcctttttttttttttttttttttttttgaggtggagtttcgctcttcttgcccaggctggagtgcaatggcgcgatctcagctcaccgcgacccccacctcccgggttcaagtgattctcctgcctcagcctcccaaatagctgggattacaggcatgcaccaccacacctggctaattttgtctttttagtagagatggggtttttccatgttggtaaggctggtctcgaattcctgacctcaggtgatccacccacctcgccctgccaaagtgctgggattacaggtgtgagctcccggacttacttttccatatctaaatgtaataaagttgtgtttgagttattcagcaatgtttatcacatttctgtgtctgagacccatcttagtctgaagtttggaaaacactcactccagccagtttgctcaggtagaaaaagtgactagaatactgcatttatagggttgctgaaagaattgaagatataatgcatgataaaagtctagcacagtgcctcacatacagtgggtatttaatatgttagttttcaccttccttcctcagcttattaattttaacattaaagtgtctcaagttaaccttaaggcaatgagtagagaaaaactattatttcccatatattatgatggttcatctgttgtttttcaaagaggattaattcaaacctttgcctggaacatgaggtgtatttttttgcaatttacttcaaataattgaagaaattcaaagtcattaaaaagtcatgcagaaaatgtgaagtttattaatttgtctaattgttaaagaaaagaaataactaaaatatgtccttattttggtcattggaaaatataccacagaatgcatttcaaattatttgtgtgtgttcatattttttaattgaaaaggtaccaggggttaacttgtatgtattacttttagagtatcttacattttttttcagttttgtaaatgactattgtcacttattggcacaagttctttaaaggtctctcacaaatcttaacccatgtgcataacactcgcctctatccaacaaaccaactacagatttctagctctttttttcctatatcttccttcacacacacacacacacacacatgaacaccctgaaagacagagaaaagagagagaaatggagactcagagacaaaaagacaaagagcgagtgagagatttttccacaacatatattccaagatcttaaccaacataaatgttgatcacaactgactactgccaaagcaatccaataaataccaaagtgacatgttcttcattatgcagagaatcccattccctcttgggtgccatgtccatagctcaatttctgaagacaatatttaagtcatttttaatcatacaacttctggacatcagactctgaatctcaatccagaaatttctaatactttttctattccagttgaattctcaatcatttatatttgtatacaagaaacctgatgctatactgtgaaattggagttaagcaactgcgatttataatgaaaccctggattccaagttgcttgactacagttgattaaatgcacagcagccttcaaatgacttacatttgctatattctttctaataatggtaaccaactacatgataacttaatttgataatgacagtgttttcctgagataagaatgcttgtgatttttgcacattgatattgtatcctaagactttgaggaagttgcttatcagcttaaggagattttgggctgagacaatggggttttctaaatatacagtcaagtcacctgcaaacagagacaatttgacttcctctcttcctatttgaataccctttatttctttctcttgcctgattgccccagccataacttccaacactatgttgaataggagtgatgacggagggtatccttgtcttgtgctagttttcaaacgaaatgcttccagcttttccccattcagtatattggctgtgggtttgtcataaatagctcttattattttgagatatgttccctcactaccaagtttattgagagtttttatcatgaaggggtgttgaattttatcgaaggccttttctgcatctgttgagataatcaagtggtttttgtcgttggctctgtttatgtgatggattacgtttattgatttgcatatgttaaaccagccttgcatcccagggatgaaaccaacttgatcatggtggataagcttttcaatgtgctgctggatttggtttgacagtattttattgaggatttttgcatcagtgttcatcagggatattggcctgaaattttctttttttgttgtgtctctgccaggttttggtatcaggattatgctgacctcataaaatgagttagggaggagtccctgtttttctattgtttggaatgatttcagaaggaacagtaccagctcctctttgtacctctggtagaattcagctgtgaatccttctggtcctgggcttttttgtttgttttaggctattaattactgcctcaatttcagaacttgttattggtctattcaaggattcaaattcttcctggcttagtcttgggagggtgtatgtgtccaggaatttatccatttcttctgtattttctagtttatatgtgtagaggtgtttatagtattctctgatggtagtctgtaattctgtgggatcagtggtgatctcccctttatcattttttattgtgtctatttgattcctctcttttattctttattagtctggctagcagtctatctattttgttaatcttttcaaaaaaccagctccggaattcattgattttttgaagggcttttcttgtctctatctacttcggttctgctctgatcttagttatttcttgtcttctgctagcttttgaatttgtttgctcttgctcctctagttcttttcattgtgatgttagggtgtcaattttagatctgtcctgctttctcctgtgggcatttagtgctacaaatttccctctacacactgctttagctatgtcccagagattctgatacattgtgtctttgttctcgttggtttcaaataacttatttatttctgccttaatttcgttatttacccagtggtcattcaggagcaggttgttcagtttccatgtagttgtgcagtttttagtgagtttcttaatcctgaggtctaatttgattgcactgtggtctgagagactgttatgatttcagttattttgcatttgctgaggagtgttttacttccaattacatggtctatattagaataagtgtgatatggtgctgagaagaatgtatattccgttgacttggtgtagagagttctgtagatgtctattatgtctgcttggtccagagctgagttcaagtcctgaatatccgtgttaattttgtgtcttgttgatctctataatattgagagtggagtgttaaagtctcccactattattgtgtgggagtctaagtccttttgtaggtctctaagaacttgctttattttgctcattagttgatgcagtttcttcacagtgtcaatgttctttacaatttggtatgtttttatagtggctggtactggtttttcctttccatatttagtgcttccttcaggagctcttgtaaggcaggactggtggtgacaaaatctcagcatttgcttgtctgtaaaggattttatttctcctttgcttatgaagcttagtttggctggatatgaaattctgggttgaaaaatcgtttctttaagaatgttgaatattggcccccactctcttctggcttgtagggtttctgcagagagatccgctgttagtctgatgggcttccctttgtgagtaacctgacctttctcttgggctgcccttaaaattttttttttttttcatttcaaccttggtgaatctgatgattatgtgtcttggggttgctcttctcgaggagtatctttgtggtgttctctgtatttcctgaatttgaatgtttgcctgtcttgctaggttggggaagttctcctggataatatcctgaagagtgttttccaacttggttccattatccccatcagtttcaggtacaccaatcaaaagtaggtttgatcttttcacatagtcccatatttcttggaggctttgtttgttccttttcattcttttttctctaatcttgtcttcatgctttatttcattaagttgatcttcaatctctgatatatcttctgctatatcaatttggctattgatacttgtgtatgcttcacaaagttcttgtgatgtgtttttcagctccatcaggtctttcatgttcttctctaaactggttattctagttagcaattcctctaacgttttttcaaggttcttagcttccttgcattgggttagaacatgctcctttagctcggaggagtttctcattacccaccttctgaagcctatttctgtcaattcgtcaaatatattccctgttcggttttgttcccttgctggcgaggagttgtgatcctttggagaagaaaaggcaatctggtttttggaattttcagcctttttgcactttttcctcatcttggtagatttatctacctttggtctttgatgctggtgattcttgtatggtgtttttgtgtggatgttctttatgttgatgttgatgctatttctttctgcttgttagttttccttctaacagtcaggcccctctgttgcaggtctgccggagttggctggaggtccactccagactctgtttgcctgggtatcaccagcggaggctgcagaacagcaaagattgctgcctgttccttcccctgggagcttcatcccagaggggcacccgccaaatgccagccggagctcacctgtatgaggtgtctgttcacacttgctgggaggtgtctcccagtcaggaggcacgggggtcaggaactcacttgaggaggcagtctgtcccttagcagagctcgagtgctgtgctgggagatccattgctctcttcagagccagcaggcaggaacgtttaagtctgctgaagctgtgtccacagccgccccttcccccaggtgctctgtccgagagagttgggcattttatatataagcccctgagtggggctgctgcttttctttcagagatgccctgtccagagaggaggaacccaaagaggcagtctggctacaacagctttgtggtgctgtggtgggctccacccagtccaaacttcccagtggctttgtttacactgtgtggggaaaatcacctactcaagcctcagtaatggcagatgcccctccccccaccaagctccagcatcctaggttgacttcagactgctgtgctggcagcgagaatttaaagccagtggatcttagcttgctgggctctgtggcggtgggatctgctgagctagaccacttgggtccctggcttcagccccctttccaggggagggaacggttctgtctcgctggcattccaggagccactgggtttgaaaaaatgactccttcagctagctcgctgtctccccaaacagccatctagttttgtgcttgaaacctaaagccctggtggtgtaggcttccaagggaatctcctggtctgtgggttgtgaagaccatgggaaaagcatagtatctgggcctcaatgcaccattccttatggcacagtccctcacagcttcccttagctagggcagggagttccccaacccattgcgcttcccaggtgaggcaatgctccaccttgctttagcttgccctctgtgggctgcacccactgtctaaccagccccaatgagatgagctgggtacctcagttggaaatgcagaaatcacccaccttctgtgttgatctcgctgggagctgcagaccggagctgttcctattccgtcatcttgccagccacccccagcttttaaattacataatgtattttggctgggcttggtggctcacacctgtaatcccagcacttcgggaggccaaaccaggtggatcacctgaggtcgggatttcaagaccagtctgagaaacatggagaaactccatctctactaaaaatacaaaattagctgggcatggtggcacatgcatataatcctagttactcaggaggctgaggcaggagaatcgcttgaaactgggaggcagagattgcaatgagctgagatcatgccattgcactccagcctgggcaacaagagcgaaactccatctcaaaaacaaaacaaaaaaaattcattttgacttcataaatgagtttttcaaaaaggtttacactaataactcatttttaattcaagtagagagaaacatgccatcctcatttttataactaaatatttataaagtacccatagcatcttttgtgcatattaagtcataggcctaaatcagttgtaccttcttgcaagaagcctaaatccaatttaaataaatgatatgaaccctaccaaaattgaattagagattggcttattttcatatttcagaaaataatatttctgaaacacattgaacaaaactagtttgaaacatttcaaatgctttaatcgctcaaagtattttagggtaaggtgctgttggcctaattcatgtggccaaaaattaaattgcagtggaacttagaacccacaagagcattactataggaatatatctgaggagggccatctgccatcctcaatgagcttccctccagcccccactgaaaaaggctctttgaggtttaggctgagtgtacttctcagaggacacatctgagaaaatgccccatgtgtgtatactccttctatctctaatggcatgaataatgaataagaagcttatgaaatatgcactcaaatagccttcctctctttttaagaaaacactatgccacacctatagtaagaaaaaaaaactggaaatgctgaaataagatttgtcttgaatttaatgattttgacataaatattttttttgcatggaaatttgaattcattctttctgaaagaattattatgggggtagggaaccaacattacacatttgaaatcagcattttcatacccaattactatgctataaattagaaaaaacaagtaacttcatctagaagatacataatttgagagctgttgactctgtcttttaaaaagaaccaattttttatctgtttagcacaaacaggaaaaattctatattaaggttccctttgatgtccacataaagcaaagtctctctctctcttccattctaactctatttctacctctccctccctccctccttccctcttgtttctttagagaaaacaattaaattatactcctagaattctattataaatggaagaaatgaagggagatggagagggaagaaaagaaaggaaggaatcaggattgtttggtaaaaactgatatgctggcagaaataaagcaaatcctctttaatttaaaattttatttaaagatcttatgtttaaacaataatgaaagataaattatagaagtgaatgaccatttatatcttcattcagtagtattcacaaaaacataaattattacacaatagccttatcaaaatagtcctataggaaaaacgtcacagtaaaggtcaggaggtatttagaaattcaatgagctagtatacatgaaaattatttgtaaaactaaaatatataaggtaatagtattaaaaatttatttttctaaacttttttataaataagaaaagtctaattgttaaaattttattttttatttttttatttttttttagatatacctaatgtaaatgatgagttaatgggtgcagcacaccaacatggcgcatgtatacatatgtaacaaaactgcacgttgtgcacaggtaccctagaacttaaaagtataataataaaaaaaaatttaaaaaaagttttaaagtagaatttaaactgcttagtattcagcttggtatgtggatgcatacatatatgtgttggaaacagctaataacagaataataaaacagaagctaatttctacatcatgaaaatgaatttattagagttctgctcataattctgttaccattactgacagctaataacagaataataaaacagaagttaatttctacatcatgaaaatgaatttattagagttctgctcataattctgttaccattactgaccttttttgtttgacctaagcctgctaaaacctctacatttatactgaaaataaatgtgactatgatgagcattcatcagtttttgaaagattaaagtgcctcgattgctcacacatgtatggattttttattttacataggtagctaggatccaggttatgtcaatatcgcttgaacaaagacaattgtaatcaaggaataaacatttatttaaactcacaaataaatgttcattgtatgggaattataaaatcaatgaacacattcttctctattatgaaatagtagcctctggctgcatcacattttccttggacaagttggagaagagacgtggggaaaggaaagaatcaacccaaagaagcatttaattggtataagtgaatttacatttttcttacttgcactccagatattaaaacatatagtgtttgaaccaaacctgacataggactaaatcagaaatgacaaaaagatgctttaccagctaaacttcaacacgttgatatgttttatattataatacctcatacatgtaatctattcagtcagattttacaagtatttgtgacagagacaacaaatatcttcaaactcatagatcagttgtttttttttttttttttttttttttttttgacggagtctcactctgtcgcccaggctggagtgcagtggcgtgatctcggctcactgcaagctccgcctcctgggctcacgccattctcctgcctcagcctcccgagtagctgggactacaggtgcctgccaccacgcccagctaattttttgtatttttagtagagacggggtttcaccgtgttagccaggatggtctcgttctcctgacctcgtgatccacctgcctcagcctcccaaagtgctgggattacaggtgtgagccaccacgcccagccgatcagttgctttttaaagtaattcagtgtcagagaaataaacctaaattttcagtctagtaaaatttttgctgctttcaatgtctcccctttcataggcacttaaaaatttgacatgtgaatgaatttcaatctatttgtatgtaaaatttaacatgattgaattaaatacttgtgttcactaattttcataaaatattcatcatacaaattaagaggaattttaagttataagttattaagcttgaattactagcccaatctttttcactgagactcgtttgaaggactgtcaagtttgaaaataaaacatttgccatccagtgttcaccctcagatgctctgaaatgtgtttatctttgacagcaacgatctgaaatagcaggatactattttgctatttttagtaataccatgaataatatgttttcaggtttcatttttcttgttggaaaattgtgtggtgacatcccctcaaaatcattccttaccccctactctccatagcacacatacatacagacagacaaaggtggaagaatcatattacgtgttggtttaggttttaaggaaagcaagtcatagtaatatagttaaattacctttgaaatattttaaattgcctactaagttacctagccagtttccttctagcatcagaacaggtcaatttttttaaaataccagatgaagttgttggtgtataattagaatcttaatgtaaaaatagttggatcttaaaacactagcaacaaaatggttcagtaagatgtgagaaccaaggagacagcaaatctacacctcgcatttcactttaaatctcaggccttaactggaaatgcctacgctattaaaagtctctctctctctctctctctctctctctctctctctccccctctccccctctgcctcttcttccttcccccctccctcccttattcccttattctaaacttgaatacttgtgacttgtgtttgcttaatttaaaggaaaatatgacaagactctacttttttgccaaaaagtccattagcctcctgtaattacaagctttgtggtggtgtcacgccagctctcactaagagttgcccaggaagcagtaaaacatacagaatgaacttgacttctgtcattttaaaataagctaataagctttaaaatatggaatatgcttctacttaaactgttcaaatttttcacatgacaatgaataggctgggctaaggtttttaaaatctggtctggttttaaaaaacaaaacacataaacaacaacaacaaaaaagcctgtaatcccaacactttgggatgctgaggtgggaggattgcttgagaccaggaggtcaaggctgaaatgaactgtgatcgtgccactgcactctgggcaacagagcaagactctgtctcaaacaaccaccaacaacagaacaataaaaaacaagaaatgtaaaatttgctttgaagcattttatttatgcacagtattttatgtggtaggagaggttttagatactatttaaaacacaaattactgcgtctttttttttttgtggcactactgaaaaataccaaattgatggcaatggtgttttaatattcttgtttatttctagggagtacagtcattataaaaataattttagtaggggccaggcacggtggctcacattggtaatcccagcactttaggaggccgaggtgggcggatcacgaggagatcgagaccatcctggctaacactgtgaaaccccgtctctactaaaaatacaaaaaattagccaggcgtagtggtgggcacctgtagtcccagctactcgggaggctgaggcaggagaatggcctgaacccgggaggtggaggtttcagtgagccgagatcacaccactgcactccagcctgggcgacagagccagactctgtctcaaaaaaaggaaataataataacaatagtaataacaataattttagtaaacatccttgaaatatatctaagttagttcaagctgctacatcttttcactctgttgtatgtaataattaattttgtatgaaagttggcattttattgtggtatgccaattccatgtaaaaatcagatgggatatttaaattagaggataagctaaaacaagatcattaagatggagaaggtgggatacaagagaatctcatatgaatgtaatacattttcctaaggctataagttcttttaaaaaataaatgtagtatagtttattattaatacatttgtactctgagattaaagctcttactataattttaaatatatattttccagatctcttttttttctgaaatggagtctctgttgcctaggctggcgtgcaatggtgtgatttccattcactgcaacctctgccaacccccaccactagcatgcaagtgatcaagccttggtctcccaaatagcaaggattacaggcatgcatcaccatgcctggctaatttttgtattattagtagagacagggtttcaccatgttagccaggttggtctcaaactcctgacctcaagtgatcctcccgccttggcctgtcaaagttctgggattacaggcatgagcagtggttcttaattgaggatgatcttgtctcctaggagatgtctggcaatgtctgggagacgttttttatttgtaatgacctgggtcgggggtagggggagctgctactggcatctagtgggtggaggctggagaagctgctaaacatcctacaatgcaaaggacagcccctaccacaagaattatccagcccaataagttaatagtgtcgaggttcagaaactcaggaataaagccattaactttcaaagaatatgttgtgttgttcgatattttccattcctaatccacatccacgttggtcaagtagagcttcctactcagaagcacagcagttgccatggtgttctcttccatctgaaagcagcaattttccgcagcgtccatttacagaatgtgccatatttactcagattctaatgtatattaaatatgctttggaaacttaacaagaaacgtgcaagctctcagtaaagaaaagttgtagaaaacaaaaactgaacagcaggcatctagtttctcctctcccaaaatggccttagtggattcaaaaatgggaagtgtgaataaaactgctttgtattttaaatagaagcatttggtaagtattggtataatgccttcaggacatgaaatcttcacttgttatatgattgcttatttagaaatgtgatgaagtgtgaagagactgtaccagcaggaggaatcatttaaaattttaaagatctaaaaaatagtttcttagaatatgtacatggttaccagtcaactgaaatctgcaatagagccttcttgtttcaatgtcacaaatgcactgaccgttaactcattaataggccaaagagagcttcatggtcattcatttaaattaattagctgatttgaagtcaaaagtgaagcttttcacctttaccctataatttgcctatttttaatccaaccaaaaaaatggaaacataaatttcagaaactggcaaagcaagtatgccttacccacttaattttaaataatttaaaacttttgatcatggtgaaagctattagaaaactacccaaatcaactctgctttagccagctgatttatgctaactggtagacctgtgctgtccaatgtggtagtatgaggcacacggttatcaagcacttgaattatggctagcctaaactgagatgtgttgtaagtgtaaaatacaaactggaggttgaaggcttggccaaaaaaagccaactaattttaatttttatattgttacataccgaaataatattttgaatatattaagttaaataaaatacattgttaaattaattttacttgttgctttttacttttttgatgttactggtaggaagtttaaaagtgaattatatattatattatagacttatagttggctcattacatttctgttggacagcattggcctagaccattcaagtgttaattaaccaataactttcctgatcaaataagcatttaaaaaaggatatcaatgaagggaaattagaatatatcatttgctaatcatttcactggtggcatggatttcacagtgttaaagccccatttccccatttatgccctataggaaacttctgcttccccagaaggagggttttattatcagaatggttattctgccctccagcaaccttctacttccctagcaggttcttccaaaccattcctcccaacacccagtattctcttttctatgttttcggtcacagtgttccctgtttgggaagcctcacctgctcatctttcttcaagcttcaaggtctcactcaaatttttccttcttcagaatggttttttccaattgcaagtggactctccctcttctaatctctttagtacttaaacaacacctgcttttctcaaagtgtgtttcttctaacactgggactgccaggtgttacattttctgagaaaaaaaagtagctttgtggttaaatgagttagataaatactgagttaaatgtagtcaaattggtctctactggaggatttcttagggcccttactagcttaatctgaattcagccatatggtatagagcatttcttagtcttttcttgttgtttttgttccatttatttatttgtgtgtttattcatttaaaaacactctcattcttctatatatcccaggctcattcttccctacctcataaaatgacctacaccctcccccacataatagagcacatttgtttctccaagcatgttacgggactgagtttctggcaacacacttagagaaatcatgtcatgggccattaatcagtacgtacttcttttgtgaccttttttccctctcaattggagccattatataaatcttactcatttacttaaactttcaatttttttcttgtttcctaaatacattgtatgtgatttactgaagccagaaattatcataattagcattgtgcaaaattagtcattacctgtttatttagcttaatgtgtcaaatgatcataccatatttgtattagtcctgttaatagtaatagcaacactaattggacatatacagtaagctgaacctatggttcttgctgttgcacaatacttttaagttttaacactgatttaaattttaaatcagaagtataggacaacctgtaacttgtttagtatgaaatagcatcagaaacaataagcaaagccaaaaaataccactggcatgttttttgtgggcaaaaggagtaaaatcactgtaaaatacaggttagggtcaaatagattattagaaaattagaaaatgaaaaaaaagagaacattttaaaaaatgtactaggggtaaggaaagactaaaaggaataataaagtaccaccagaaatattttcattgtgaaataaaaaatgccacttctatcaaatattggcatggttgtatgttaactatgatttattttttcaaaaatatgcacttaccgaccagtttccaaagcctaattgattcattaccattatacacactgcactgactaaccaaaattggaatatttatgcaagttatgagataaaagtgaaagatattacctaggaaatatgtgaattctgacccagaaactatcttgtattgacccattgtatcttttattgtcctgatcaaaatcagtcctactgctgcctttattctattggtatctatctacctatctatctatctatctatctatctatctatctatctatctgtatgtatttttattaaactgacccttccacacacataagatatgactgagagagcctatgttttatgtctctttatgtttcttgtgcttgatataattcattcgatatttgtggaatctctgacaatggcattaaactaaacatcatattgaagaaagaagtagctatcttcctgatttccacctcaaaaatcaagagtatatcttaggatccaggtttctcttaatgacccatttaaatatcattcatgactttgtgacatcataaaatgtcttaatcaattgatcaacggtgtgcatctacaatatgtttactgtgtttggggccaggtcttagggagaacaaaaagaaagtgagacatatactttctttgccttcaggttcatgatctggttgggaataaaagacaaacatataatttgaaaataaatggagagtgaatgctaaattttgtggaacctatactctggttcagaaaagtgcaacagaaggcaagctggaataaccaagaaagtttgtaaaagaaagccaattttgaaaagctattgaagcccaaggcatggtttacattatgtcctgatagatactacagaacccatgaaaatttttgaggagagggtctacaagataaatcctacactaatgttagattcatatggtccagtgtggaaataggttagactctgggagagtctgcagagaaccatgtcagagattcttggctttagcctacattggaaagatgagtgggtggtggccctgggactagagcagtggccatgggactagaccaggagtagtttttgagaggagcagagaggacctggtgacttactggaaacagcaggtaaaaaagtatggatgagatgatcaaaaatgaccccagggttttgagcactgatgaaaaagtaacaatagctaattattttgaacatttgctctgtgcagtgttttgtgtgcttttactggattttcccaagtttcaggttgcatttattgatgtaagtaacaatagtgcccccattttataagaaaactaaaattcatggaggaaatgtaaattttccaaagtcacagctgagcagaaattttaatttaggcagtctagatccaatggtcttaacatctatgctattctctttctcacttcctaaaggaataatggtaacatggataaatttgggatgatgagctaattgggggagaattttaaaaatgacatataatttgaaatatagtttgggtttgggataacagcacccaggtgagatttgaaaataaaagacctcggcttggacaagctggagatctaaattccacagtaagcatgagaatgaagttaaaagcactgaaggaaagagaacctaacagaggtacagaaatgtcaattttaaatatttcttggggtaataaagttggtaaacatgcatgttgatatttcatgttatgtgaccctagaccggtgctctaccaacttctttgatcacacatctctataataacagaactgttgagtgcacacccttaatatttaatacatgtggcttattctccattgtttctacttgataatcttgctaatgaagagttcatactgggtaaagaggcagctccataattttctggtttgcttcttcttgcactattcacattaacttcaatctgcatttcttttgctgagcactttttaaagccatttctccattttgttgagttaaaagtattctgtgtggtccaggcacatgcaaactgcactctgctacaataccctgtgaatgaaagagggacatccctgtctaagcctgcataagggatctctcattctcattgcatttacatagatgacactaggtatctccagttagaagctaaatgaggttacaggtatcattccacatattaaacatcataatttttttatttacaaagttcaatcctagcatttcttttacatgtccaatagtttctttagctgctcctcaccctgatagggagcttctctgaactttggagaccacagacttcatcttaagtttctcaggagtcagaaggcactctctcatgctcatattccagcatttgctgagtgggcaagtgtgagattactgtatttacacactgtatggtgcacacacttctgtccaaaatctattcagcctttgcctttccagatttgaatccttacaattttagacttctcaggacctctcttctttttgatcattttagtttcccttgttccttttaatcactgtggcctcaaccttctcctgcttatcttataattcttgggtatgacactgagaatttcttagtgtttccagagtaagcaactatggatttgtaggtggacaaattcatgtttccaaaatctttttggataatattcagcaattcatgtattttccagctccactcactgtggaatgaggacctcctttttatttgtcataagtaaaaaaaggtaccagagtcagaataaatacccaataaatatttgcttagtgagaaataatgtagacagtaaagtcaaagagaaatgtcaaaaatatttatttataattgtcaaatgagtagaaaatagtattaattaatagatgtgtttgttttttatttagaatattgccatttacttctttcagctcccatattttcttgttaaccactttattcttttccttagcctgaattaaaggtttccctatgtttggatagatagtaatctggtaaacaggcaggctagctacactatacttggaaatatattttcatgtgagccacagaaaataaaccttagctttgaaaaatggccagtgtgaatattaagatatcagacaacagccatgaactccaatttttattatgtgagataagatacaatactaacgtaaatacacagttcaaaagttttaactctccaatatgtataaataatgaaataaatgttaaaataacttgtaacttgtcaacatagtactgatggaagccattggttaaaactgtaaatgtaaacaatttaaagaacttatgaatagctgtgaaccaacttccttcctagggtaacaagtaaaaagacttttacttttgatttataaacaaaaactatggttctagttttattttaaatttgaaatcaatgtggaaagatgtctttctagatatttcctattaaaataaattaagctaaatagacactgtcagaagatggctcaaaattagaaacattttagagtcatttcattagtgctatttggctaattggctgcttgactcataaatgttaaggttgatataaaggcaaacatttttgttcttttttatgaaacatttatatttgcacataataaatttacttaggatctggtcaataaattaaaaaaactgccttaagcaacaattttacaaaaatacctacctctatttctaaaactaattaataatagtaaatatatattttcccctactaatactcaattcattaaagtgtgcctatttacagaaaactgcaaaagacctataagatttggggggaaaggcacacaaaaagactaagtggaaaaacagtagtagaagggaacaaccgaattgttcttagtgtgggagagttttaaatggcaggcagaattgaagtgctcttatgaatgtggtgagggagttgtgatgagtaaaatttattgttctctatgtacaaaagaaaaacttcaaattggaccaatgtgaaatataatgcttttgtcaatggcatcatgggcttctcattaaaaatgaacaatgtaaataaacatttaggcagtgaaatgcaacaaaaagccatcagctttgaaaaatccctacccctgcaacactggagaacttcaatttgatcatcatgaatagaagttttgtaggtgctgaggccaagaaggagcatcagattgtcaaattgtttgatattgcctacacattggctaaaccagaaattccctttggctaattttctcacattgccacactagaagctcatcttagaatggaattggagcaagactgtctttctgaaagtaaatgtaagctgagccacattactggaaaagtcatcacacatcttctaatggctactgttcagcaagcccagttctttttcatcgttactggaaaacacaagggtccaaaaccacaaatgctaatgtccttgaaatgatatgtaagttctacatgagtgagatcgc

SEQ ID NO: 755 - DNA, 32744 bp, Homo sapiens
  source 1..32744: mol_type = other DNA
gatgtcccgagctgctatccccggctcggcccgggcagccgccttctgagcccccgacccgaggcgccgagccgccgccgcccgatgggctgggccgtggagcgtctccgcagtcgtagctccagccgccgcgctcccagccccggcagcctcagcatcagcggcggcggcggcggcggcggcgtcttccgcatcgttcgccgcagcgtaacccggagccctttgctctttgcagaatggcccgcttcggagacgagatgccggcccgctacgggggaggaggctccggggcagccgccggggtggtcgtgggcagcggaggcgggcgaggagccgggggcagccggcagggcgggcagcccggggcgcaaaggatgtacaagcagtcaatggcgcagagagcgcggaccatggcactctacaaccccatccccgtccgacagaactgcctcacggttaaccggtctctcttcctcttcagcgaagacaacgtggtgagaaaatacgccaaaaagatcaccgaatggccatatccttttgcccgaaccccagcagcagctgcgcctccccctcctccctccgcctcccctcttccaggctgggagagagacccgggggttgatgggaggtggggaggaggggggtcttccaggggctgggagagggggcaccgggaggagtgtgaaagaatctctccaccccgagctgggttgagctaccctggaggcttgggaatgggtttgtggggggctggggggtgggcagcggagagtggatccttcccaaggaccgactctagaatgagatctggggcctggggtcgtgcaggagccttggtgggggctttcgagccaagtccggagggtttggagttctacggagtgagcttggagcgggctcgggcctgggcgcttctggccagggcaggggaactatgggggccttggttgggttttcttggccgtcgctcactggagtccacgcaggggaagctggacagcctctccactactgctttccccaaggtggggggccgccgcacttttagggcagggcgcttgggggctcccagggctaagagcaagagggagtccatgtggccttcacactgagaagccagcactggccgaagtgagtaccccagggtgggccgctgttcctatctggagaggatagtgatgggctggggggcgcttatgtttccctcatgtgtgcaggtcccattgcctttaaccgctgattggggaacctcatcatctttgggggtgtcgagaaagagatcccacttgctttatctgggcccctggcctgggaagacctgatctggacactttcagtaagaaagacagggcaacagcaaatgaggtggtgggtccattttagagcaccatgtccagcttttcctaccccgagtagccgagagggaacaccaggagaatcagcacccatgtggacatcttaggtaggtaaatgccttttaaatttttttttttttaatcaaagatccagaggaaaaaggtgaagcccacattttcttctgtggagatgctatcaaaatgcagatcttctgtgtttctttaaatccctgcctgcttgaaataaaccttgaggagggcttaacatctatcgagatgtaggcaggcaagggtgggtaattagtcgggctttctagcagttatctaagcatgacccagattccaggaggggggacacaccctgctgcccaggctggctggccactgtgccatgcccagatgtgccgcttctccgcacagttccaaccagctgccctctgtgtaaaaatgaacgggctggatgggtccctggggctcagcgatgagtcccctatcccttttgtatgtggttttgcagttatagactaaacggggctgggccctgtgtggtctccgggggttgctgtttgaggagcatggcgggtggtagagggactcacttcaggggggttcaaaatcgagcctggcgcttggatcctgggtgctgggattgcaacagagggcactgaggttttggagtgtgtgagtggtctactttgagggtggggaaaattaagaagttcagcagaggtgcttttgaggggagcatacctctaactacgatgccatctccgttggtgcccaaagcaggtgccaggtctttgcttcctaagtttcagactcttaaagaggctggttcttaaggttagcaattcctcaccatcccaggcccattgaagtgctcaggggtggcttgattactctgcctatcaacagagtgaggagtgggagtgccttgcaggaggacagggtattcatgggtgcacacccagttagctccaggagtgagagggctttgctcggctgacaggtttcctcattgaaaatggctttagatcgccttctggagcctggatttggagacttctaagaggaaaggaaggaggtggggagcccttctgctgtgtccttagcttacctctgtccagcctgaatcctgcagattggagggctgttgggggagagggggattgcagtggcccctcggaagggggaatcgtgggagagggaggcaggtgaattgcgagtgttgcttgccacttcatctattctctggccagctcgcccggggctttcttgctcttatgatgagtttgtgcattatgctctctgcagactgtttttgttctctttgacccgaggtaacaaacacattatacagccctactctggaagggaaaactccccacctcacaatctgtcatcgagctgggtcatccaggactgagctttctctgtcctggatggagcggagggcggtggcggggtgggtgggagggttggagatgagaggggatggacagagacctggggagggaggtagtgaataaaagaattcaggccagtgtaaagagaaagacacgtggaatgtcagagtcacgataccagggcagaacattctactttttaatctaaatatttctgccattaaaaaaaaatgtttcagcatatcctgagagtgaaaaaaaaagtgtgtaggtacttaaataaagtctaatatatgtacaggcaagtacatatattcagatgcatagatttttacaaaatgaacacacccacgtatccagcacccaggtcccgatcagtgccctggaagtccccctccccataccgcctcctagttgctcccccaacaagggtaccgctcacctgacttctaaggttcattttgcctcttttaaacatgtaaatggagtcacacagtacgttcttttgccactggcttcttttgctcacatctgtgtatgtgactctactacaatctatccattctactgttgatgggcatttgtgtcatttctgtttgtgccactgggaacattcttgtgtcttctattatttttttcccacagttctcttagataggagtggaatcgcccctgctactttttgatgcatgtgttgtgggatgtgtatttggaaatggtgttgactaagggttgcaggtcgatatggaaagcaggttcctccctgtcttgtttaagagaagtgagtgaatgatccatgaacttgtcggtatgctcacagggcctaagagtgctacttccaaatgtaaattctggcatggtacactggtgaaggatgcagtcttgctttctccacactcggggcaatttgtcactatgatttcttcctctttcatccctcagtgggtcaaacttgaagccatcaatgacaattaagaatcctcatttatttcattttttcccctcttcctaagtgaggaaacccaaatggaagtctttgatgttcaaatttacattgccgtgtttttctcatgccaggcagcaagccgtcttgaccacacaccttggtttcatgttttcattgactggaattgtgattcaaatagggccatgagggtctctgatgattgccgaagagctcagatctgtcagctcaaaaaggagcatctgtcagccttcctagagttccctccccacttaatgccactcactccttctaccaagtgccaaggtgaatgtcatctttccagccctccctgtgccaccaggtctcccactgaacatgatgtagaaactcaggccatcggaggaacactggaagcaggtcagtgtattatcacgcacagttgcctgaattacacgtagaattccagcttttcatccggtttgcagaaatcttaacaagacacctaaagtcacattgacatcaggtgacatcactttgacatctgtggacattggctgattggcactcctctcatttttttttttttttttttttttaagaaaagctctctaaagagaaactttctgcatgagaagcgctgggagacatgggagcaggttatcagactcttggcctgtcctgagagatagaatgttctagaaggtactgccgtagagggcaggatggtgtcacttacgtgatccttgtactagaccggcttggctggtatttccagaggagcaaaattctgcgaagtaaaatttagcacggcttttccaatgggagtattttcaaaaagggtgcaatttcttatccacaattccccaatccaaaaagctccaaaaaccaaaagacgagctcatatagaggtaaaacctaacctgaactgacttcagtttgaagtcttaatttacagttttcattcattctacttggtgtgcatttgagtatgttttgcagcagaaatgttagatgtgcttgatgatgaggtgctgcttcagctcctgactgttaggtctgcattgtagtcctgtcaaactttcaggtgtatggaagttgtcttgttaacaggatggttctggtccagcaggatttgggtggggtctgggattctgcttttctagctagcttctagggattccccatgtggtaagttcatgggctagggttggagtatccaggttagatcatagagacatcttgttatcatttttcttttccttaaaaatcaggtttataggggccgggtctggtggttcacgcctataatcccagcactttgggaggctgaggccggtggatcatgaggtcaggagttcgagaccagcctggccaacatggtgaaaccccgtctctactaaaaatacaaaaattagccaggcgtggtattgtgcgtctataatcccagctactcgggaggctggcaggagaatcatttgaacctgggaggcagaggttgcagtgagccgagattgcaccactgtacttttttttgagactctgtctcaaaaaaaaaatagatttattgatgtataatttatttgtagcaaaattcacccttttgacatactggtctgcaagctttgacaaatggatgtagttgtggccaccacccaaatcaagatatgggacagtttcatcaaccctaaaatacccccacagtgcccctcttgagtcagcaccccacttctccagccccttcaaccactgatctgttctccatccctacagctttgccttttgccgaaggtcatataaatgtaatttcacagtatatagccttttgaatgtggattcttttactcagactttgagattcattcatgctgttgcctgtgacagtagcgccttcctttttggtgttgagcaggattccatgatatggatggaccagagtttgcttcccagccgaaggacattgggatgcttccagtttcaatgattatgaatagagctgctataaacattggcttatgggttttagtgggaacatttcatttcatacatttcatttctcttgggtaaattaacccaggagtgagattgctgagttgtgtggtaggtgtatgtttaattttataagaggctctcaaactgttttcctaagtggttgtaccattttacattcccatctttgcaatgcgtctaaaagccctgagttctgaattccaaagcacgtctggcctcgatggcttaggattaaggatgtggatctatggaaaggagtggaagtaatagtgttaaatcccggtcagagaaataagaaagattaaggatgtcattcaaagctatgtgcctgcactagagagagagaaagaaggggttctcttgggtggggttccacccctccctggtagttctaccattccccaggaaaaagtcaagctctgaggctgtgagacccatgatctttaccctgttcttcaccactgcaaccccagtgtgtgggacaaagcaggcgtcctataaacgtttgctgagcaaatgagaaaaggtacctgtcttcacccattaactaaattgtataacatctatctgatctacccttgtgccaacgttttaggattttgatgggttttagttgcagggggttgagagactgtccatgagattatcagaccaatgaaagtttctgaaatgttagtgcttgagtagattggatgcagcggccccttgagaatgaagtctttcttcagggacttggagtgggaggcatctgttgggtgcgtagggcttatgcttccccctccctgtttcccccccagtagcaagcacacatatacactttctcagcaataaaaagcaccgccgggaaggtggactccatccagaaatgatcagagcctaagagccgtgcagtaacgcatttccgagaatgccagctcagctcctgagaaaagggccggatgggatggtgcctgctctgaaagagggcagagaggagagggaaaacactccggactctgggtcagactggcccaggttcacattattcaccagccatgttatcttgggcaccagagcctatttcttgacatgcatgatgaggatattccttctagtagcatctcccttggagggctctcaggagattaaatggggtcgtgcgtgaaaaatggccagcacagtctccagcacagagaaaaaccccaaaacgccagagccgtaatactatggagtcatttaggttccagtgttctttttttggaaaccggccagaaaagaggctttctgggtgggaatgggagcgaagtgcccccccccaccaccccctgcgactggtcagtgtggattgattaacctgatcgtggcgctctttaaagccacctttggacattttgcattctccgttctctctggaagctttcaggggaaaaaaaattcgtggccacttgacccatttttctattcccttgagtctaaggtaaaaattaattctctttcctcctttggtccctccctctctctgtgggtgacaaggtgagggagttttaaagtatataattagcttccctcttccccttttgcactccctgtctcttcctttggggccggtcgagagtgcagcccaggatggccaccccaggtgtccactgcaaactccacagaaaaactttgctcaacttttggtttagaatttaggtacccccctccccttccaaactttggtcttctttctcctcactccctaaaaaaataggaaaaacaaggaacattcctggcgagggaaccatgagtgggcacagcaacttaggtttcaaaaaccactgggcctcagttcttatctgagtagggtgacccttcagccagggttgcctgggactatcctgggtttagcatctctggaaactcacagtcctgggcaaactgggacgctggtcaccctaatggtgagttcttaacacctgagagagaagaatggtgcaagagatggtgccgttgaccaagaaagggggagagtcagttacttattccctctgaaaagccaagactttttattggaatgaatgcagcttttagaagccgtctttaaggcagctaatacaagagagattccagctatgaagggaaatgcctgagttaagtccggatcaagttttgacatctcgcttcggtcagacacggctttatctgccgttcagactgggagcagccgtgagtcttccttaaaggtgcctgttgctcaggcggcacctgcagttagaaattagcagcctcccacccccagcccccaaataacaggattcaagagtcccctctctgaagccatgagggaaacccaacttagtcacccacttgccagtaaataatattcatgctgttaagttctgttctcattttaggcctatgtgtaaaaaatatatgtaattttaaactgatttttaaagtattttcatacgaacagcatttgcaggagggcgaagtctggatgttacctttttgtaaaagtggatggatttgtcttcaatgagactctggggcagacttaaaacttggcccgcagtggtgttacatggattctgatcttccagagtctgtcacgttcttttatctccatgatctttattatcttctttattgagaatgatgggcatggtgtgtgtgggtgggagggctatgctgaccatcactgcagtgaaatgtgttcgtggcatgttgtggcgtctgcataggaatgtgtctgtttgattaacagcacaagcagtggaggctgtaaggaggaaaagaggagggaaggtgatattggatggaggggagacatatagagcttgggaacagtccaccctggctgcaaatctcagctccagctcacagttgtggagcctcagtcttctcctctgtaaaacggggacagtagtcctatgtccgaggaattgtaagaaggttaaaagatactgtacccagaaagcacatggcatatataatcatcctgtgaagtagccaactcaatgaattttattttatttattttgagtcagagtctcactctgtcacccaggctggagtgcagtggcatgatcatggctcactatagcctcgacctcctaggctcaagcgatcctcctgccttagcctcccgagaagctgggactataggcatgcaccaccgtacccagctttaacaacataaatttatatatatatatatatatatatatatatatatatatatatatatatatatatatatattttttttttttttttttttttttttttttttttgagatggagtttcattcttgttgcccaggctggagtgcaatggcgcgatctcggctcactgcaacctccgcctcccgggttcaagcaggacgatgggcatttgggatgtttctagtttggggtgggggattgtttgtttgtttgctgttatgaacaatgctgctgtaaggaatcaataattttgaatgaatgaattcgaggtgttaattttagtctgtgtacttggaaatctagcttcacctagaatcagctgagattcatcagcatttatggcaggagctaagacatttcacagcttactcatcattttctctaagaggctgggtcaaccggttagctcttggtcctgcttgtattctgagagtcagaacctgtggtttagacactggcaattgatatggttgtagagaagcagcatggttgagttgagagcatggattctggagctaggtggctggggttcaaatcccagctctactagtcactggctgcgtgatcttgggcaagtcacttaagtgttctgtgcttcagtttcccagtctgtcccagtggtgattctaatagctccatggggatcctaatagctcctatctgggaggattaaatgagttaatacatctgatgtttagagtggtgcctgacacttaggaagcactatatgtgtttatacatggaagagtggatagatggatggacttatgtgggtggccatatttgggcttctctgatccactgctgagaatagtgtgtggcacacagtaggtgctgcataagtgttaatattctgctctttcttgccaagtctctcaactcccttgatctctgttatttttggcgtctgtgttgttaacccattcttctgaatgatcagctgaatcactgttgctccaatatataagccaaggagaacacaatcacaaggtctcattgattgtccatactagaattccatgattcctaggcccaagtaggattttccccacgtctcagcaatccttcttccatgtttctaatctttttctctcatttgttatgccccattgccagactctccaatctccccacagcttccccttcctctaactatactgtctctagtcttaccttctccctaagggcaccgtctttgaagacatcaaatacttcagagcaccaaatataggttagcttctctgagggccttacaaggacatggagtgtttgggtcttacacaaattggaatggtcagaaatgtttagagacttgagttgtctttgaaagagttgtcagaatgcaaatttttgacttgtggcctgtttctgatcacaacgcagtcttttaagttatggatcatagctggatgtttgtggtttagaggggatggaggcatcctctgcagttagtgttggatgtctgggtggatggatggatggatggatggatggatggatggatggatggatggttgaacagatgcatggatgagtggatggatggatggatgggatgaaggaaggaaggaaggatgggtgattggagggtaggtgggtggataagtagattggtagatgactcgatgggtgggtggacaaatggatgggtgaatggatgactggatggatgactggatggattggtgtatgagtgaatatatggctggatgaataaataggcagatgactagactggattgaggggtaaaaatatggatgactggatgggtggatgagtggatgatagatggttgaatgggtgggtggatgggtggatgttggatataagggtgtatggtagggtagctgtctatgtgtgggtctccctgatatttggtgttctgtttgacttgggaatgaccaagtctctccgcttaccaccttatttgtaccttttccagtatcaagtgaattttgcacacttttgtaaaaatcaataagattgtatgtttaggactttgggaggccgaggcaggcagatcacaaggtcaggagatagagaccatcctggctaacagggtgaagccccatctctactaaaaatacaaaaaattagccaggcgtggtggcgggcacctgtagtcccagctacctgggaggctgaggcaggagaatggcatgaacccgggaggtggagcttgcagtgagccaagatcatgccactgcactccagcttgggcgacagaacgagactccatctcaaaataaataaataaataaatattatatgcttaggttttacctatgtaattagaaagctccttgagggtaggggacagtgatttgccttcctcacatccccccaaagttcctgcactatatcatgcataagtatttaattgagtaatggtgaggaaagtaaacagtgttattgaacaaagattattaaaattctggaaacacctggttttgtttcagcactgggactgaaagtggaattccttggattttgctccattggtggataggatagcatgtggtggtggactggtagactctttctcttccaagcagattgggtaaatgccccagattcttacccactagtcagagattacagattactgattgatatggtttttctctgtgtccccacccaaatctcatctcaaattgtaatacccacatgtcatgggagggacctggtgaaggtgactggatcatgggggtgatttcccccatgctgttcttgtgatagtgagttctcatgagatctgatggttttaaacttgtgtgggcctctttcctctctctcctctcctgctgccatgtaagacgtgccttgctttccctttgccttctgccatgatttgtaagtttcctgaggcgtccccagccatgcagaactgtgagtcaattgaacctcttttctttataaattacttttatagcagtgtgaaaacggactaacacactgatgtagcaaggtcctttaaggccccatgtgatctggtccctgttttgtctttgatctcatctctttcattgtctaccttcctttcattgtctattctgtctcagccctgctgaccattttactcacacccatgtcatttgcattacatgacattccttctgttcagcataagctatttcctctgcctgcatcactgtttctccaggtctccccatggctaactccttctcttcatttaggtctcagcccaaaagttacctcctccaagaggcctatccttttcatttactgaacatctcatgtacaaaaaagaatataaaatatatgtatactctctcatccacaaaaaaatctctgaagacattttaatgtatttcatcccatacctttttatgcatgtaaacttttaggaacacatttccatgccactaggtatccttgaaaaaataagggccaccatgtatagttgcacaggttgtgcactgcacaaagatagcatgtcacatatcttaagtatcatggagcttgtatgtctactatttcagtaccccagctgataaaagcttaagtatcttgttctagcaagatgaagctattatgacaatttttgacagagaaaggggtgttttgtttaagttcacaatcagagaaatgggtgtcttgtttaatttcacaaccagagaaaggggtgtcttgtttaaattcatacagtggtgctgtatgggttggtggcaaccccagaaaagactgttgttaatatctgataatgttccactttatacgtgtattatattcatgtaacaatctctggctgtttgttttgccattataaataacagtgcagtaaacatctttgtgtgtgaatctctgtccaaggttctgatagttttctgaatgaaattcctgtctatatatggcactccaagcccataattgaaactctgctgttaccactttctttgaatctgtagaaggaattttgagaacaggtgactggtatattcaggatgttgatgacaaggaacagagaaagaacagttaaatggtttggaatttttcctgggctgcatgtaaagcagtgcttttgaactgggagcaatttttcccccaaggggacttttggcaatgtctggagacgtttttggttgtcacgaatgtagggggagggggcaagatgctactggcatctggctggtagaaaccagggatgcagttcagcatcttaaaatgcacaggacagcctttctcagtaaagaattatccagctccaaatgtcagtaataccaaggttgagaaatcttgatgtaatcgatgtcatgggtttcttcaagaggagtgggtggatttagggtttttgggtgacttaaatttaatttacagtttgtcttcctagctgggtgtctaagccagctttctgtgaactttagatcccacacaagaagcaacaggcttgctaccgacagattcgttgatgtaaatatagatgagtgtatagaaggaaatctcacccagagctggaaaatgttggaatgaaaactgcggcggcctccccttctctctccttccccttctgttgccctgtttgaaaatcgtgccttactttctttggtctcctggcatggtgaatgctgctggtatggactgtgtttctatatccccttgatccccacacccttaggaacgtacaggagagagaccctggagcatatcagcttagagatggaggggaatgggaaggagtgcgttcattcattcataaatgttgactgagcacctactgtatgctaggtgaatgggaggacgtgagggcagggaggtgacaaggttggcttattctgggctttgtgaactatggtgaggattttgtttttttccaaaggaaatggaataaccactccttttttccccccgatatacctaaactttttgattttcataacaaaaatgggcttccttttgtatatttgttttgagaccagccgtttttccaccaacactgatcacactgcagtgagcatcctggtagagaagtctttgcacacttctgtcactgtttccctaggacagattcctggaaatggtatggcaaggttgtatgtcaggcttttgggccaggttgcaagaaacaggaagtctgtgccctttcaaattccaaggtcccctttccctgacgacgtggcccaatcaggcttgccctcccttgattttacatcttcaccaatcagataagtgaaagtgaaatcctgttgtggtatcctgtgcatttctttggtgacttaagacatagagcattttccagatctctgtgggctgtttggatatcctttcctctgttttctcaggcacattctttaccgatgtctttgagggattgagcaagtttctgttgaaattgaggcatgtcatggctctgtgtggggcttgaggcagtccagtgtagtggagggagggaggctgtggagcctggctgcctaggttcaaataccaactctgcttatttccattcatatcattttaggcaaatcacttagccccctgggcctgcctttcctcatcagtaaaagtggtataacattagtgcctgcattgtggggtggttgtgaggaaagcagcactcaaaacagtacctgacacacagtgggtgccaaataagagtctgatgtattagtgttataggtatcggcctcctccctccccagtgcaatagtgtgtgtgcgcctctgtgtacctctgttggtgctgacaagccctttttaaaatttagaggtgaggtctcactctgtcccctaggctggagcacagtggtgcaatcatggctcactgcagcctcaaccgcctgggctcaagcaatcctcccagcttagcctcctgagtagttgggactatcggtgtgcaccaccacacctggcccttagacagcccctttatttcaaagcgaaatggcagccacaagatttagtgcaagctctccaagctttaggaccagctgcaactcctctaactgaccaaacaggatcccccatgtccccaacccccaaaacctgatgaaaagcaaacagaccattttccacattcatgacggaaaggcccttttcttggctcctgcccttgctcatgtcaggatttcactccatccctgataaagaggaagcaccatgtcccaggaggacatggaaactctctgctttgtggtgaatagttacagtaacagtagctcctctctgtggggagcttatgagcccctaagctttatagaactgccctggcagtttatgagaacttcatcccagcccccagagctcatggcacttatttttgcccccagtttgcagatgtgcacactgagactcagagagctaacactgcttgccaaggtcacacatctagcaaatggagaaactttatgagacaggtgaaggcacagcaaggataaaaacccagagggaaaaatactcaagttttctccgggaaaccatttgcattccagagaggttggtgtgcgagtgggcaagagatgtcgcgggacgatggttaagggacagagtctgagctcaactaggactaggtttcttcctttccttccttccttcctttcttccttccttcttcctttcctttgtctttctctccctcccttccttcttcctttccttcctttcctttctctttccctccctccctcccttccttcttccttccttactcctttccttccttcctcctttccttcctttcctttctctttccctccttccctccctcccttcttccttcctttctttccttccttcctttttcctttctctttcctttctttcctttccttccttcctctcttcttccttcttttctttctttcttttctctttctttctttctttctttctttctttctttctttctttcctttctttctctctctctctctttctttccttctttctccttccttccttccttcttttcttttcttttcctttcttttcttttgttttttgagatggagtctcgctctgttgcccaggctggagtgcaatggcacaatctcagctcactgcaacctctgcctcccggttcaagcaattttcctgccttggcctcccaagtggctgggactacaggcacgcgccaccacacccagctaatttttgcatttttagtagagatggagtttcaccatgttggccaagctggtctcgacctcttgacctcgtgatcctcctgcctcagcctcccaaagtgctggcattacaggcgtgagctaccacgcctgggctaggactaggtttctatcggtggtgtggcttttgggaagctacctaatcttaaccactctgtttcgtcatctataagataagcagtgtagcattttcttgcaggaatgttgcaaggattaagtggatggtgactgtaaaacatcatgcgtggcacatagtaaattctcagcaggtagtcattgctggtcatttacttttctctaatgaccagcaagctcttaatttcctccttggcatgggcactgggacgtagatggacaaaacacagagagaaataaacacacggacaaaaatccccgccctggtgtggctgatattctgggtggggagagagagggagtccaaggaccagataaacaggtaaaggatagtttgagtgtggtaagtactaaggctcaaaaataaagatctcccaggtgatcttagctgcatttggaggtgacaggagatacaactgagaaactgagataggaggaaacccaaggggagatgtgggcttgatttagggtgatctgaggagtaggagaagtcaggggctggtgtggggaggctctgatggttctctctggggagtgaagcagggattcgttggggagacccaaggggacaggtgaaggcccctgaacaggtggccagtgctgagaaaggaaaggtggaggacccaagtgagttcctaatttcttcattgctcccctaaggtgtttgtctcacccttggccatagtcttggatcacttacagatgcagaccaggctgggctcaatggcttgtgcctgtaatcccagcactttgagaggctgaacccaggagtttgagagcaggctgggcaacatggtgaaaccccgtctctacaaaaaaatacaaaaattggccgagggtgttggcacatgcctgtagtcccagctacttgggaggctgaggtaggaggatctcttgagcccgggagacctatgctgccaaataaggtaggcagtagccacacatggctattgcaattttagaaattaattacaggccacatgtggtggctcacacctgtaatcccaacactttgggaggccgaggcgggcagatcatgaggtcaggagatcgagatcatcctggccaacatggtgaaaccccatctctactaaaaatacaaaaattagctgggcatggtggtgcacacccgcagtcccagctactcgggagactgaggcaggagaattgcttgaacccaggaggcagaggctgcagtgagctgagattgcaccactgcactccagcctgggcaacagagagagactccgtctcaaaaaaaaaaaaaaaaaaaaaaaaaagaaaagaaaagaaattaattacaataaaaacagtccctgagtttcactggccacatttgaagtgcccgatgaccctgtgtggcttagtgaccactgtgctgaatagtgcagatctagagcatcctactggacatgttgccagggtccctgaaccaacagaattagcatctcctgggagcttgttggaaatgcagaatctcatcccctaccccagacctgctcaatcccaatctgctcttcagtgagattcctcaggtgatcttgactgcaccttctaatcacttggaagctttaaaaatgctgaggctgggcacggtggctcacgtgtgtaatcccagcactttaagaggccaaggcgggtggatcacctgaggtcagaagtttgagaccagcctggccaacatggtgaaactccatctctactaaaaattacaaaaattacccaggtgtggtggcacacacctgtagtcccagctacttgggaggctgaggcaggagaactgcttgaacctgggaggtggaggttgcagtaagctgagatggcactgctgcactccagcctgggtgacagagtgggactctgtctcaaaaaaaaaaaaaaaaaaaaaaaaaagaaaagaaaaaggaaaatgctgatgccccaagctccacccccacagatgctggagagatttgtccagggcttcccctggagtggggaatgtttgaaaactccccaagggtttctaaagttcagccagagttagcagaaagcccattaggtggctaagcaggtagactgaagttggagctgtgtgaccttgggcaagccacttaccctctctgaaccacaagctcccttctctctaaaactagagacctgctggcacctccctcccagggctgtgagaagtaaatgatgggatgattcaaagtgctgagtagggtcagatgcagtggctcacacctataatcctagcactttgggacgctgaaatgggaggattgcttgaagccaggagtttgagaccagcctgggcaacatttaaacattacccaggtgtagtggtgcatgcctgtagtcctagctgcttgggaggccgaggtggggggatcccttgagcccaggagttcaaggctgcagtgaacaatgatggtgccactgcactccagcctgggggacaagagtgagaccctatttctaaaaaagaaagaaacccaaaatgctgagcgagtgccttggattgatagtaagcagtgcctgtgtaataagcatgaattttaaaaaatgaggtcagcagccttagagctaatggttaatgggtttgggtgtgggatttttttttttttaatttttaaaacattgagataaaattcccataacataaaattgaccattaaccattttaaagtgtacagtttggtggcatttaatacactcagtgttgtgcaaccatcacctctctgtagttcaaagaccccaaaaaggagaccccgtactcactgagcgctcactccctgtctctccccgctcccccagcccctggcaactactaatcttctgtctgtatagattgacctattctgattttgggggtttttgaactcgccttccctggctgacaacctctcgccatccaggtgagactgtgtgaaagcccagctccctgcatttctgggtcttcctctccccactgggggctgcccccacctgtttccccctctgggcaccctggttctactcatcagcctggcttaatcccagcagcaggtccatgttctgctctcctgtggctgccacaaatgagaggtttcatctcagctgggtttctcctagttaaatatttaataaataagacctacaacttgtgatgctgggagtgtttgatagtgaaattaatgatggggagagagtggcaggcggcccacaggtccatgctggagctgggatgaggcgccctgggcaggcgtccgtgccactgatgcttgggaaccacggtgggccatgccatcccatttcccccagccagggcctcttttttagcactgtgtccagcacagggtagccacctgataaataagtgttaaaagaaagagaggctgcgtgtgtagggaagaaggaagagacagaggagacaaagaggagacacagagagagagagagagatgagagagaaagaaaagtggaaggtgagaaagagacagagatggaaggggagagaaggacctggatggaggaagtgcaaggaaggcaatggtgagggaaaagagagagagacaaagatggaagggatgaaggagagggagagatatggaggtagagaaagagagacagaaagaagagagagaatattgcttcttgtatcttccccttctcctgttatccttgaccatcttattatttttttcttttttctgtctctccagttctcatttccttaccctcgccgtcttgccaactcgtcatctcttttcatttcctgtgtctatgttatcttttaattttctgtctgggtattttccccttttctctttctcagcataaactgttggttggtgtatgtgtcttctttcttttttagtctttaactgacgtgtgtgtgtatgtgtgtgtgtgagagagagagagacagacagacagagagagagagagagagacagaacaaacctagagagcagtgtaggaacatagatgaacattttaaagaccaaaccatgaagcgtacacccattttacccaggtcaagagccacagggccaccatcagattctccctcatgctcatcctcaatcacagccactccttccctcctggaggaaccactattggagattgtatgggaaccattcgcttgctttcttgtgtggttgtaccacctaagtacgcatcctgaagcaatatagtcagatattatgtggttttgagttttatatgaataaaatcatgtgagaggagttgttttgtattttgcttcattggtttgcagttacctttgtgagatttcatcctcattgtggtcactgcagctccttcatgatcttgtttattcattgatgatgagcatgtgactttgttctcttttgggcactggcataagcagctttgttggttgtttatggattctgctgctcgcttgcaggggtctctctggagcacatcgctctgtgtgaaattgttggatactaagatttgtacattttcaccttgactaaacactgccaaacaattttccaaagtgcttgtgctaatttacactcctgccggtggtgggtgagcattcaagatgcttcacaaccttgccaacacttggtattgtcaggtttttaagttatagcctttctcatggtgatttctcattgtgattttagtttgcatcccccgattgcaaattagagtgaacatagtttaaaatatttattgactattcaagcttgcttttttgtgaagtgcctctacatgctctgtccatttttgattaggtcacttttaaaaaaaaaatattgatttgtgggtgatccttacatagcctggaaactgattcttcatcattatatgttgtgcaatattttctcttggcttggcttttgatcttttttataatgtcttttgatcaccaacagttcttaattttgatgtggttgattttagaaatcttttcctttatagtttgtgggctttgtatcttatttaagaaaatcatttctaccctgaggccatggatatattttatgttatttctgaaagttttacagttgtgttcactgtatgtctttaatcagcttgggattgatttttatatgtggtggtaggtaggggtccaatttcctttttattccataagaattgtcccagcatcatttattaaaaagcccattcttgccccaatgatctgcaagacaacctcttgactgtttaacttttaccttctttcatctggtctgtttttatactcaacctttgaagccacaaatatttattgagtgccaactgtgtgccaggcactgagttacagtgacggatatgacagatgcaatcatggctttcatggagtttacagtctggcaaggatgacatgtaaatagttattactacttataatttaaaatgttataggccttgcaaaaagggacaagtctggcttgctctaaaagaaacatgtgaaacaacatcttccagggaagtgctgataaactgagtctttagtgggcctctgctattgtaggggtgggaatggtggaaaagatgttttggccacagggaacagcatgtgcaaaggtcctgtggaaggtgcttaggagtttgatatttatcctaaaggcactgtcaggctactgaagcagtaatacaatgattttatgtctgtgaatagttccactggttgctgcatggagaatgtattggaatacagcaagaataaaaagccatgagaccaattaggaaatgatttcactcattcagggaagtgtgccttgggctggcatggtggctgtggagatggaaatcattgatcagattaaaagaaattttgagctggcatgatttttcccctctctcccctctctctatctctgtttcttttctggttgtgttttctgggtgagaaaagcagtttgtgatcctgccaagggtatgtgctctggaggatgtatttgccacagatggtctttggaattctggccaagagagtcactggacagcccctggcccccagggtttctggagccaattcaacaatgactgtttattaacaacagcaaggatgagttgctagcctttccttcagagcaccttttaactgttaccttactttgttacccaaaccgacactatggaattggtgggggagaagtggaagggtttttatctccattttttatagaacgggggaagttaattggcactcttgaaatcatacaaaagatgttggtttcaggattggtttctggactttcagcccaatcccaattactcaagctcacacacccaatccccaaacatactcttttgcaaataatttccctactgaggtgctcctggccaatttaaaaggtccccatttccttgcctataaaatgggaattaaagtaaaaatatctacctgttgacttgctgtgaggtcagtgggcctgacacatggtgtggactcattatatttacctatgtgaatcccttagttccctttacttggaagaggtggaaaactcaaaggggcttaaacaagaagtggggattgtattggctcatgagactgaagagtctcaggagtgtccagcttcaggcttgtttggatctagggatcagataacaccattaggcctctgtttctgtttcttggctctactttttgcagctggctccattatccatgacttagctgcacttccagccctccagtctgcccaagaccatattcagagagagattcttctctctttttcagctatcttcccggaattttcagcaaatgctttcttgcttttgattggctgttgctgaggtcgtgtgctcatgccagaaccaatcactgtggggaaatgggaggtggagaacggggtgctctgattggcttaggcttgggtcacatgactttatggagttggggtggagccaacttctccaagtggggaagagcagtcttcttaaaggtgtattaggatatgcttgctgctgtaacaagcaacccccaagtctgcagtagcttaaggcaatacgaatgtacttctcactcaccctaaatccaatcagataatcagcaagtggcattccatgtggtgatttcaggacccggctctttccatctgtggctccaccatcccctaagatcagaaagtccttcacttccggcctgtaggaaaagagtatgaaggctcacacaggaagttttgggaggccacatatagaagtagtgaaccttacttctgcctgcattctgtggactggaatttcatcccatggtgtatgagagagggtcccagtaggaaacggaagacacagaccaagaatcaaattaagagatagcttaagaatcaaattaagagatagcttacaaaggtgtgggcccttactgaaatagagaaggaggaagagaggaaggaggcagagacagagagagactgagactcacaaagacacacacacacacacacacacacacacacacacacacacacacacaagttgagagaaagaaggggggagagaaagagagagagggagcatttcctaacaggaagctggcagaataaatgtcccccattgtccaaagccagagggctgggagcccagtgagcccatccacacaggtcagccccccatgtgacagtcctagaagggtaaagaaggaaggagagtggatttggggtaatggaagacagccaatacccatggtccatctgactgcagggggaactgagaaattcagtccatggagaagaaggtttagtggacacgtcactttgtctttttcacaaagtgaaactaggttctcaggtggaaaaaagaaaaagaaggtttgccttgctgctattctttttttttttttgagacggagtctcactctgtcacccaagcgggagtgcagtggcacgatctcggctcactggaagctctgcctcctgggttcacgccattctcctgcctcagcctcccgagtagctgggactacaggcacccaccaccacgcccggctagtttttttgtattttagtagagacggggtttcactgctagccaggatggtctcgatctcctgacctcgtgatccgcccgcctcagcctcccaaaatgctgggattacagacgtgagccaccgcacccggcctccttactgctattcttattattggtggtagcagtggtggtgatggttattggttcttagttccctctacatgccagtatctgctctcttctttttttctcccttacttctttccttgttctgcaaattctttccctttaagtgaaaatctttccgtgttctccaagggagataaattctatgccaagcttgagtgtggggtcctctgcttggatagctgtcttctccaggagatgaggtagaactgagatagtgggggtctctgcaggcagtctgtgcccctggcaagcccctcaccttaacctgaggctgggtggggaaagatgccttgatggagtcagaacagaaagcaagtgatcgctgcctgaaccaagcagtcactttcctggaggtgaaacctagaaacggtccctcaggctgggtccagggaggtggacttgggtcccaggggcaggaagcaacctgcccctcacctgctcctacctctttgtagcctatcttggcaaccagaagtaggtatacaagtgacgttgaagctgggcatgttaacaatggtgtgagcccgcctgactccaatctggtccagctgtactggccgtgcatcctcatctccagcccccagggtcagcccagcggctgtaacaatggtctgtcccctccccgccccacccacttctttgaactcctccaaggatctgtgatgatagggctgtcactgtcttagcttccaccattcaagcttaaccggccttcttcccctccatggagaacggaagagcaacccctcattgcctctggcagctgaccagcaggtccctgccttctgcccactcccaggtctaggacaatgaggtgagaggtagacaggaccaagttccccagtgctgtcttctaggtccacctatcatgagagccgtgattcctagtttttatcaccctctccccaactttgccagctctccacttctggcagtggtggctgcccatgacttcaccttcccgtgcctcagtttcctcatctgtaaaataaggacagccatggtaatgagagttctggtcaatatgccaggcacctcgcttgcatcaatttagctcatcctttcagtgccctgaggggtgggtactgttatcatcccgtgtaacaaaaagagaaaaccgaaacagagagagagactcactatctgaggtcttgcacccctcaagcaacaaaagtgggatttcagcctaggctatctagattcggagtccacggtctcaatgaataataacaacaataataatattgtcctaatctgatgagtttttgatcagattcaatacaagagcataggcagaaaagcttagcccagtgcccagcacatggtaagaactcagcatgttatttataatagtaataaaccattttatgttatgtaattatatattcatagataaatatagttgactcttgaacaacataggggttggggcaatgacctcctgtgcagtcaaaaatgtgtgtgtaactttttttctctattttttagaaattttaaaattagagacaaggtctcgcttttgttgctcaggttgatctcgaactcctgggctcaagtgatcctcctgcctcagcctctcaaagtgctaggattacaggtgtgagcccccgcacccagcctgtgtataacttctgactcccccaaagcttaactactaacagtctattcttgaccagaagccttaccagtaacataaacagtcgatgaagacagattttatatgttatatgcattatatactgtattcttacaataaagtaagctagggaggagaaagtattattttaagaaaatcataaggaagagaaaatatatttactattcattaattggaaagggatcattataaaggtcttcatcctcattgtcttcacattaagtaggctgaagaagaggaggagttggtcttgttgtctcaggggtggcagaggtggaggtggaaggggaggccagaaagacaagcacgcttggtgtaactgttattggaaacaaatctacataagtggacccataaaattcaaacctgagttgttcaggggtcaactatatatgctacaaatacgtaatatgctaatatagttgtatgttattgttatagtacggggatcagaaaatgttttctgcaaaggattagctagaaaatgtctagtaaatactgtctctttgggaccactctactctgccattatagcaaaggcagctacaggcaatacgtaaatgaatgggcatggccatttgccaataaaactttgtttacacaaacaagccatgggccagagtttgtcaacggctggtatagtatatgttattatatattagctttactttttctgttgctttgtttatgttcttctttgcccttcctttcttaaaggccagcctttctttctctctgttggtctgtcttttaggacagcatggcaggccactgggacatgggctctcctgactccaggcttgtttgtctgataagacatgaagagtgaaggtggcaggactctgagctcaggcctgtcctcctcctcttccctctcttcgttttttctttcctctttcctcttttcttcccaagctccagaagttgccattttcctttcccattgctgattttctctgccttgggagaaagcccgagaagatcacttggaaaagcccacgagcatctctggcctcactcacccagctcctgccattgtctttactcttcctcagacacaccaggcacagtcctacctcagggcctttgcactggctgtttcctctgtctgcattgttcttctctcaggtgacctcatggcttctccctcctctccttcaggacttcactcaaaggccaccttctcagcatttgcctcccgcccttctgccttattttcccctttggaacttttcaccttcttacttactcatctgtctgctatctgtcaccctacatcactatgatctccacaagggaaggtgattttattcgttttttgttctgttttgttgaagatgaggttttgctcttgttacccaggctggagtgtggtggcacgatctgggctcactgcaacctccacctcccggattcaagtgagtctcctgcctcagcctcctgagtagctgggattacaggcacccaccaccatgcctggctaatttttgtatttttagtacagatggggtttcaccatgttggccaggctgatctcaaactcctgacctcaggtgatccacccacctcagccttccaaagtgctgggattactgtgagccaccacacctgatcttttggttttacccaccaatgtggactagaacagcctagatcagcaggtggcatgcagtaagcagttgataaatatgtgttggatgagtgagcactgtggcttctgtcattctgttgctcaatagcattcatctggaaataaccacagtttgtttatccatttacctgttgattggcatttctgttgattctcgtttgggccattatgaacaaagctgctgtgaaatacttatacctttgcccaattcttcacttggtgaacccttataaatcctttaggccaggtgtggtagctcacgcttgtaaccccagcactttgggaagccgaggtaggaggatcgctggaggccaggagttcaaaaccagcctgggtaacatagcaagacccgtctctacaaaaaaataaaaaattggctggacgtggcaatgcatgcctgtagttccagctacttaggaggctgaggtgggaagagtgcctgagcccaggagttcaagaccgcagtgagtgatcgcgtcctgcactccaggctgggcgatagagtgagaccctgtctgtaaaaatgacagcaacaacaacaataataaaacctttaggtttcctcttaaaaggaacatccttagagcttttcctgacccagcaactcaccccaagtctgaattagacttcaccccatttctttcataacatttatcacaatgacatgtttattttgtgggggcgggtggcattctggccagaactgtcgacttccagagtgaaaatacggaagaaccaaataaaacacaacacacacatttgcacagcagctcgagggaggtgcttagttctttgagtttccaagaacagagagacgaagatttgtctggggaggaaaaatcagggactgcttcttggaggaggtggactgttgctgccccatccacccacacatttgcagatgtggtgatgagaagatgactgtcacgaggtctctgagcccagggggcccatggttgagtgcaaagatagtggggttgacaaataatcgtcgtataacaaaagaaaagccaccacagttgcataatggaaaggcggcttctatagaacattcagatcatagttgaaggcatgtcacactgtgttactcagaggccactgtcagagccaaaagtgagagtggatgagagtttgggcaggaaacaactgaaccagatacagcatcacctccatgagggctcagctttatctattttgtcttctgttgcatccccagcccttagaacactgcctggtccatctttgctgtgtgaataataataaggaacgatcgctgtgttgagtttgggctgtgaattcagacagtttgctgctgcatacctgattatgagtctcagttttcctcctccataaaatgggcaaaacagtccttgcctcatggggctgtgcatttgtttagcaaacactgaaggagtatacatggtggccaaggcactcttcaagacacaggaagcagacaaaagtccctgccctctgggagcttacatgctcatggggagagatgtatgataagaaacaaaaatagtaggtaagttgcatagtactttagaagattataagggtaatgggaagagaacagcagagaaagggctggggaggcagttgctgtattagatagagctttatcgaggcgatggcattggagccaagacttgaggaagctgtgaggatgtctagagaaagaaggaacagctggtgcaaaggccctgaggtaggggtatatgtgacatgtgtgacagtgaggaggcagatgtggctgaagccagtgagcaagagagagggaaggtgcaaggataaggacagagaggtgacgggacaggttttggagggccttatgggctgcggggaggactttggcttttgctctgagggagctgggagccacggagggcttttgagcagaggagggacgtgacctgactcagatattcataggctcctctggctgctgtgaaaagaacagactttgaaggttgggggcaggcagggcagaagctggggaattaggaaggaggtgacagtgttggtcctggcaggtaatagtgggggtggaaccaggttgttgtctgtggagataataatgagtggctggattctggttataatttttaagtttttttattgtgataaaatgaatttttttattgtgataaaatgaaatttaccactttgaggtgtgcaattccacagcacttactacagtcaccctgttatgcaacagtcacctctatttaatctcagaacatttcatcccccctaaaggaaaccctgcacccattagtagttacttccagtttctcccttcccccagcttctggaaactactaattctggatataagttgaaagttgaccagtaggatttctaggcagacaggtggtgagggctcaatgcattcatgcacagaaagtactcaggtggcatatcataggtgctcaaaactgaaatggtgatgatgagttggcaatgatggtgagtccttccagaatccctgctctagtgctaaactgacctacctggctgtgtagaattctcacctgctggccgggagggtggcagaaccaggatcccttcttacttccagtctggcttgggttagggataggggaggaatgatcagaagaaccaagctagcaccatctgttctggaacatcatccaactcttgtccagatttcccagaactgagcaggaaaatgtccagggaggaacagtgcagctgatggaagtcctggtaagccctggccccagcttcctgagctgctgttgcaccaactagcatttgttggaccttcagtctgagccaagatggcagcttcagaggaagaacaagaagtgtacaagtttctttcatggttgtgtccccgcctccttatatagcctcatataaacccctgcactatcccgttactgtttgcctctccctgaaaagagtgtaaaactcccccactttttccctacttttcacaatgtgttttggtttctaaagatgaaactcctttaattatgttctggttgtaattttctggctccttttatttctcccttacttgatgtattattttcccttgttccttctgccccctgcctccattgatgtttctcttcactgctatctagatttaattctcaactcctgccaagttcagggtgatagtgcaaaaagacatggaccatttagtcttgaattcaggtcccacttctgacaccttcaaagctgctttactttgggcaagtcatatgatcttcctgagggggtatcctttaccttgttcagctaacatttcttgtttttctctgggcacagagtagagtgtcattttccccacctccctgaagttaggtatggctgtgtgatttggtttcatcaatgaaatgtgaggggaagtgacgtgagtccttccggacagaagccttaagggtgagcatgggattcaccatgtttcctttttcctgcctccactgtcatggatgcacaaagatggaccctctctcaaagtaagtgctggagagaggatgacatagatcagtccccatcccacttcatagcatgagtagaaaaatagacctggggtgtgttcaaccactgagatctggggattgtttgttactgcagcaggacatagactaggctgactgtatacctcattatctgcattttggggctgatatctaatcacagtgtctccaggaagattatgttgatgtatgttttagggatggatattcatattttcctataagggctcaataggtttggaaatgtcacatgcatgtaaacttctgattaacaaatatttcttgctttccaatttcttcctatagtgcttctaattttcctgtttttcaatcttgaataaaatgtgagaagtgtttgacttctccttcgaggagattaatggtttctaaagcctggggcattgatttagtcattctcaacctccttgtttctatgacctttttttctccttctctggtcacttagtgtctgctaaggggtgaaggaatgtctgttttaactcattgcattttttttttttttgagacggagtctccctctgttgcccaggctggagtgcagtggtgtgatgttggctcactgcaacctctgcctcctgggttcaagtgattctcctgcctcagcatcccaagtagctgggactacaggtgtctgccaccactcccggctaatttttgtatttttagtagagacggggtttcaccatattggccaggctggtctcgaactcctgaccttgtgatccgcccgccttggcctcccaaagtgctgggattacaggcgtaagccaccacacctggcaaactctttgcatttttaactcttgacatcttcatcttctttttcccacctcccctttgcctgttcctcccctgctcaccccaccagggagtttataatcaggttctagaacctgcaatgtttttctgttgttgtcttccatcttccttgagtcttatgggaatcggccatagtcgcaaattaacaaatagctctgaagcgcctcaagcttggaggcatttccttttgctcacctaagcaagatcctggagctgttgcaaatatcctgccccctactgtaaatctgtcttcatggttgtaagagattcagtcggggtcagtgaagacccgagcaggagatcttggccgaggctccttgatgttctgtctgcgctgggtgttgtcatattgattaagctcctgggactgctgccagcagcctctaggattaaatcaatagagtttgcaaaagtaaaagcttcttttggagacacagaatatgtgggtttattttttaatgataaagcttcaaggagaatcttcatggatggcagaaccagtgatggaaaaggcgaggcagacccaaatatttggggaagtgcagtggggagcaagtgagggaggtttcattgggaggccggggctttccagaaaatctgtttaactggagttgctaatgcaacagctcagagttagaagtgaaggtggaagatgcaagaaggactgccgctgagatgtaaagagaaatgaaggagaggtggatccatttgctcattcaataaacattttgggaggcaggggggtgggggggagcctgccatgtgcctggaactgggatgtac

SEQ ID NO: 756 - DNA, 32742 bp, Homo sapiens
  source 1..32742: mol_type = other DNA
tgactgctcggttaggacctcggagagcgccaggcgccgcgaccagagggcccagagaagcggccggagcccgcctacctcggccccctcagcttcccgggctggcaggcggctagaggcgtctgaggaaggtgcctaagtcctgggtcagatagtcatccctctgggacgccgccgccgctgccgccgtccagctgtggctccctcgcacctgtgtgtgtctgtgtgagtgtgtgtgtgtgtttgagagagagagagacagagagagacagagacagagagcgagcgcaccagcgcgcgaatgcccgtgtgagggtgtttgtgtgtgttctggctgggagcgcgaatgcctcggcgtgaggtgtttgtgtgttcgcgcgcccgcgggcgggcgagagccccgcgcctcagcgctgggcctgggggagggacagcgggagcggcggctctgcgcgcccagcaggctgaggcgggactcgggccgcagccgtcgccgccaccgcttcacgtcccccgagagcggctgccgtgcagcggggagagcggacggcgggcgggcgaacaggcgggagagcgcggcggcggctgcgggcagaggtggagggaggggagcaggagatggggagaggggggaaagaggacgcggggagggagatgagggggaggtgagggggaggcggagggacaagtggaaacagacggtgtcgccgttctcctcctccccccctccccggcagctgttgctgtgggtcactcgcagatgttttggggtccgggctgctgggggatggggactagaaaaagtacccccctccccgcctttcatagtgacaaaaaaggaagcgttgaagctgatgggggaagagcccggaaggtggtggcagagtaaataccggctcccccaacgtcgtttttctgaaaataaaatactctgagccgaacgtttcgaagaaggaaagtccgcccttaagagagagacagagtcttggtctgttgaactctggtttgattgtataataatgatgatataatgctaatgacgatgatgacactgccttttatttttaccccagtgctgataaagcgtagttacagctggggatacagtccttgaaaatctgatgtgtgaggagggaatactgttgcttttggagttgtgttatatttatctttttttaaaaaggatatgctttttagaattaaaatttggcaaaacgaatcctgactctttttttccagtcggtcgtaaccaatgctcataaaatggggactgacttgactaatgaaaagagaaaggcttttaccaaggtctaattgcacgtgttaagtcacctctttccctttttttcctttgtatttctcaacagtgtttaaaatgaagaagtttaatttccgaaaagttttggatggcttaactgcctcctcccctggcagtggtagcagcagtggcagtaacagtggtggtggggctggaagtggttccgtacatccggcggggactgcaggggttctcagagaggaaattcaggaaactttgacttcggagtatttccagatttgcaaggtaagttttgaattggcttaaagcctattatttctttattatactgttgtaaggaaacaaggggggaaaaacataccaggaacaggaaactgttgagatgtcagcatcagagtctgctgcagaaagctctgtgggtagatcagtttggcttaatagatattttaggcgtcaacttaaaaagcaatgatagtttaagtgggaaatgagcacacacaaaaagtagaatttgcaagataatgttaagatccaatagtggacaaaatttttaatatttgtgtattatattaactgaagaagcaaatagtcgtttggttttttgtgttatcagagaaaatattgttatttcactgttcagtatgaaatgaataaagctactagcatgttgctaggattaagtagataataggaaaatatgttcattttaagggggccaatgacattgctttaaaattccgaataaaaacaccttcacattcttaaactcttcataaatacacaaacagacaaatgcacaggcttataagaacttgcagttgtaggaactcaaaaatagcgggtgttctggtttagtaagaaaacattttatgtaattatactttgatattgaacttctaatgaatatgcaaaagagagtttctggtaggtagagaagatgagagtttataaaacaagcattaggttaatgcatagagatattgttattgctatatttgttatattttatgacataaagtgatttataattttattgcccttttttgagttgtcttggaatgtgcctattatatgcaacaaaggctactaagttatttatgtcatataaatgaatatagttttgtaaatgtgtttggctacataagaaatagaaaaattgcaaaattacagaaattaacaatttttaaaaatactttcacaaaagaaaagttttttgaaattattaaaattatatttgtggtaaacaagtgatatatgtataatgaggtatatttcaatcactgtctcagcctatattcctagcagggtcattataaaaacattaaatctatagttattagtttacataaaagcaagtttatttagagttaatttagataaacagatttaattctaagctactttgtgaaatttgtgtacagtaataatttttttcctcaataggaaataacagatattctgttcgatgagggaaggtcttaacagtggttatgagacaaatgtaaaagagtcctggagttcaaatttgaactgctaggcaggggaattatgccctgattctctaatctttgatgtgtttgcaattttcacgatcagattctgaaaattttttccaaattctctcaattcatgtatatgacagtgatacaggagaattttaccagaggtaaaactggtataggaaagatagacttctgaaacagaatggcattgggctgttgaggtcataaagcttgtagagaaggttttaaataaaaaacttcagggaaatgggtgaatgcaagagataatggaatacatagttatcttcccatttattcaggcaagagatagtcataggaagtaccagaagttaaatacatactactttaaaaacatatggcatggtaggaagagcactggcctaggaatcagaaaatttgtgttttatttaaagttctgctagttgacagccatatactcttgggtaagccatttatctcccttgagccttgatttctgcatctgcagtgtaggaataagtgtatctgctctccttaactaagagacggttattgggaggatcagacagaataaggtgaaggtaatgcataaatggaaaggatgataaaatatatacgaatattattgttaaagtttgtaaaatcacgtgttcatagtagagcgaatataactagtgggttataataatattagcttatgatttccaaataaattataagatagatagctatataagttgtccactaacagtactgaagtcttactaaatgtggaaaatactgtaacatctttggataggaatatagttaattttaaaaaatagttatatggatgtattataattacctggtctataacaaaacatataaaaatggactaaggaaatcccaaaattagaccgttactgaaatggggactttatttagactcatagactccctgattaaatgtgcaaaaaaatttctcttctgagttctaaggagctgtcatattctgggtgcttctaccttttcaacatgggcaaaactaaagtataaatctagacttggctgtttgaaagcctcctctcttctatctgattagtcatcacatcccctctattctatttccttagtatttctgaaatttatgaccttttctacatccccagtacttgttcgttccgtcatattttcttgcttggtcttttgaaatcactttctaactgatctctttacttctagttttactggattacacttcattttgttacaataatggctatttctgaaatacaatgttaattatgtcatttccttgctaaaaattctatattggtttcctacagcaatgatgctcttaaaatgaaagtcttatttgaaaccacagtaaataacatctattcaaacaaaaaaatgtggcaactcatgggcacacatttgtttcagaaattataagaataaattatacagccaattgataaaaaaactttttatatttgttttttattgtgtaatatcgcccataggaaggtagtaggatgttcgctagccttaaaaaagtgaaagtataaagctgtacccttcataataaacaaaatatctatgagatgttcaaagtcatagaaatggcagaagaaactttggttcaaggtcagccaaaaaaaaaaaaaagttaatgcattgggttactgcaatcgttcagaatgtgtatacattggaatgcctgcattgtccaggtatttgtgaaatacatgaactgcctttcctgaacttgaattctgtgaaatacaatttgaaactattgctctataaaataaatttcaaattgcttaccttgatgggtatagagtttccttcagaagagattcctgtttacctttccatttttatttgcttgattccctaagtatactgcattccctaaaagataccatattttctcatatctcaatgccttctctcattctttcgtttctgactagaataccttttctactttcatacgattggataattcccagccatcttttacctcataattcaaacatcacctctatgagactagctctgaccactgccacctcaactacccaccagggttcttttttttcttttttaaaaacctattctatgtttttctgtagcatctggcatatacctatagtgtgaatttagcatcttcctgtgattaaaaaagtttcttaaaaatctgtcactgccgttatactatgaactctttgaaaagcaaataatttttttttcttgtttccttcttattgctagggtatacactatctagctggccagtatttcttaactctggtgtctaaaatagagatttccagcacctccccattcttagagaatcaaaatctctagggatgagtcctaggcacttgcatttttttgaatggccccacaggagatttctatgcacagccattagtgaaaaccattatagtgggcacttgatacactttaaatgagtaaagatgcatatacatgattggtcgattaattgaaaaagatattaaagcagagagcaattactacttatatatgccttaaacattttattttaattgaaaacatctaaatatacaatttacaaatcatttgataaatgactacgtttttctgttgaatgttggttctgtgattggagttctgtgtggacttctcttccataaacctttccaaattcatatctacaactttcagttttggtttatttaaagcagagtaagaaattacatgcttttgaagcaaaccaagtgtcaagtccttctagattatatatacagtgatatgtataaagcaaggctttattttgttcacatctgtatcatctatgtatagaatggtgcctggcccattgaaggcagtcaaatatttgttgagcaaataaatgaataaattaaaggagggaagctatacagattgttgtgttaaaagcaaactagatattattttgaacagcttcttggagttgcttttatgaaataacttttatataaagaggtggagagcatctagtgaaagagttgataccactttaggaacatggtatatgcttttcaaacagatgtagaaaagaagattgtaggaggatttaattaaatttatttcagtttttattgaagaagatattaggaacattctcatttttaaatgatctttttgggggaacaactcagaagttctagattgacagtgacaaacacacagggtgttctagacctaattaacaaaagataaaaataagtatattaccaaaaaaagagtaaaataagtatattaccagaaccagatgacataatccctaaatttctgaataaactcttaaattagccaactcactattcataatcatttataaactgtttttataaatggtcacaatgtcagaaacaacatgtagttaactagtataacttctgcagggaaatggatttataacaatgatgctcatatctgacataatatcagatcgtaccaggtaaataggtatagatcagaaatacaggcatgaactgtagagagttgggctttccaggaccctagcaagatgaaaggagattaaatgcccagatatccttgaatactatctcttcctcaagattttcattgtctccacattctcctaatttcactccattttacttaagcggttttgcaactgagattgggaaaagatcatgatcacagttccacagttataaagttttcatccataaaaagaataatagaagattccctgagatgtgtggatttgttacattctcctgtcaccaaaaagcacagtagaggcatctttaagaatggtaatggaggcaaggaagaattaatctaccattaagactaagatgctaacaagcgtaataaccagaaagaattaaagatttttttttcttttaagaaccagaaaccaaagccagatgactcagtactccaggctgtctgctttgcttatcctgagagcataagggtgtaggggcaggcttgagtaaaggattatagatgtgtagaagtacgtttgtaaaattttaaagttacctagagggcaatcacattttctcacaaaaagtcctttggtgctagtatttgtcagcaaattgggttgttggtcttgtatagtgtggtggttcttaaatgttcttaaaaacaaacagtgccgtcatactttttgtatttctcatacatacagagctaagttaaaatcttaacataatttccaagtatgtttttctgtaggagtattatcactaagtaaacgaaatttctgtttcttaaaatttagtgcatttctgtagatatttctctagcctcatttgacgatgttcctgtgaaaaatctcaggattaagttcatatttacttttaataataggatgattgtactgatttcctgtattatagttctgtaaagccacttacatattggtttaatagcaatgacttttgactatatccattaaaagtatcaagtagaagccctgctttaaactttcaaattgagtttgtttttctcataagagaaaaatggaactttttgttcctacttaagtatcaaaatgatgatctttataaaaatgcttttgtttatagtgacagttattttcttttttagtcttaaaaggaggataacttttcttaattctttttagtatttgaaaggctaatcttttaatgtgcacaatatactagcgtttttatttaaaaatatagattaagtattctgaataattgttcctaatttcctaggtaatactaaactgtctttataaggactaggaaaaaaatcattgattaagttttatacagccaaaaatagaaataacatttaaaggatttagagaaggtagttataaagaatagaatataagccctccaaaaagtatatagtgggttcaccatgatacttagggagagacttgattaaatgaagcattcatagtcactgaatgaatgcagcaagaaggtattttgacatgtttattattgaaaatatattgtatttattatacacctttaaaaataattaagacataaactgttctcagccaactgactataataagaatgaaataatgctttctgggattgatttatcagcaaaatcacctatgatatattctggacttatctaacatattagaaagaagaatatgatttgagttttattggaagcccaaaattaccagttaatattgatggtttatagaattattttgaatataatggtatataatgatgctatataatcaatataatgaatttgaaattgaaaatattgtatttgttttagtttcagttaagtgttttatatttatttttatcttattttatttttaggtggagttttgctcttgttgcccaggctggagtgcaatggtgcagtcttggctcactgcaacctccatctcctgggttcaagcgattctcctgcctcagcttcccaagtagctgggattacaggcgcccaccaccacgcccggctaatttttgtatttttagtagagacggggtttcaccatgttggccaggctggtctcaaactcctgacctcaggtgatccgcccaccccagcctcccaaagtgctgggattacagccgtgagccaccgcacctggcaagtgttttataattcaataaatatctctttgaattgacaatagcataaaatcgacatcttatttggacatgtaaattttattataaataaaactgatcattttggtggttttagatgcagatttaatacctggatttagaaagtaaagattggaattgagagaaaattgttatacttcttttatctttcttttatttttactttaccaaaatgaacacaataaaattagttacactctgaagaaaactagctggattggttaatgttcagtttactttgttcctataaattgactaaaaacttgtctataaatctgtaaactgtaaaagtttgaaaattattagtagtataataaattttgaagttagattgagtctgggggaaatgcttacagttggtaaacatccatgtagatggaaaatgtgaaactagaaaaggagacagagaagaaccgagcagaataatatgaggaaaattcaagagtagaggcaggtaatctgaagcattctttagagagaatagtaagagagaaactcaggcatgtcccagctttgtggagtggtcaaagatagtaaaaacaaaacaaacttcaaaacaacaaacaaataacacagaattgtcagagacaagtgaattaggccaagaggaaattgattagggtaaacatattttcagtaaggtgatggatagaattaaggtcaacaatataatagagaatataattagtagcatcagtaccaagagtagaagtaggggagatgtgtgaggaattgactttatagaaaagaaaagtggtgaaaaaatagcagagacagtaggttttaatatcattttggtacactgtaggggtggtgatgcaattaatccacagaaaagcaattgaggctaccagaaagggaatggtagggtggggaatagaggtaagatttgccttttaaaatagcaaggggtggccatggtagcacatgcctgtagtcctagctactgaggaggatgagggggaggaacccttcaggataggagttcgaggctctaatgcactgtgatcatgaatagccactaatagtactccagcctgggcaacatagcaagacccctgtctctaagataaataaataagtaagtaaaataaaacagtaggtatctaatttggaatttttctccttacctgataagaatacatatttcatttgaattctcagtgaaatctgtgctttatgtcctttcaggtaaataaaagcatgtgattctatgagaagatcatatgacttttgtattgctgcttcaattaccaaaaacttattggcttaaaacaacacgaatttatcatcttattgttctggaggtcagaagtatgacatggatgtcactgggctaaaattaatgtgttcacagaactgcattcctttctggaggctgtagaggagattttgttttcttgactcttgcagcttttagaggctgatcacaattccttggccgatggccccctcccatcttcaaaaccagcccccttccattttcaaagccagttgatctttccaacatgtcaccaccctgactttcctgcctcccttttttaatatttaaggatgcctatgattacattgggcccaccaggataatccaggttaatctccccattacaaggttagttgattagcagtcttcattccatctgcaaccttaattcccctctgccatataagctaacatattcacaggttctttgggggctgttattctctgtacctagatgttcatcacctcacctgtttttgttttttgagttattttatggaaaactttaaacacacaagaacagagagaatagtattgaacccccagcttcaacaatgatcatccttggcaaatcttgctgatttatattctcttatttgctactcttacatttcattattttaatgcaaatctcagacattgtacccttccacctgtaaaaaccttacagagcagataagcacttctcctcaccctgtgcttacactattaatcctaaagaccattatcatagtgaagaaaattaacatttctttatataatctaacatgtagttagtgtttaaattcccttagttgtcccatattgtctttttgtagttgatttgtttagattggcatccaagcaaggttcatgttgcattttcacttggcttgaagttatcttaattcagtttgtgtaaagtcacaggttttttgataagatcagctatcttgtgcttttgtgtatattaatgaaaaaaataactctttgtcctgatttctttatgaactagaaggctatatgtgaggaagtgggtgggttgttcagtgtaccacaagatgccaaatagagaacttttaaatgttttctagacatggtaacattctttaaggaatgggaaaaagaatatttttaggtcatcctgagagctgttgtactattttgtgatgctactataggataggctttgctgagaatgttagaaaagagaaaagtgtcataaaagacacagtatgtgtcaaagtgaataaaagtgaggtggattctcaacgttactgatttttacccatgaaataaataaataaataatttgagggataggatgagattcagttttgtatagctcttcttttaagtgaaagaacagaacatttgataaggattcactctacagttacttagaatagaattatatagcaaaaagctgaaattgaattggacaaaatctgttttattagtaacttagatttcttcacttgggttaataggctaaatatacttgaagaactgagttggaaggtggtaggaagaggattaaaatactgatgaggaacacattttgatgtattgagttccatttataaataatctgtacattacatttattgaatatttacataattcaaaaggtaccttattctgattctctgccatcctatggtagtttattgttggctctttctttgctttttccagtttcatcttaaccaaaactcctttgctgtttgaggtaatattcaatattcttgtgctctgccacagctccccactagctatttggtgaattcagttacttattatttaaacatttattgaaagcatattttatatatgattctaaactagactttttaattgggcaacccttttttaggaatgactttgcaaggcaagcacacactctgtgaaccatttatattttaatgtgattaacagaataatttacatcatgtgaactttaattcatgttttataacttttatgaaactccctcttattcttttttcaatggctcaggtttttttgctccctgtctctttctttcttttttccttgtatttctactatttttgaattattttataatgtatttgatatctttctctttgtccttagcctatgttaatttccatttatatcttcttggctaaaagctgctttattctaaaataaaagaacctggaaaatgtctgaaatatatttcttttggtacaatttcatttccctaacaagtctaatacttattgagactattaacatacgaaagtaactctttaagtcacagtttctcttttattcaccaatttctttttgaaaggattggaaagtatttaatctgggtcagctcagtataattatcaaataattatctttaaatcatgcttctttgttctctgctaacagactcaaatttcttacaaattttttttttgaaaaatgatttggggtactttcctgcttcttaaaaatttaatacttttaaattgatgcataatagatgcacatatttttggggtacatatggtaatttaaaacatttatatggtttgtaaatatcaaatcagtataattgggatatacgtcaccttaaatatttgtctttgctttatgctaaaaacattagaattattctcttccagctattttgaaatgtacaatagatcattgtaaactatagtcaccctactgatctattaaatactagatattatttcttgattcaaaatatatatatttgtacccattaatcaacttgtcttcattttcccaccctccttccaggcctctggcaaacaatatactctctgtcttcatgagatgtactttttagctcctacctgagtgagaacctgtgatatttgtttttctgtgcttggtttatttcatttaacatgacttctcattacattcatgttactgcaagtgacaagatttcattcttttttatgactgaataatattcccttgtgtatatataccatattttctttatccattcattcattgatgggcacttgggttgattttatattttggctattgtgagtagtgctgcaataaatgtaacagtgccaatatctctttgatatattgatttcctttcttttgaacatataccgagtagtgcaattgctggttgttctatttttagttttgaggaacctccatacagttttccttagtggctgtactaatttacattcacaccaacaatgtgtgagttcccctctctccacatccttgccagcattcattattacctgtctcttttataaaagccattttaactggagtgagatgatatctcattgtagttttgatttgcatttctctgatgattagtgatgttgagcattttttcatatgcctgttggccatttgtatgtcttctttgagaaatgtctactcagatcttttcccatttaaaactcagattatttatttatttttgctattgagttgtttgagcttattatatattctggttcttcaccccttgtcagatgaatagtttgcaaatattttctcccattctgtgggttgtctctttaccttgttgatggtttcctttgctatacagaatatttttagcttgatgcaatcccattttccatttttgctttcgttgtgtgtacttttgaggtcttacaaaaaaatcattgcctagactgatgtcttggaacatttctccagcattttcttctagtagattcataattttagttcttagatttaagtctttaatcaattttgatttggtttttgtatatagtgacagggcctagtttcattattttgcatatagatatccagttttcccagcaccatttgttgaagaaactctccccactgaatgttcttggtaactttttcaaaaattagttggctgtaaatgtgtggatttatatctgggttttctgttctgttccattggtctatgtatctttgtttatgccagtatcatgctaatttggttactttaggtctgtagtatattttgaagtcaggtagtgtgatgcctctagctttgttgttttgctcagggtttctttggctattcaggatcttttgtggtttcatataaattttaggatttttttttgtgtttctgtgaagaaacattggtattttgatagagattgcattgaatctgtaaattactttgggtagaattgtcattttaacaatattaatttttccagttcatgagtgtgaaattctttccacttgtttgtgtcctcgtcaattcctttgtcagtgttttaccttgtagagatctttcacttctttaattaaatttattcataggtattcataggtattttatattctttgtagctattctaaatgagattgcgttttgatttctttgttcagattgttcactgttggcgcatgtaaatgctcctgatttttttgcatgtttattttgtatcctgcaactttactgaatttgcttatcagttataacagttttttggtggagtttttaggtttttgtaaggtaaggtcatatcacctgtgaacaaggctgatttgactcccttcttccaattggatacccctttatttttttctcttgcctaattgctatagtcaggactttctgtattaggctgactaaaagtggtgaaagtgggcatccttgtcttgctccagactttagaggaaaggctttcaaattttccctgttcagtatgatggtacctgtgggtttgtcatttatagcctttattattttgaggtatgtttttttctatccagtttgctgagggtttttctcataaagggatattgaattttatcaaattctttttctgcatctattaaaatgattggtttttgttcttggttgtgttagtgtgatatatcacgtttattgttttgcatttgtggaggattgtcacatctgtgttaatcagggatactggcctgtagttttctttttttattgtgtctttgtctggttttcataattctggtctcataggataagtttggaagtattccctcttcaatttttttgaagagtttgagtagaattgctatttgttctttaaaatgttaggtagaattcatcaatgaaaccatcaggcttttctttggtgggagactttttattactgcttcaatcttattcctcattattggtttgttgaggttttctatctcttcttggttcaatcttggtaggttgtatgtgtccatgaatttattcctttcttctaaattttctaatttgtttgcatacagttgttcacaatagtgtctaataattcctcgcatttctgtggtctcagttattatgtctctaattttttttgtttctcatggtatttatttggatattctttttttcttagtctagctaaaggtttgtctatttacattttcaaaagcaagcttttcatttcattgatcttctgtagtgttttttttattctcaactttattatttcttctctgatctttattatttctttttctatgaatgttgggttggattgttcttgctcttatagttccttgaggtgtatcttaggttgtttatttgaagtctttctgcttttttgatctaggtgtttaatgctatcaacttctctcctagtactgcttttgctgtatctcatagatttcagtatattgtatttccattttcatttgtttcaagaaaattttaaatttccttcttaatttttttcattgactcatttgtcattcaagagcatgttgtttaattttcctgtgtttgtgtagtttctgaggatcctcttgttactgatttttagttttattccattgtgatcataaaagatatgtcatatgatttttactttcttgaatttgttctaacttgttttatggcctgagatatggtctattctggagaatattccatgtgctgatgaaaaaaatgtgtattctgcagcagttgggtgaaatattttataaatgccaattaggcctatttggtctagtgtgtagtttacagtgatgtttgttgactttctggctggatgatctgtccgttactgagagagattttttttttaactgaatattcaacacatttgtaggaacagaaggaatgcaacaaggattagaattttataattacattatacatttatgtaaaagatgtttcatttctcaaagacgtttctcctacgtccctatcttttctatctttctcaaatcagtagttattactattctcatggacaagcttatttcattgtgttagacagtaattataccagtatgtttcacatcattatcatcttcaaaaattctacccttcatttcaccacacaatcccactgcattgtttcacagtacaattgtattccacttaaattagaaaagcccaaagaaattagagcaaaaacagtcaaattcatgtgaatgaatgctagagggcaaaatattttaaagtattgatttagtaacagttactaaatctacaggcataagacttctatttattcatattattaaaactgcaataatagaaatgaaatctacattaatgaaaaacaatctaaggaattagatcagtaatatttaaatatagatatattttgtgattagtatcaggtaaatatctaaactatctatcttaaattctggtctcagagaaaaatgtcagagacaattacaaagaagatgcttcatattatcaggtccatttttctaactagtgagatcctttgggagaatggctttagtctttcattttgtcagagatttccattggtcctgttgttggtaatccatttgtttacatccttacagtctacctcgtctttattttatttatttttatttatttatttattttttgagacagagtctcgctctgtcgcccagggtggagtgcagtggcgcgatctcggctcactgcaagctccgcctcccgggttcacaccattcttctgtctcagcctccccgagtagctgggactacaggctcccgtgaccacgcctggctaattttttgtatttttagtagaaacggggtttcaccgtgttagccaggatggtctggatctcctgacctcgtgatctgcccacctcggcctcccaaatgctgggattacaggcgtgagccaccgctcctggcccttgtctttattttaaattgttgtattcctgtatagctttataggctatatataactaacaaaaggagaaataagagggtatatgcatggatctagaattcttttgtatttccagaacagaattgaaatgatgatacaaggaatgcacaccgttgcctgggcttcacctcctaaaccgcaaccatgaagccctaatgacaatgtccacacttctggaggaagggatgaggagcagcctcgagtgggttgctgaagtaccctactattattgtattgcagtatacctctctttctagatttattaatgtttgcttcatatacttgggagctctcgtgttgggtgcgttgttatttataatcattatatcctcttgctgaattgactcctttattattatatagtgatcttctttgtctgtttttatagtctttgatttgtagtgtatttcatctgatctacatatagctactcctgctcttttttggtttccagttgcatggaatatctttttccaccccttcagtttcagaatgtggatttattgtaaggagtatatagttgggtcttgtatctttatccattcagccaccctatgccttttacttggataattgagtccatttacattcaagataattattgataagtaaggatttactactgccatactattgcatgttttctggttcttttgtaactcttttcttcatttcttcctttcttactgtcttcctttgtggttaagtgattttctctagtaatatgtcttaatttgttgctttttatttttagtgaagctacaggattttgcactgttattgccatgaggcttacagagaacatcttatagatataacaagtttatttgaaagagatgacaacttatattagatcatacaaagaataggacaaatgaagaagagtgggaaaaaatctctatactttaactccctcttccctcattttgaattttgttatctccatttatgtttttaattgcttatctcttaacggattgctgtgggtattattgtctttgataggtttgtcttttaggtttcatagtagaattataggtggattgcacactacagcttcagtattagagtattctgggtttgtctgtgtacttaattttaccagtgggttttatgctttcccatgttttgtttttgtaagttaatttttttttaaattttagatggaagaactccctttagcatttcttgtaagatgggtctggtggtgttgaattctctgagcttttgtttctctgggaaagactttgtctctccttcatagttgaagaacatgtttgctggatatagtattcttggatggcagttctttttttttttttttctttcaccactccctgctggcctatatagtttccattgagaagtctgaatggattaaacctcctttttatgttatttgcgtattttctcttgctgcttttaggatcctctctctgtctttgactattgagagtttgattatgccttggggtagtcctatttgagttgaatctgtttggtattccaccttcctgtacttggatgtttatctcttttctagttttagaaagttttctgttattatttctttgaacatgctgtctaccccttacccttgctcaactccatcttgactatcagtaattcttagatttggtcttttgaggtaattttctatattttgtaagcaatcttcattctattccatttttctcctctgcgtattttcaaatagcctgtctttgagctcacattatccttcccctgcttcatacatttagctgttgagggcctctagtgagtttttcagttcagcaaatatatttctcagttccaaaatttctgtttgatttttaagaatcatttcaatctttttgttaaatttctctgataaatttctttcctttcttttttttttttttttgagatggagtctccctctgtcacccagactggagtgcagtagcacgatcttggctcactgcaacctccgcctgccaggttcaagcggttctcctgcctcagcctcccgagtatctaggaccacaggtgcatgccaccacaactggcaaattttttgtatttttagtagagaaagggtttcactgtgttaaccaggacggtctcaatcttctgacctcatgatccacccaccttggcctcccaaattactgggattacaggtgtgagccactacgcccagccaatttttctgataaatttcttaattgcttttctgtgttgtgtgggaaggctggctaggggttcatgcccagcagacctgatggatgaacttcctatagcatgatactgctgaacagcctctaatttggtgtctcctttggctgagttacagagcagaatttccaaggctaggatggcagtcccacctcccctctttgtttctctttgtcatcagggatatttcttacttcaggtactgctaatgctttccctgggttggggtagagacagggctcctgttagggaacccaaaatatgggggaagctggttgtctaccttgagctcactttttacaaagtagaaatcatgagttgggggaaattttcttagctcttggtgcaaggcagattggtgtgagtgggatcacagatatggaaatcttattctctttactgtctgcttggagttttttcacttccctgtgaccctagaagctgacttgttcttatatttgagttttggggtatttctggtaataatctcagtgatgtatatttgtttaggttttctgtatgggcagtgaaacaactttggttgtatgctgccattttggaacctgtagtctccctaatacaacaatttctgtcttcatacaaagcaagattatatatttagtagaaataattttatttattgttaatgttttttacagtgctcatatattttattctgtgaagagctatagatttaaagaacttggaacaaagataaatattgagagaatagggtgctaagagctgaacatttgggagttgacaattgaaagcaaaataagaaagatcagggagggaagtatgtgaggtaaaatttacacataaaaatcagattttaagtactcatttcaatgagttttgataattatacacatctgtgtaaccatcagtcaaaacaagatataaaatatcttacattttctaaaaatttcttcctgacactttccagtgaatttcccatccttatccttttccagaggcaattaaattctgacttctttttttttcctcctgagatggagtctcactctgtcatccaggctggagtgcagtggcgaaatctcggctcactgcaacctccgtctctggggttcaagcaattctcctgcctcagcctctggagtagctgaaactacaggcgtgtaccaccacgcctggctaatttttgtatttttagtagaggcaaagtttcactatgttggccaggctgctctcgaactcctgaccttgtgatctgccctccttggcctcccaaagtgctgggattacaagtatgagccaccgcacctggcctaaattctgacttctatcaccatagcttatgcttacatgttctgagacttcatataaatagaatcatatggtatacagagtgtgtgtgtgtgtgtgtgtgtgtgtgtgtgtgtgtgtcttatacaacacaatgtgttaagatttattcaagttgttgatggtgtcagtgatttgttctttttttattgctgagtagtaggtagagagaaaaaaacttcaaaagtatccatacttcaaacatgcagatgcaggcaatgattattgatttttttgggtgcatttcattttagtatttttttatgtttagttttttgttatgtggaaattaacaaagaccacccaaatgaggacataggctattcagattttgctgtggcaaaacccaccatcgtttgtatttggcagagtcccaaacgcaggcagaagagtgggagagctttgtggtgaaaaaagggtaagctttaagtatgttcttattgtaagttgttggcatgggaagctggaggcaggctgtgtacaagggaggcattctatgtgattggtttgggaagcatatttggctttctctagtcagtattgagttggaagtgttgtgaatgagggagctgcggaagttagggatctggtagtcattggccatttcctgattattctgggctgatgattgcagagattgtggtttgacttcccagactggttgctgcagggattgtggtttggcttccttgtctggttgctgcagaggttgtaggttagagttctattatcatatgtagtttagtaattgtatattatattgtatagtcagtctcttggttatattttggtatgtgttatggatcttatatagaattttacatcctattttttttcacttaacattagaatataaacactttttggttgttaaggatttttttctttatataaatgtaatggctgtataacaatcagtttaggggatgtacttttattactggaaatttaattttcattcagtttttctcttcttacagtaatgcttttacgaacatctgtgggcattaaaccttcagcatatttaatattacttcccgagatgaaatttctagttgtaaaatagttaggttataagtctttatatatcttgttgaattactttctaaaagggttcacctagtagtatataactgtcagttcagtggtattcttaccagctttcgatatttagaaatatttttactaacttagtaaatgaaaaatacacttttgtaattatttaatttgtattttatgattactggtgagcttgattattttccagtatacttactagtcagttgagtttttttttatgaattgtcctttcatatcccctttcttcctatttattggttcctagtaatttctattagcttttatacattttaatatattaaattgatcaatcttttatctgttatagttttgtaaaatttttcccagttcattatttgcatcttgttcatgatagttctaatttgcataattcatatttttttctattgtcaaatctattgacttatccttagtgatttcttttttatcctctacaatccagagtttgaatattcatttctattttctttttttttttttttatgagaaaataaacttattttatttaagccatccagactctggtactttgtcatagcagacccagcaagctaatacaaagtcttatctacatagtgagcacaacagttattacataccattctctcttaactgttatttaatcatagtcctataagtacctgtgtgtttagggcttatattatttccttatattgatgtgttttggctgtgttttagctctttctgtagtagattcctcaggaagagttcatggaaacagtatttcttgagaaatgcattttgatactagtttgtaaggcgctttatattttttacttgaaagtcattttgcctggttataaaatccttgacttttttttctttctttggatgtcttaaatatgctactaatttttccctggcatgaggtattagtattgaaatattttagtgttttgatatatcacattttgacatttttattttaaccaaattcattttagtatatagtatgactccaaaatgatgtttcccccaaacagcccgtcggttgcaccataccatttaacttctgcttccctcttccactgaatgtggtattcctttgtcatatattaagttttgaaatgtactaggatttataactgggataactatgtttttctatttaactgctgcttccctcttccactgaatgtggtactcctttgtcatatattaagttttgaaatgtactaggatttataactgggataactatgtttttctatctttctgcctgttcttgtggcaatcacataccaatttcttttttcagtctaaaggctgaccaaaatgctatgtagactaggttctggaatatttaaaaggaaatacagtttgtgtgcctatcagccaaagactgcatacctgtagttaaacaaagttgggttttctctttttttttttttttagaataagggagactatataccatagggagggcttgttacaggatttgaacttgtgttaggtcattttagacaaagttcaaagaaacacgaattagatattgtcagaaagtggggtaattctatcatttgttatcctaagacgttttaactagaaggtaggaagagtggcatgaggctacataataggtaaagaagaagcagttgcatatgttagctggataaggggagcctttagctattagtgtggtttgtacaatattcttacagttatcactacccagacatgattccacagtggttttatttttgtcttgctttattacggtcatagagtggctttgtttgatgttggttttctgtgaaattattcatgttccaaaagagaaaaccatgacccagcccttagtgccaggtaaactgcagcttacagctgttagaggttgcttattttttcttttgttaaaaaatcaatttattacttttaaagtagtttttgtagataaagttgctagaatatgttgctaagcaggtatgctttaagaactagataagaaaaaaaatttctcattattaggcaacaatttgtattggtcgatttgcagcaaccagagaaggaaaccaaaccacaatccctgcagcaaccagtctgggaagtcaaaccacaatctctgcaatcatcagcccagaataatcaggaaatggccaatggctgccatatttgtatttgttatgtaattgttggataacagctattgttacagtgtaattatatacagtcacatgtaacttaatgatagggataggttctgagaaatgcattggtagacaatttggtcattgtgtgaacgtcacagagtgtacttacacaaacctatatggcatagcctaccacacacttagctatatagtatagcctattgctcctgggttataaacctatatagcatgttgcttgtactgaacactgtaggcaggtataacagaatggtaagtatttgtgtatctaagtatatctcaacatagaaaaagtacagtaaaaattatggtattataattttatgggtccacccataataagtagtccattgttgaccaaaatgtcattatgcagcacatgatggtatgaacttgaaatagtgttcttggaaacaactctcctaagtatataaatttcttatgctcttattatttacatgatttctctatttatttacatttctttccctctccactttgagaaagtaatgcagatgttatttcctccatataatagtctagcaggcagccatttttaattctagcagataaatagaagatttgaagtagcttttatttttctgagagtagttcaacccagcaaatcgctttagtattttttgtgtagctaggtgaatccacaaaattccagttactgtagaaataaagtgaattttaaaaaattaaactgtttataaaagctattatagaaataaaattaacactgttgggactgtaaactagttcaaccattgtggaagtcagtgtggcgattcctcagggatgtagaactggaaataccatttgacccagcaatcccattactgggtatatgcccaaaggattataaatcatgctgctataaagacacatgcacacgtatgtttattgcggcactattcacaatagcaaagacttggaaccaacccaaatgtccaacaatgataggctggattaagaaaatgtggcacatatacaccatggaatactatgcagccataaaaaatgatgagttcatgtcctttgtagggacatggatgaagctggaaaccatcattctcagtaaactatcgcaaggacaaaaaaccaaacaccacatgttctcactcataggtaggaattgaacaatgagaacacatggacataggaaggggaacatcacacaccagggcctgttgtggggtggggggagggggagggatagcattaggagatatacctaatgttaaatgacgagttaatgggtgcagcacaccaacatggcacatgtatacatatataactaacctgcacattgtgcacaggtaccctaaaacttaaagtataataataataaaaaaagaaataaaattaaattccaaaaatcctacaggaagctctgttgtgtatgaattaggctgagtgagataagttgactataatattctgattttttacctaaactatgcaacattagctgacgcagttattttaactgtatctcagaagctaaattatctggccaacatcactgcaaacattctatactgatggagtagtgtcactgctgtttttttcaaccctttgcttttagtcattctgtcatactggcaaacataaattgtgtgatataagaaaattttatgaggtaaaataatatctttaacaaatatatattttgatgagagcattgtattaatatttggtaataagatagccagactgttgaattaatcatactcagaaacttactgcattgggtggagattcagacaaggaagtgcatagggcatagtcacagaaggaatctgtctaaaaattgtatttacttgctttcatgtgattaagcataggcagagattaatattcaagatgaaaattccagatcctagaagagcagaggaaagagtgatatgggaggaactatgatagtggacaagaatttaaatagcttgatcttgaagaactaggattaaagatcatttaggaaccagtagcaaaacgaattcaataccaggtctactgaccaaagttttaaaaaaatctcctttatctagagagtggattacttttaaaggaatgattgtagtttgctgaaaccttcaatttcattttgaatgaaaccaccaatcattttcttcttgtaacttcacactgcaaaaaattttgagctttttttttgcccttcgtattctctctgcctaggttagctctaatttatttctttccctagttttctttttctttttttttttttcatttctctttgttcagtctttcttttcactgtctcagttgtacattctgcctgtgttccaagattaagaataatttctggtgctaaattgtcttgaggcatgttaagatttcagtatattgtaaatttctcatatgacttctttgacccatgtgctatttagaagtgtgttgtctaatctccaagtattttgggggtttccagctatctctctgttattgacttctagtttaattacactatggtcttagagcatactttgtttggtttctattcttttaaatttgttaaggtatgttttatggcccagaatgtggtttacctttgcgaatgttgtgtgaacttgagaagaatgtgtgttctgctgttgttggataaaatattctataaatgccaatcagatccagttgatgatggtacttttaacttttactatatctttactaatttttggcctgtgagatctgttaattattgagagaggggtgaagtctccaacgattatagtggatttatctatttctccttgtacttctattagtttttgctttacgtattttgatgctctattgttagacacatagacattaaggattcttatttcctctggaagaattagcccctttatcattacgtaatgtccatctttatccttggtattttttttccttgtcctgaatttggcattatctgaaattactatagctacacctgttttattttaattagtgtttgcatagtatctttctctatccctttagttttaatcagtctgtgtctttatattaaagtgggtttcttgtagacaacatatagtgggggactggttttttaatccaccttgacagtctctgtcttttaattgatatatttaattcattgccatttaaaatggttattgatagagttgaattaatatctatcatatttgttaccatttttatttgttggctttgttctttctggtttttttttggtcttatactctttttctgtcttgtctaactttgagcattttatatcattcaattttctctcctctcttattaattctacttatttttatactttttttagtggttgcccttaggtttgcaatatatattcacaactaatccaagacccctttaaataacaatgtaccactacatgagccatgcaagttcccttataataaagtatttccagttttttcctcctgtcctttataactgcgttcattcattttacttatccataggttataatcaccaagtacattgttgctattactatttttgaaaaaaaaaatctgttagctcaattaagaatttaatttaaaaagttttttttacccttatttattatttccctaacagtctttctttctttgtatagatctacgtttctgacccatatcattttccttctttctgaagaatttcttttagcatttcttgcaaggaagatctactggtgacaaattccctcaatttttgtttgttcaagaaggttatttctccttcccttttgaagaataattttattggatacagaattctaggttggtgtggtgtttttctttcaacactttaaacatatcacttcacatttttatggtttgcattgttcctgaagagaaatctgatataattcttaccctaagtcctcaatagataaagtttagtttttctgcgtttttttttaaagatttttctctttgtctttgatcttctgtagtttggatataatatcctatgcatatattttttggtgtttatcctatttggtgagctgagcttcctagaattatggtttggtgtctgtcgttaattttgggaaattctcagtcactattgcttcaaatatttcttctgtttctttctcttgacctttctgatattcccattatgtgtatttacattttttgataatcatctcatagtgctaggatattcgattcttcttttttctctttgcatatcagtttgaaaatttctattgaattttcttcaagctcactcttttctttcttcagccatttccagtctataggtgagcccatcaaggacattcttcatttctgttagagggcttttgatttctagcatttctttttgattcttagagtttccatttctctgcttaaattacccacctgttcttacatggtatccactgttttttataaagcccatagcttattaatcatagatttaaaaaatctctgtcatgtctgatgcagtttttgacacttgctgtctctacaaactgtgtcttttttggtcttttagtacatcttgtaatttttaaaatggaaaaaaggatgcacaggataaaagggactgagatacataggcttttagtttgagattatgtttatctgattggggtcaagctgtgattgttctttgctgtagctgtagctgtaatgtcagatggcaaaatttttttctgtgtccttgtttttgtatcttcagttgtctttaggttcacttagagactctttcttaaataaagtctgatacatgcaggtttttttttttgacagagtctcgctctgtctcccaggctggagggcagtggcgtgatctcggttcaccacaacctccacctcccgggtttatgccattctcctgcctcagcctcccaagtagctgggactactggtgcccaccaccacacccggctaatttttttgtatttttaggcctcccaaagtgctgggattacaggcgtgagccaccacgcctggccacatgcagtttttaaaagttgttttcccctgttattataggagccctattgatgtggtgttgaggtgtgggggagggaaaacattctgtaggtctataattaggactcagtcttttagtgagcctgtgtccttgggctgtgaccttcacaagtgcttctcaggttgatttatttttcttttattaggggagacaggaaggctagagttggtatttcttctctcttcccctacctggaaggctggagatggctggaggtgggcatatctcttccttcagtttggttaggctgtgtgtaaaacctcacttggataaagttttacttaagtaaactagtttccactagttttaagtggaaactagtttctcttgaggacaggtcttgttaagaacagaatgctctgagtatatttcaaaatgactcctttttccctccctctgctggaagcaggttgaaattttgttctgatcttcactgtaataacctcacaaaagtgagttgcaggtaaaactcacaaaagtgtagggacacctctaaccctccccactccaccagagtttttaactctcaaacttgttcacattaaacctccagcaatttgtcagttaaattttaggctgtaatcactgtagctcgaaccctgttactgcttcccacgcggaagtttctgtccttaggtttctgctcaggtatgttgtgatccctatatctgcctgtctgtctctctgtttttgggacagcaatttgtcctgtgaccttagttttctgatggatctaaagaaagttgttgattttcagtttctttgcttttttcttgttttgtggaggagagcgatgacttctatctaagcttccacatgccagactagaaatggaaatttcagtatcttaaaaaacaaacaaacaaaaaaacttaaaatcttagggtctatgttggaattaatttatatacttaaacaagggtctcagtatcataatagtagtaaataattgttaatgatttacaactttctgagttacttcgtagactcaaatctgattttgatacacaataataggggcataagtttaaccttttaattatattgaggtttactatgagttattttaaaattgagaagtgtttagtgagtgtttaagatgtatccagcattctttttcttttaaaagtttttttttattttacaagtaatgtatcttccatgtaaaaaagttagaaaatacaggtaagcaaaaacagaacaatctattattttacctagatataaccatcattaatgtttcacagtatttatatgtgatgtttttctatgtttatgattacatgtaaaaagtttttatataaaaatgggattgatacattcttcttggtaatatttctacttaatatattattaacatcttccttgtctgctcatttatttattttttatatatggttaagtggttcatagaattctattaagcatcctggcttatttaaatcattactcaattatttctaatattttactttcctaaagatactacattaaatgtctttgtgcatctttatatacttagaattcttccttgggataaattcctaggagagcaacttcacagctagaaagttagcatatttttaaaggtttttgatatatgcgaccaaattgtcccactgaaaggttgtacaggttgagcaacccaaatccaaaacatttggttattatcctgtggttcctttaactcaatggttgatcttgactctacaccaagctataattcttttgaaagccatttttgtctctggtcttaaattcatatagggcaaatcaagttctttcatctcgagatgggatcaaactactgaaatgctatatagctctcattctaaagctatcagtcacaccatgtgtattcactaggttggtgaccttgaacagttgattagcctttctttttcttttttcttcttagagacagaggcttgctctgttgcccaggctggagtgcaatggcaaaatcatagctcactgcagtgtcgaactcctgggttgaagggatcctcccacctcatccttcccaagtagctggaactacaggggcgaaacaccattcctggctaatttatttttattttttgtagagatggagtctcactatgttgcccaggctggtctcaactcatagcctcaagtgatcctcccaccttggcctcccatagtgctgggattacaggcttgtgtcaggactcctggccttgattagcctttgtaagcctcaatttcatcatttgtaatcataccacccatctcatggggctatagaaataaataaaaattaaatgatataatccacgtaaagtgtttttcattgtgtctagtacgtagtaaacaaatggtagggatatcagccctgggtgcaaggattgtatacatatagacttcttggtttattgctaatgtagcaagaggacagctgtcattttcaagttctttgcaactggcaacaaataagctaagaaagaaagacatggactatattacttctttggtaggggacaaaaatactgtttctgtaagtagattgtgtatttagattttattttatttatgatggaggctcaaaatgttccccctcccctgtctactactggaaattgaagaagtcaccatctgaggaaaagaggtaacccacagatacctaaaagctattcatatttatagaaataacaacagtacctgatatctcagtggactgtttgaaatgcaagtgtgtagctcatgagggaatcagacgaaagcaacagcaaatcgtctttagtagtttaacaccataattagttagataactaatctttttcaatcgtcgaacataacgttaaacataaccccattcttgtttcttttaagaaatacactattactgagaaatatagaaatacctatcaagtgtctataggtatttaatcaggtgtttaacatggtttccggtacaagtatttgtattagaagtacagatggaattggaaggggaccttaaaatgatctagttcactcttttattttatagatgaagaaactgagagattgagtaatgtgtccaggttagattgccagtgacagacctgagaactgaactacgtctcctgacttctaacaaaatatttttacatgtcattctatttctgtaattttgtttcacaagattttcattttttttaaaagtggtttttattttacccaaaagccaaattattttctatgactgctaatttccatttttattatatatcaatgagaaagatcattaagttcatataaattagtttgatagctatatagacacataaaatagattcaacaaaagatgtatttatgtttttcaaatgtgatacagtattaagttgcaatgtgtttacatgttaaatactctggggagagaagctagtgtagctaggaagaaaataaaagtttcagacaagcaggagaatttaagtggaagtactagggcaggaagaaagatggagtggaagccatgaccataaaagatactgcgaaatggaataccaaatttgagttcttaagagtctagaagagtatgatgacgaggctgtgttcatttgaggctgatattaattagtgatgatttgttgagttgaaagagaggacagaatgatgaggtcaaagtgtatgataaattgaagcaaggatattgaagactctgaggctgttgatagggtccagagtagagagaaaatatataagccagatggtaaaatcacgtaagaagatgaaaatgagtcctaggggtggaaaaaaaaaaacagtggaatttatttgtagagcactatctggctacatgagagattgttctttcagtcttgtgttctttattgaataataaagatgataggattggatatcctttaggggttatgcccatggttagttcatgttattagtgtgctggtattcgtattactctgtcactatatattggtatgtatatatacttttcaatggcaagaattgggcctgttaatatatataatttgatgtgtttctttgaaggtatgttttaacatatatatatataatattatgaaaggaagtgatagtat

SEQ ID NO: 757 - DNA, 3940 bp, Homo sapiens
  source 1..3940: mol_type = other DNA
ctggtgctgaaccccgccgcgcgcgctttgaatttcccagccgctaagcgcctctcctggtcggtgtcccaggcagaaaggtgcagagacccatctgacgcaggactccaggtattttaggagggacccatcggcttgcttaattccctgggggattcgtctgaggctctttgcctctgcaaggggagaaccagccacagtttcccggaaggaataacaattactttaattctagctgaggactagactgctatggtccaaagagtcaggaaacgattgcaaggcaatcgttggcacagagaacagagcgactgaagttacaatccagcattttgtgaatctctgccttaggccagccagggcggagagggattaaaacaagctccgaagtgtgtattacaacacagttgagataggacaaaagaaaaacagttgtttttcgctcactgaaaaaatagtttgcaatagcggcaagcaagagcagtttgccttgtttcgggaaaggcaggaagaaacaccccgaaagtattaataggagaaaaggaacaggatttactgcaccttgcgggactcgctctgacgatccttgtgcctttgtgcactgcaggtagacaagctccagcagagagtggccagatgtggtgcctggagcgactccgcttgggtcctgagtgccttcggcggagcggagactggcttctcccgggtcgggcccgcggagccaagtctcgcaccaccgccgcgtgcgcaaatgtgctcactccggaccgcatccctgagttctgcatcccgccacggctcatgccccgcctggccttggctgcgctccggaattcttgggtcgaagaagcagggatggacgagggcgccggccgcacagactgggacccgcgctcgcaggccgcgctgtcactgccgcacctgccccgtgtgcgcaccgcctacggcttctgcgcgctgctcgagagcccgcacacgcgccgcaaggagtcgctcctgctcgggggcccgcccgcgccccggccccgggcccacacctacggcggcggcggcggcccggacgccctcctggggaccctgcgcgtcccgcgagctccgggcccggcgacccccgcggcccccggctgtccccgcccgccccaggacgcgctcgcccggcggccccgcggctgccgcctcctgcgcgtccccgacgggctgctgagtcgcgcgctgcgggctgggaggagtcgccgcctgacccgcgtccgctccgtctccagcgggaacgaggacaaggagcgccgcgcgggctcccagtccccggcccgggccccctccacgagcccgccgtcgtcccgggtcccgtttcccgagcgcctggaggccgagggcaccgtggctctgggccgcgccggcgacgccctgcgcctggccgccgagtactgtccgggaaccgggcggctccgcctccggctgctccgcgccgagagcccggccggaggcgcccccgggccccgagccgtcagctgtcgcctcagcctcgtcctgcggccgccgggcaccgcgcttcggcaatgcagcactgtggtggggcgcagccgcaaggcctcctttgaccaggacttctgcttcgacggcctctcggaggacgaagtgcgccgcctggccgttcgagtcaaggcccgggacgagggccgcggccgggagcggggccgcctgctgggccagggtgagctgtccctgggcgccctcctgctgctctgagggcccagccctccccggggcgctctgcccgggggactccggacactgacagccgcgtggtacaaaataaacgtgtatttgttgttcttatcagtcccgtttcagtacaacactggcagagatgattctagattaactatcccagtaaaagatatgatattttccatagatacctccagaatttttttcagcaaatggaatggttctacagtgtttcccaatatagacagccatttgcataccatatgtaccacacacgcctaggaaataatgaatcacatgaagtgttagaactagaaagtgtcttggcgatctgtttgctccaatcacctcattttaaaattggtgctttccacaacatgcatggagaccatcttggagcatttacttttgaagcattttgtttaagaccccggataagaaaatgagggcaaaagaggtgaagtgacttgtccaagatcaacagtgaattattagttggaacgccagcctgatactcctagctatatctcactggaaaagcattggagaaaatgaaaccattttaatattctaagcttaaataatagttataataggctaggtgtggcggctcacgcctgtaatcctggcactttgggaggccgaggcgggcagatggcttgagcccaggaatttgagaccaggctgggcaacatgggaagaccgcgtctccataaaaaatacaaaatttagccggacgtggtggcacgcacctgtagttccagctactctggggctgaggcgcaaggatcacttgagcctgggaggtcaaggctgcagtgagccgagatcgtgccactgcactccaacctgggcaaccggagtgagaccctgtctgcaaataataataataataataaatagttttacaagcgttaatttatgttttaacccccaaaaggaggcactgctatgcccattttacagatgaggatattgaggcacagaataaagagcagagccagaatttgaacctagacaatcagcatttcactcattactcttatgtaggtaataccacagtgtctaaagggctcgctattaaagttgcgagtattgtgcaacttctctctgaaactgttgacactgaagttcgtgtctacttgtattcctcatcctgcttttggtgaaaaaacaaattgcttgaaatgaataatttattatctcatgctaataacttcaggcattgagatgagctgatgggtctaaagctctgaggaggaagctaaccggcctcagaatcatagaaatgggtgccagccttgttgtaaccaggtgagtttatctgctggaacaggcagtggagagtgtacagatagcatggttttacctctggcttctgataataattccagatttaacaatcctgttttagaggacgattttccctcatcccttgaattcactgccagcagggcatttttttcttttttttatgcaaataggaaaatgcatcctaaatgagggtttaaaaaattgaaaatatttaaatatacaggatggtgttaaatatgactccattatcaatctggattcagaaatggtttctgctttattttatttcattttatcttttagaaacaaggcgtcactctgtcacccaggctggagtgcagtggtgtgatcatagctcactgcagcctctacctcctgacacaagctgtcatcccgctttggcttctcaaagtgctaggattataggcgtgagccaccatgcccgaccagtttctgcttttattaaaattgttcacagttttatacattcatgttcattaaaaatgctatttagaaaagagtttgataaaataaatattatacaaaattcgaagaaaaaagaaaagagtttctgtttcagtcacaaattagggttattgtgatgtgtatttatgatgaccattgaacaaatgtgaagaatactgtgaattctatgactttatcaaaatcagccacatccaggagcttgcagttgttgaccaaatgaatgatgacatagagtagttcagatctatcatgtgctcttctatctaatcagtcaatatttccttggccctcaagccaacattcattttttatgtataaccttcttcatgattttgaaattttgatagggtaactgctaatgagttcacaaatgtagcactttaaaaggaaaataaatggagagtgaaaacaa

SEQ ID NO: 758 - DNA, 32742 bp, Homo sapiens
  source 1..32742: mol_type = other DNA
ccgcgcgcgccggcggcggggcagcctcgctctggctcgcgccgcgcccccgcgcccagtccgcgcgtcagtcggtccctagcgcggctgcggggcggagagctgcggctggcccagcgcgcccacctgaggaggcggcggggtccgcaggcgtcgcgggacgaggagatcggagccgggagactcgcgcagcgccatggcccccattggcctcaaagctgttgtcggagagagtaagtggagccgggatccttccagcaggcggggactgcggctcccgaggagccccgcgcggcccctgccggcagcgcccaggcctccgagcgggctgccggccctgcgccccgggcctgaggctcctggtccgtggggtcccgttattcaggcgccgcccgcgcgagaggaaggcttgccccgctctcccctccctcacctcatgtttcaccccagccctccccctgcagcccgccctcctccctcgccatcctccttcctcgcggtccctgtctcccttttccctgcatcctccttcccctccatccctccctccctctcttcccttcacccccatttctctcccctcgccccatccttcccccttcctccacccctccctcaccccactctctccatcccgcctctcccccatcccaccctccttccccctctttcacccccaacacccgtccctctccttcatctcgcctctaccccctgcagcccgtcaccctcccccgcacccccatcctcacccccgttaccttcccctcagtcccctctccccttcctcgtctttattccttgagcgcccagactccgctcccttttcctgcagtccctcctcctccccaccctcctgggtgagtcgtgacgagcgagatcctggcctgcgtcctcctcccccgccccgggccgcgccgcggtccctggctgcgagacccacctgggagactaggcgcagtggcttggcctggggaggagacgcctgttttccggaggctgagctctgctgggccggggccacctcactcctccccttcccggggcttggcttccagggcggggacttatcaggatcctgaacccctgaaatcactcgggagatgaggagagcttcggtgtccgccgcccagcgccgcagtctgcaatctccctggttgcggggctctgccctgccgtggccgaacgcttcgggagctcagaccacggtggcagggaggaaatggttgtttatgggtttggatgaaaggcaccacatgaatggatttttaaaagtgggtggcggcgagtggcggccgcagcggagcgagggctgatggtgggtgacatttgcaaaacggcatccacagtgctaaataagattggtgatatgtgtggaaaaacagtgccttgtcaatattttgtccatttctttataacaaaaaaaatgtgtaaggattgctgtggcttttgctatctctttggggattaagtgaagattaaaactgggcttttctctgtaggagaggataagaaaggaaaaagaataaaatggtggaaatctagtttcctttccaatgattctctcctatcgtagcgcgcgctcgctgtggaatgcttttggccatgtagtgttcttgttgggcaccatagctgttttatttcccctctccattcttttcattgatatataggaaatactcctactgaggaatctagttgtaaaaccttatctcacctattacatcagaagaaaattgttataaaaactgaacaccaaatgaaacaaaattttaaaaggtgctcatcgtaacaccttcattgtacccatgcagtacgggttctgatacttgtactcgagatgtttagggctaggaggacccatagggatcctctaatgtcaacatctcattttacccatgaataagaaatggagacttagagcagttaagtgacttgacacaatcagtgttaatttggtgaaacctggtgggcatttccttgcaacattagtaaaaaataactttcttcattattctgtatgtatcttttctttccaatatccttttaaagcgtgaaatatagaatagaatgttacaggttgtattctttaaaatgttacatttgtactttgggaggctgaaatgggaggattgcttaagcccaggaattcaagatcagcctgggtaacatagtgagaccccatctctataaatataaaagtaaaataaaatggtatatttgaacactacacattgaagataaaatcctcaagtgttatagaaatcaagttttgcatcattttgctggaacccttgtttatgcaagtggctccataatccccttcccccacctttaattagaagcaagcataaaggtaaaaaaaaatcaatatgcaagcatggtcagaatttactttctgaaataaagcaaacccattgtacacaaagataacaaagcaattttacataaaattggtgaggatggctaggtgcagtggctcatgcctgtaatctcaggactttgggaggccgaggctggcgggtcacctgaggtcaggagttcgagaccagcctgaccaacatggtgaaaccctgtctctactaaaaataaaaaaaattagctgggtgtggtggtgggtgcctgtaatcccagctactcgggaggctgaaccctcgcttgaacctgggaggcagaggttgcagtgagccgagatcgtgccattgcatgccagcatggcaacagagcaagactccatctcaaaaaaaaaaaaaaaaaagaaaagaaaaaagaaaaaaaaatggtgattatgtgaacagagttctattcctataacaattaggtataaattttagaagaaaaatgttgaaatcctttgtcaatgacgcaggttaattctggcttctaattttggatagggtttctagctttgcccttttctctaaaagaggctgaggcagaagaattgcttgaactgggaggcagaggttgcattgagctgagattgcgccactgcattccagcctgggcgacaagagccaaactctgtctcaaaaaaaaaagaacctaattatacattaaaaacaaaaatgacaatcaagtagagcttatttcagaaacacaatagttcaatattagaatgacattaagaaatgaaaattttaaaactatataatcttctcagtagaaactgaaaaacaagttaatctgcttttaaaaacaaaacaaaaactcctagtaatccagaactaaaaggagtagtttaaatgtccctgtagagaaacctctaacctccccaatcccatcaggcctccctgtaatcacggttccctggactttcctttgtaattcttatcacagttgcaattaataaattatttgtactaattgtaagaccataagttcgctgggggtaagaactagtgtctagcacagtgctgtcacaacaaactctaggaataagtctaataggaagttagcaagaccttcataaatggagaagaatgctatgttgctttatggaagaatatgaaaaaatatcagttcttgctaaattaacctatacatttaataaaattcctacaaaagtcccaacattcatctggaatggtaaaggctaagctaagaggagctaagaaatttttgaaaaaaaaagaaaatgggaattttcacctaccagattcaaaacatactgtaaagctacgattaccaaaacattgtagcactaccagatgagagggaaagtgaaaagatcaatgacatagaacaagaagtctagagtaggtccagataagaatcccatatatggcaaaggtagcattttaagtcagtgaggaaaggaaagaaaactcaacatatgatattcaggcagttggctacattttgatggggaaaataaatttacttctgtacttcacatgttcacaaaaataagtcccatagggattaaataaataaaatgataaaggtagtagataataacagatgtacttttccttatattattgtgcaggagctttctaaacattattagaaaacattaaggaaaagactgacagatatgactatacttctattcagtaaaaacaccaaaaagcaatttgaaagacaaataagcttgaaaagtatctgcagcatataacaaagggccgatatctatttatctatctatctgtagagagcttccttaaattgtttttaaaaaaaactaaataaaaaatagacaaaagacatctattagttatctattgttgcataacaaattacaccaaaacttagcagcttaaaacaatgaacatttattgtctcagacatcctgagggtcagggtctgggaggggagcagcctggctgggaggttgtggctcagggcccctcaggaggttacatcaatgggctgtagctatctcaagaccagaccagagctgaagaatccacctccaatggcactcctgttgttagtgggcctcagttatccagcaggctgttggccggatacctcagttctttgccacaggggcttcgcctgggaagccagccggcttcctccagagccagcgacccaaaagagatggagacctggagaccgcagtctctataacctaatttagaagggccatcatcacttttaccatatcctatccatcacacagaccaatgctggcacaaagtgggaggggactacacaagcgtgtgaataccaggaaccagggaccactggaggccatcctgggggctctcttaccccagaatgaaaacaagagctccagaactgggctaggacacagtagaaaagcggggaggagagcaagcccagcaaccagatgccttcactttacacacttctgtatttgattttcttctttaaaatgtatagtgtgctctacttttataatttaaaaaataaaggttttaaaaatatttttattaacaggaaaacagagaatgcctctctggttctgtctgggtatcaccaagttccccagattgtgccaggctctaagtcataataagaatgaccacctactgagaacctatgatgtgccaggcactgtcctagtcacttaaatatactattcctttttttttttttttttttttttttgagacagagtcttactctgttgcccaggctggagtgcagtggtgcgatctcggctgattgcaacctccgcctactgggttcaagcaattctcctgcctcagcctcatgagtagctgggactataggcgcacgctgccacgcccggctaattttttgtattttagtagaggcggggtttcaccttgttgaccagactggtcttgaactcctgagctcaggcagtccggccttccaaagtgttgggattacaggcgtgagccactgcgcccagccaaatatactattcttaacgctaaatgtcctaagtagatataactgtccccattttagagatgaggaaattcaggtacagataaagtcacttaacagtgcacacaagtagtaaggctggaattcaaactcgggcttctctggctccaaaaggctgagctcttcattagaccagtccccttgcccctcgatgccctgtgtaacccactagaagagtgggtaggaggaaagccatcaatcccggagcaccagggagacacacaaaaggcccagactccgggactgaagaactgctgctgacaaaaatagttataaacattcctgtccatttgggatcattgtgggttggtattagaacaagctggacatcctaatgttccaggcaagcagaagctctctgcttcagaccgtatactttctaataatgtaactagccaaagctagtcataaaaattctgaatcactggtcaagaaacacattttctcatcatcccctctatagccacccctccaacattttcccctgatgattgaattctaaggttccctcacccctgcttttctctgccaggggatgaagtgagtagaaggaggctttgtctaaggactgtgaactcctcttaccctctcactgcactcagcagcccgagaggtgagttcaggcatcatccacttagctcttctagggccaaattataagtggaaagcaggagagatcagaggtgtcagactcagtctatgaaagacagatactcctctttttcctcaacctccctcactaatccccacccccccgaataaatacactgacaaagcgttgaaagttgcactttccaagtcaattcagtctctcttatgaagtggcttcagtatttatcaggttatagattatgatcaattggtctgaactttgaatctaaatctaaaaattattgctttgcttcgagtaaaactgtaataataaaaactaaatctattgatcacttattaggtgccagacactgtcctaggcatgtcgtatgttgtcatttaatcctcaaaaagatcccatgagttactctcattagtcttcttttactctaaggaaacagaggctgagagagtttaggataattccacaaggttatcaatttgtcgttataatgtttgtatgtatgtatgtattattttgagacagagtcttgctctgtctcccaggctggagtgcagtggcactatcttggctcactgcaatctccgcctcccgggttcaagtgattcttctgcctctgcctcccgagtagctgggattacaggcgtgtgccaccacggctggctaatttttgtatatatatatgtattttagacggggttttgccatgttggcgaggctggtcttgaactcctgacctcaaatgatccacccaccttggcctcccaaagcgctggaattacagacgtgagccaccgccccagcactgttgttataatgttttagtaactaacatttacatcacatcaacaagtgctaaacactaaactaagtgctttgtgtatgctaacttgttgaatgtctatagttaccctgtaagagaggtgtattccctgcgctttatggatgagaacattgaagtcaggtgaggaatgtgcgctaggtcccataggtgagaagaggcagatgcaggatttggaccctggtagtttggctgcagcatcagtcttaatctcaacacctgtcttctcagatttggattctggctcacaggctgcagagcctgtacttcttttttttttctttttcccagagacaggtttctgttgcccaggctggagcacagcggcgcaatcatagctcactgcaacctcaacctcctgggctcaagcaatcctcttgtctcagcatcccaagtagctgggactacaggcatgcaccaccatgctcagttaattaaaaaaaaatttttttttcttcaagacgaaacctcgctctgtcaccaggctagagtgcagtggtgcgatcttggctcactgcaacctccgcctcccgggttcaagcaattctcttgcctcagcctcatgagtagctgggactacaggcatgtgccactacgcccagctaattttttgtatttttagtagagatggggtttcaccatattggtcaggatgatcttgatctcttgaccttgtgatccacctgccttggcctccaaaagtgctgggattacaggcgtgagccaccgcacctggccaatttttagaaaaatttttagtagagatgaggactcactatgttgcccaggcttgtcttgaactcctgagctcaagtgaccctcccgtctcagcctcccaaagtgctaagattacctagagcctgtattcttaacctctcttccttggtttttgatacttgaaaatcttttttccctaaatttttccaaaaatgtacaggatccaagtggcagacaggtcctccggattctattccgggttctgcccctgactcatgggtgacactgggtaagtcacaactctgccaacaagacactgaaacttgcactttccctctactaattatttaatgtactgcaaatcctgcttgaccttaagtacaggagaaatttgacttgtaaaaagagataacttaggccaggcacagtggctcacgcctataattccagcactttgggaggccaaggtgggagattcacttgagcccaggagttcaaaaccagcctgggcaatatagtgagacctcgtctctacaaaaaatttagaaattagccggccgggtgcggtggctcacgcctgtaatcccagcactttgggaggctgaggagggtggatcacctgaggtcaggagttgagaacagcctggctgacatggtgaaaccccgtctctactaataatacaaaaattagctgggtgtggtggcacacatctgtaattccagctacttgggaggctgaggcaggagaattgcttgaacccgggaggcagaggttgcagtgagctgagatggtaccactgcactccagcctgggcaacagagtgagactctgtctcaaaaaaaaaaaaaaaaatttaaccaggcatagtgtccccgatctgtagtcccagctactcaggaggattgcttgagcccaggaagtcaaggctgcagtgagccaagatcatcctactgcactccagcctgggagacagagtgagactctgtttcaaaacaaacaaacaaaaaaaaggtaactttaggctgggcgtggtggctcatgcctgtaatcccaggactttgggaggccgaggcaggtggatcacctgaggtcaggagttcgagaccagcctggccgacatggtgaaaccctgtctctactaataatactaaaattagccaggcatggtggcacacacctgtaatcccagctactcaggaggttgaggcaggagaattgcttgaacccaggagggggagattgcagtgagcagagatcatgccattgcactctagcctgggtgacaagagagaaactccatctcaaaaaaaaaaaaaaaaaagaggtaactatttggcagtgcctcaaaaagttacacatagagggacaggcactgtggcccacacctgtaatcccagcactttgggaggccgaagcgggcaaatcacgtgaggtcaggagtttgagaccagcctgaccaacatggcgaaaccctatctctactaaaaatacaatatattagccgggcatggtggtgcatgcctgtaatctcagttacttgggaggctgaggcaggagaatcgcttgaacctgggagttggaggttgcagtgagcagagattgtgccattgcactccagcctgggcaacaagagcgaaactccatctcaaaaaaaaaaaaaaaaaaaaaaaaagttacacatagagttaccatctgactcagcaataccactccagtgtatataatcaaaagaaatgacagtatacatccacaccaaactcatatacaaatgtcgcagcagcattattcataacagccaaacaactcaaatgcctatcaagtgattagtagatgagcaaaatgtggcctattcatacgatgaaatattactcagccaaaagaaggaatgaagcactgacataggcatgaagcactcacataggctacaacacagatgaaccttgaaaacacgatgatggccgggcgcggtggctcctgcctgtaatccgagcactttgggaggccaaggcaggtggatcacctgaggtcaggagttctcgaccagcctggccaacatggtgaaaccctgtctctactgaaaatacaaaacttagctgggcgcagtggtgggtgcctgtaatcccagctactcaggaggctgaggcaggagaattgcttgaacccaggaggtggagattgcagtgagccaaggttgtgcaattgcactccagcctgggtgacaagagcaagacttggtctcagaaaaaaaaagaaagaaagaaagaaaacatgacactaagtgaaagaagccagatacaaaggccacatagtggatgctcccatttatatgaagtgttcagagttggcaaacccaaagacagaaggtagattagtggttgccaggggctgggggagggcagaatggggagggatcgctagcaggtacggggcttcttgtcgggtgatgaaagtgttctgaccagctacagggagccaagatcatgccactgcactccatcctgagtgacagagcgagaccctgtctcaaaaaagtaaataacgtaaaatggcaaagcttatgtgaattacatctgaatagtaagctttcagatgtttaaaaaaaaaaagagagagcaagctaacttgaaaggtaagctattagcccagttgacacatttgtcctgaacttttccctgtagtatcgcttaaatgcacatcatcaaggaagtccttttaaaagagtgtcagttggaaacatttacattgagacagaggacttcaatatttaattgcatggcctgggtctccagggaggaggttgcttaaatatgagcatttgttttacttcaaagttaaatacaattctgtgggtgacctgtccatgtcacagtttctccatgcaactgagacagtttagggggaaagaaatcatccctatctgataacagatttactaggattttttttttttttttttgagacagagtctcactctgtcacctagactggagtacagtggcacagttatggctcactgcagcctcaacctcctaggctcaggtgatcctcccatttcagcctctcaagcagctgggacaataggcacacaccaccacatctggcaatttttgtattttttttagagatgggttctcgctgtgttgcccaggctagtctcaaactcctgggctcaagggatcctcctgcctcagcctcccaaattgctgggattacaggtgtgagacactatgcttggcctattatcttaagaaaatatcctaaatgtggttttggaagaaaaaagaaaacaattttcctaggaacaatgtaggaaggtagaataggtataaaagcaaaggtgaggctgagtgcggtggctcatgcttataatccgagcactttgggaggctgagacaggctgatcatctgaggtcaggagatggagaccatccgggccaccatggtgaaactctgtctctactaaaaatacaaaaattagctgggcatggtggcacgtggctgtagtcccagctactcgggaggctgaggtaggagagtcacttgaagccgggaggcagaggttgcatggagtcaagattgcaccactgcagtccagcctgagtgacagagcaagactgtctcaaaaacaaaacaaaacaacaacaaacaaaaaactaaactaaaggcaaaagtgactttaaaatacaaaatactcatccaaacagatgttgctgttacacaggagtaaaaccttggtgacttgggttgtgccagcattgctttcttggctgctgagttatgggaatagccaacaggtcccaggaaaaaggaccccacagcagggagatgaggggctcaaggcagcaactacataccaacccgtatggaagacttccactattttagtatcagccaaactgatgtgtaccatcaggatatcaactttgggttcaagaatacataatgttgagaaatttgggaaagacctgtaacagtctgggacctgagaagatgccatacatatgcaatttaattccacagagctatttgttgcctgcctgccatctataactattctaggcactatggggaatggcaaaagaaagaggacacagtccctgccttcaaagaacttatgacgtattatttaacaaggaagcaaaacttttgaccaggtgtggtagctcacgcctgtaatcccagcactttgggaggccagtgtgggcgactgttttgagtctaggagtttgagaccagcctgggcaacatggcaaaaccccatctgtacggaaaaaaaaaaaataatatatatatatatatatatatatatatatatatatatatatatatattagccaggcatgttggtgcacacctgtggtcccagctacttgggaggctgaggtgggaggattgcttgagcctgggaagtggaggttgcttgagcctaggttgtgccactgtactccagcctgggcgacagagcaagacgctgtcacacacacacgcgtgcacacacacacacacacaaacttttaacaaataactataacaggccgggcatggtggctcatgcttgtaatcccagtactttgggaggccaaggcgagtggatcacttgaggtcaggagttcaagaccagcctggccaacatggcaaaaccccatctctactaaaaatacaaaaatttgcagggcatggtggcacatgcctgtaatcccagctacttgggtggctgagacacgagaattgcttgaacccgggaggcagaggttgcagtgagctgagatcgcaccactgcactctagcctgggcaacagagcaagactttgtctcaaaaaaacacaaaaaccaaaaaaaacccctataacctaatgcagaatgcagaaagtgccataataaagaactgaggccgggtgcagtggctcacatctgtaatcccagcactttgggaggcggatgcgggcagatcacgaggtcaggagattgagaccatcctggctaacacggtgaaaccccgtctctactaaaaatacaaaacaaaattagccaggcgtggtcgtgggcacctgtagtcccagctacttgggaggctgaggcaggagaatggcgggaacccgggaggcagagcttgcagtgagtcgagatcacgccactgcactccagcctgggcagcgagcgagactccgcctcaacaataacaacaacaacaaaaaaaaactgaatggcgtctaaagagtgaaaggagaaatttatttgatttgatttgatattttttttgagacagagtcttgctctatcacccaggctggagtgcagtagcatgatctcggctcactgcaacctccgcctcccaggttcaagcaattcttctgcctcagcctcccgagtacctgggattacaggcacgtgtcaccatgcccggcttatttttgtatttttagtagagacagggtttccccatgttggccaggctggactcaaactcctgacctcagatgatccgcctgcctcggcctcccgaagtgctgggattacaggcgtgagccactgcagctggcctaaaggagaaatttctattccagataggaaagagaaaaatatcttgttgggaaaaacagtattaaccagatcttgaagaatggggacattcccaggatgagcaagctatattagaatccttttaaaaaatagaagttctaaaagtatgacacttttaattaataaactggaaacgaagacacaatcggaccactcaacaatagtgatttttaaattttaaatgaattatctaaaaagacataggccagacacggtggctcacacctgtaatctcagcactttgggaggctgaggtgggcagatcacgaggtcaggagtttgagaccagcctgaccaacatggtgaaaccccgtctctattaaaaatacaaaaattagcccgacatggtggtgagcgcctgtaatcccagctactcgggaggctgaggcaggagaatcgcttgaacctgggaggcggaggttgcagtgggctgagatcgcgccactacactccagcctgggtgacagagcgagattctgtctcaaaaaaacaaaccaaccaaccaaaacaaacaaacaaaaaaatatacattctacaactgtagttgtgatcccctttctcattctatcctgtttgtgtattattttcatggaaatacttgctggaaacttacttattttactttcctttaaaaaaaaatcacttttttattttttgagacagagcctcgctctgtctcccaggctagaatgcaatggcacagtcttggctcactgcaaccgctgcctcccaggttcaagcgattctcctgcttcagcctcccaagcagctgggactataggcacgtgccacgacacccggctaattttttgtatttttagtagagatggggtttcatcatgttagccaggatagtctcgatctcctgacctcgtgatccgcctgcctcagcttcccaaagtgctgggattacaaacattagccaccgcaccccaccaaaatcagtttcttctatattgtgtgtagctattctaatttattgaataaaatgctgggataatttattaatttttctttgttttctactaaaagcatctaaggatatgaattttcatctgagtacagctttggttgaatcccataggtttttttcccctgctccatagtttttatttttatttttatttatttatttttcagacagagtctctctctgttgcccaggttggagtgcagtggcatgatcttagctcactgcaaatccatcttccgggttcaagcaattcttttgcctcagcctcccgagtagctgggattgcaggcatgcaccaccatgcctggctaacttttatatttttagtagagacggggtttcaccatgttggtcaggctagtctcgaactcctgacctcaagtgatccacccgcctcggtctcccaaagtgctgggattacaggtgtgagccgctgcgctcagtcctgcttcatagtttttaatatccaatatttttgccatttctttttttaaaaaattattattttgttattttagagacaaggtctcagtctgtcacccaggctggagtacagtggcatgatccatagctcactgcagccttgaccttctgggctcaagccccctgagtagctgggactatatttgtgtgccaccgtgcctggctattgccatttacttctaaatatagtcctttgttttgaagtggatgtcactctcataactggtgataagtagtttaaattgtggcaaaatttccctaagaggtggtttgggactcaggcatcatcatcaaatgtaagagagcacgtatctgcctctagtatccaagaagggcttattgaacgtgcagtgaaaggttttccctctggcttttttggcgcacagcacctctgagacaaacaggtgcttgaaagctaatgaaatatctttagtggagtggtcaggccaaattttatagttatcactggcaatgtaacagccataaattttgagtcctggtcctgtgctcgcctgtacaggaagtgctttgggaatccccagtatgatcctctttaattgcctcaattagttgcttctctgcgaggctgttgcaagagctaaagttagagtgaggtgactgagactctgttttcctttcagcaagtatgaggtttacttacctttttccatgtcttttttcttttttatttgttttggagggaggggtggtggtgggagatagggtctggctctgtctcccaggctggagtagagtggcacaatcacagctcactgcagctttgatctcctgggctcaagcgattccagctgggactacaggtgtgtgcaaccacacctggctgatttttgtattttctgtagagaaaatacatgttgtccaggctggttttggactcttgggctcaagcagtctacccaccttggcttcccaaagtgctgagatcacaggcatgagagccaccgtgcctgaccttttttggttttttgtttgtttgtttgtttttgtttttttgtttgtttttttttgagatggagtctcactctgttgctcaggctggagtgcagtagcataaccttggctcactgcagcctcaacctcccaggctcaagccatgctcccacctcagcctcccaagtagttgggactacaggcatgcatcaccatgcctggcagatttttcttttcttttcttttcttttttttttgtatttgtgtattttttgtatagatggggtttcaccatgtcacccaggatgatcttgaacttccaagctcaagcagcattcccacctcagcctctcaaagtgctgggattataggcacgtgccacagcacctgccctgatctttaacttttttcttttcaacatccacccatctctatctgtcactttattttatttatttatttttttcttgtgagatagagtcttgctctgtcacccaggctgcaatgcagtggagcaatcctggctcactgtaacctccgcctttggggtcggggtgcaagtgattttcctgcctcagccttctgagtagctgggattacaggtgcctgccacctagtatccaaaaagggcttattgaacgtgcagtgaaacgcctggctaattttcgtattttcagtcacgacgggatttcactatgttggccaggctggtctcaaactcctgatctcatatggtcctcccgctttggccccccaaagtgctgggattataggtgttagccactacacccaacctctacctttcactgatgtctactaattatttagtctacgagcaaaccttattggaagtgaatgagatattaagtatttattacagtaggaaaacctgttttattcttggaaagaaaaaaatttagagggagataaagaaaagtggagaaaaacaaacaaaattaaaaaaaaatctttggagcctggatgtgtgaattcaaattcatgcagatttgaatctgagtctccagtagccaccccttatttggtgtccttctgagatgttagagaactccaggaccataaattatagtctgtgttcatttcagcatggctcagcagggtctgggaccaagtgttttcattcatccaaccaatatttgcgctgtctctacatgccaggagctgtgctgcatgggcagcagagatagtagtgtgtaagtagaccgggtccttgtgggatttagacagacagtggtgacgcagcaggaatgtgccctgacagggcaatataggtaatgctgaagcatgtgggaagcccccaggaaggcctgggcatgagcggggcagagtgagacctgcaggatgaggaattagccaggcaggagatggggtccgtggggcctgggggagaggaaggtctaagcttggcaagaaaatgagaaaggctgtggctggctggagctgtggggagtgtgtggagagcagtcggagagttgccagggcctgcttagccttggtaaggtcgtttatctctctattccagcagctgtgggaagctactgaaggttttgagttggggagaggcatggttagaattgagttcaaaatgctatctggttgctgtgtggagagtgggcgggaggcagtgggagggaagaggctgtggtgctggtcctagctggggatgtgatggcgaggatggtgatttatgccagggagagagcagcagtgttgggagggggaccccaacttgaaggcatcttaggatgcagaagggtcaggtcatggtgatggctgtgcaggaagaggagaggaagagtcagaaatgaatcccagttttctggctcgggcggccagttggaaggtcatgctgtgcattgagagatgaaaggcggagaagagacaggtttgtgggggaagatgaggttttgtaggcacaggcttcaggtcctgtggaccacctgcgggggatgctaatgggagcaggcagacatgcttgagattggcagtcacccggtgccagagtgtgggcaggtcagatgcacaggagagtgggagaagagggctgggatctcaccccgtgggacactggcatttacaggacaggcccagggagagcagccagcaggcctgagtgtcggaggggaaaggtgaggctcacagcagtgtcttatgattttgtgactcatgggacccaacctcaaactgagccagtgcaagctgagccagccaccaggaggctccagtttaggaacagcccccactctctaggctgggaggcttggccgctggaaacttctcaggagtttgcctgtctgtggtgttgcccctgtgttttagacaacacttgcctgtgttaacttccttgctcaggattgttttaaggaggaaatgaggaaatggttatagttagtcgacgtgcaaaactctgagcatttgggctttatgctgtgttaaaatggcatcagattggctgagtgtggtggcttatgcctgtaatcccagcacattgggaggccgaggtgggtggatcgcttgagcccaggagttcaagaccagcctgagcaatgtggcgagaccctgtctctaccaataaataaataaataaataaagtacgaaaactagccagacatggtggcacacgcctgtagtcccagctactcaggaggctaaactgggaggatcacttgagccaaggaggtcaaggttgcagtgagccatgacacaccactgcactccatcttggggtgcagagcaagaccctgtctgctgtggttttgttctgtgtccccacccaaatctcatcttgaattgtaatccgcctaatccctacatgtcaaggacaagaccaggtagaggtaattgaatcatgggggcagtttccctcatactattctcagataatgaatgagtccaaaggttttataagcgtcttgcatttttcctgctggcactcattctctctcctgctgccctgtgaagaggtgtcttctgccacgattgtaagtttcctgaggcctccccagccatgcggaactgtgagtcaatgaaacctcttttctttgtcagttacccagtctcaggtatttcttcatagcagcatgagaatggactcatacatcatttcaaaaaaaaaaaaagatggcatcaaattgtagaatcttggctctggaaaggatcttagaagaatctagtccagaccgtgacccagagtaggaagtcagattgtgctagtctattagcttgatcacattggccaatttttttcttctctgtggctgctggggatacagtattatcttcatgttccacaccagtgtagagtcacaatggcaagtataaaccatgaagagtgtgtggaggcagaaaggctgtggctctggactctagttggttctaatccagtcgcagttgagcctcgtgagcctcctttatggcagtaggaacaaagctgcttcattttggcagtgaagggaggaaaaaggaagaaaatttaggcttaaactgtttttggagcccccatactgggtacgacaaggtgaaccaaaccccacttatctcttctgtcagtttcttctgagcattggtgtggtcaggatagcattggagaggagccccctgcccagtctctggacacattggtattgatggttctatttgctaaggacttgaagaaaacaaaacactggtggtaagcaagagtcacccttcgctctgggagaatttcacactacaggctttaaacaatagactacagtgaggcatagcccttaaaaatcacttaatctgcagacctccttgtattgggggtcaaagtgctgcttcaggattttaggatgaggctattacttgactactcagaatgtttttcagtttgctttcccttagataatcttagggtggattaccctggggggtgactctggctcattcctcaataatcactaattgactagcaagaagatcccttaaaaaaagtcacgaggccaggtgcggtggctcacacctgtaatcccagtgctttgggaggccaaagtgggctgatcatctgaggccaggagttcaagaccagcctggtcaacatgttgaaaccctgtctctactaaaaatacaaaaaattagctgggtgtggtggtgggcacctgtaatcccagctactcgggaggctgaggcgtgaaaatagcttgaacccaggaggcagaggttgcagtgagctgagatcacaacactgcactccagcttgggcaacagagtgagaccctgtctcaatacaaaaacaaaaacaaactgattgggagctctcaccctgtggatgggcctgacctggataggctgtttgttggggaactcccggtgtcagcatatttagatttttcttcttggtctctgattccccagaaaggtcttcttttgtctgctgtctgggagataaaggtctggctaccagaattctgggaactgactggatgagatgagctgacagtgggttctcaacaagctttatgcccctcttattcttttttttttttttttttttgagacagagtcttgatctgttgcccaggctggagcacagtagcatgatctcaactcactgcaagctccgcctcccaggttcacgccattctcctgcctcagcctcccgactagctgggactacaggcgcccaccaccatgcccagctaattcttttgtatttttagtagagacagggtttcactgtgttagccaggttggtctcgatctcctgacctcgtgatccgcccgcctaggcttcccaaagtgctgggattacaggcttgagccactgcgcccagccacccctcctattcttttaagttccagaggcagctggtgctgccagttcctgaaacttttgaggattctgctgtgtacatttggttggttttcactgctccctaccaccagataaggattccgctttcatgggcctactaagtcagttacaacgcatctattgtagaaaataaggcgacagactcagaatgtaaaaacacaactttatcatttgtaataactgcattccaggaaggaaggaggggagtagccaccagccagagactggggaccaccacgcccgagtttctttcttttttgagacggagtttcgttcttgttgcccatgctggagtgcaatggtgcagtcttggctcactgcaacctccgccttccgggttcaagcgattctcctgcctcagcctcgtgagtagctgggattacaggcataagccaccatgcatggctaatttttgtatttttagtagagacggggtttctccatgttggtcaggctagtcttgaactctcgacctcaggtgatctgcctgccttggcctcccaaagtgctgggattacaggcatgagccactgcgcccagccctgagtttcttaacacagcagagcctctggctcttttggccacttgtttttctttctcactgagaggaaatagagtctcctaagagaaagagttttggaacaccacaaatccaggaatttaatactgaactagccctcagctcactttgaagcaggaaatcaggtgaggctaaggtcatgccttctgactggataaaccctcccggacccaggagacatcctcacctgcccggaccccgggaggcatcctgacccttgcggaccccaggaggcatcctcaccctcctggaccccaggaggcatccttaccctcggggaccccgggaggcatcctcaccggagcaatctttggtatagaacttttaactaaattacacagtgtggagagacaagcttcagtcatttctccactacccactcagtgcctggcggaaggcaggcagcacagaccttcatcccaacgcacgaggggaatattcaaatcatgccttaggggcacagggaagggagtcagagactgccccgcctgtgattttgatacaagtagacagatgatctgagagaacagcctctggtctagatgatttcagtggaaaagaagaagaaagatccatgtggaaactttgtaaacgttttatgacgggaaaagacaagtgtagcatttaggtaaagaagaccagcacagagaaaaccatttatcattctaacataaaatgatcaaccaagagctcaaatgtgatgtaatgtgagataacagaatgaggtggaaaatggcctagcaggggaattcaaaaacagcaaatcatggcattgcagaatgaataaaccaattttacaccataagaagcagaatcttcgctataaaatatggaaattgcttgagaaatcacgcagcctgcatattcatgagcattagtgctccccgtgtttcttttggatttttcgcgtcttctcttcctggagctccacctccttcccgtgctcgatctttggccccaaccccaaaaggatgttttcttttcctggtatcttactgtagccagttccacaggttggggaaaggaagccctcttaacactggccctttgtgtgtgtggatgggtgggtggggcatttcctgccttctggaagcttccctggggcttttgtcttatgtgggtttgacatcaatagcatggctgaattgagggttccagagggagcgtgagcttatggccttgtcatgttgtgtgggactaaacatttcctaatatctcagatctgtagacctgaagcaggctaaatcttagagcagaacagattgggctggtcagaatcttggacttgaaaataagacagagctgaacttggtgacatgcacctgtagtcccagctactcaggaggctgaagcaggaggattgcttgagcccaggtatttgaggccagcctgggcaacatggtgagactcatttcaaaaaagaaaagaataggatgactgtcaccaccatggtcatggataaatcatgtgatctctcctggattcagtttctttataagatagactgcatcagaatttctcagtgttggcactattgacattttgggccagatgagcttgtgccttgtgggatgtttagcagcattcctgacctctacttgtagattcccatatcatcccctagtcgtgacaataaaaaatgtatccagacaatgctgaccttcctcttgggggcgcaaaatcactccctgttgagaaccactggactaggtgatctttttttttttttttttttgagatggagttctgctctagttgcccaggcaggctggagtgcaatggcgtgacctcagctcactgcaacctccacctccctggttcaagcgattcttctgcctcagccttctgagcagctgagattacaggcaaatactaccatgcccggctaattttttgtatttttagtagagacagggtttcaccatgttggccaggctggtctcgaactcctgacctcaggtgatccacccacctcagcctcccaaagtgctgcgattacaggcgtgagccactgtgcccggccccactggactaggtgatcttatgtctcctgtctgctgctgggtttctgggattgtatgaaacactccattcttttcctctctctttagttttagactcatctttaagtccttagggaaactcccattcaagccaagagatgtgatttggagccattaaatgctgcatctaccaatttaagatgctagccacatcttgggttcctgccaagatcaagatacatattctgggtttctgcagttgaaggaggaattcctgcagccatcgcagagtctgtagtaggagcacaagcttttttcggagacacagatgtggctgggcgggtggctcatgcctgtagtcccagtactttgggaggccgaggcgggtggatcacctgaggtcaggagtttgagaccagtatgaccaatatggtgaaactccgtctctactaaagatacagaaattagctgggcatggtggcaggcgcctgtaatcccagttacttgggaggctgagacaggagaattgcttgaacctgggaggcggaggttacagtgagccgagatggtgccactgcactccagcctgggcgacagagtgagactccgtctcaaaacaaacaaacaaacaaacaaacaaacaataaaacagacacagatacaggttgacaggccaagtgggcattaacagatgaggactgctgctgttggtaatgtataagggcaatgtcttttctatctttttttttcctggtcagctgtagtcatgtatctttttttttttttttttttttttttttggagatgaagtctcactctgttgcccaggctggagtgcaatggcacgatctcggctcactgcaacctccgcctcctgggttaaagtgattctcctgtctcagcctccccattagctagggctacaggcgtgcatcaccacacccagctaattttttgtatttttagtagagatggggtttcaccatgttggccaggctgttcttgaactcctgacctcaagtgatctgcccgctttggcctcccaaagtgctgggattacagacgtgagccaccgtgcctggcccaggcttcccaaataactgaatgctggtatcactgtggtgtataaaaatggtcctcattttccagtcctttcttttaaagatgtccttatgtagcagagctttatgtggtgagagtagtgtttgctcccctggaaggttactatttcacaatttttgtctttctttggtatttttgcttcaaaatatcaacataactcaatagtgttgatgacaataagctgttgattttaagaagatatgaattattggatttccacttttgattgatttttccatttgtgtgtattttgtaacgtcacagctccttttatccaaggaacgttgtttcaggcaacataaggaagaaataatttccctttagaactgaggggaggtgactgctgcctctaacatatacttaggaactcctatttttcatctccactagccctggtttgagattttttttttttggagatggagtttcgctcttgttgcccaggctagagtgcagtggtgtgatctcgcctcactgcaacctccgcagttcaggtgattctcccgggttcaggtgaacctgaacctgaacttctcccgcagttcaggtgaacctcccgggttcaggtgattctcctgcctcagcctcccaagtagctgggattacaggcatgagctaccatgcctggctaattttgtatttttttagtagaaacggagttttaccatattggtcaggctggtctcaagctcctgacctcgggtgatctacccacctcggcctcctaaagtgcagggattacaggtgtgagccactgcgcctggctgaagttatttttatttatttatttatttattttttgagacagagtttcactcttgttacccaggctgtagtgcaacggcatgatctcggctcaccgcaacctccacctcccgggttcaagtgattctcctgcctcagcctcccgagtagctgggattacaggcacccaccaccacgctcagctaattttttgtatttttagtagagatggggtttctccatgttggtcaggctggtcttgaactcccgaccttaggtgatccacccgcctccacctcccagagtgctgggattacaggcatgagccaccgcgcccggccatggctgagatttttttttactaatcactttgaaggttcatgagtctttgcttagagattttctggctccttcactttttggctccaaaccttataaaacagggatataaaataaaaaatgggagtctctcttgaaagagaaagtaaatagtcatttctgtaaccctacccagtatctttatggacccgaggttaggatttggtttctcggatactaggcatttatcatcaggcactctctcggatattggcagtaacccaggttttgtatgttacagcgttggacatttgagtcttatgcaatctttgggtgtgctcagtaggccgatgtaatcaaatcattgttaacccatctctacacgttttaaagcttgtgacaactccaaacaattagccctcacccttttttctcactacccattacccaaaaatcaaacctaaatagagatgttctcagattataaccaggctaattagttgtcattcaacagttacagggagtgatacccagtgcttgccctgtggctgacaatttgagatctctattttggtctctcccacttcccacaaatacaatttagatataaaattatagtaaattattctagataactaatagttgatagagttactgtcttcaaatgaaggcactatggaacagttttatattaagcataactgcatttgttttgtttttgtttttaaaaattttttctagagacagggtcttgctttgttgcccaggctggtctctaactcctggcttcaagcgatcccactttggcctcctaaagtgttgggattacagccattgtgcccagccagttttttgagtttgaattttaattttttatctaaaattctctaatgattttagaaacagctttattgggatataattcacataccataccattcacccatttaaagtgtataattcaatggcttttagtctattcatagaacagtgtgtccatcatcacaatcaattttagaacactttcaattaccccagaaggaaactccatattccttatatgtaacccctaaaccccccatctctcctgctgtaggcaactactaatctcctttcaatttgtatggctgtacctgttctggacattgcatctaaatggcgttacataatatgtggtcctttatgactgcctgcctttttttgagacggagtctctctctgtcgcccaggctggagtgcagtggtgcaatctcagctcactgcaagctccgcctctcaggttcacaccattctcctacctcagcctcctgagtagctgggactacaggcgcccgccaccacgcctggctactttttgtatttttagtggagatggggtttcactgcattagccaggatggtctcgatgtcctgacctcatgatccgcccaccttggcctcccaaagtgctggtattacaggcgtgagccaccgcgcacagccatgactgccttcatttacttagtgtgttttaaaggttctttggtcttacaacatttattgtacttcactcctttttaatgactgaataatactccattgtgtggatatactgcacttacccattcacccgtcagtgggtgtttgagttgtttccactttttggttattatgaataatgctgctagaaacattcatgtacaagtgtttgtgtagacatatgttatttatttatttttaaaatttatttattattattttttgagacagggtctcactctgttgcccaggctggagtgcagtggcactatgtcagctcattgcaacctctgccctctgggttcaagcaattctcttgcctcaggctcccgagtagctgggattacaggtgcctgccaccatgcctggctaatgtttgtattttaagtagagacagggtttcaccatgttggccaggccgatcttgaactcttgatcttaggtgacccacctgcctcagcctcccaaagtgatgggattacaggcatgagccaccacgcccagccaacatacgttttaatgtctttaggatatatacctaggaatggagttgctggatctctatgtttggttatttgaggagctgccggcctgttttccacatcagctgtaccattttacattctcaccagcagtgcatgacggtccagtgcctttttatcttactgcgcttaaggtgtaattccttctttctcagactggactgtaaattctttgaggtaaatacattgatttatatgttgcttgtatcctctattgccttcaagtggttatgtgcattttattgtgcaattgctagatactttgtttctctcagcgtcagtgttttactttgtaaaatgagggtgctataattcttgacctctgagggctactgggagctttaaatgagatgatatatgtaaaacacatgaggaactctctcacatgtagtcaaccttcaatatgtttcagatattgctattattatgggcattttttttgttattgagagtaaattaacgattgagttttttctttattttgaggagtcttgctttgttgcccagattggagtgcagtggtgcaatcttggcttgctgcaacctccgcctcccaagttcaagcaattttcctgcctcagcctccctagtagctgggattacaggcacctgccaccaaacccagctaatttttgtatttttagtagatatggggtttcaccatgttggccaggatggtctcaagctcctggcctcaagtgacctgcccgcctcagtctcccaaagtactgggattatagatgtgagccactgtgcccggctgactttttcttttttttcttttttctttttttttgtttttgttttttttgagacggagtctcactctgtcatccaggctggagtgcagtggcacgaccttggcttactgcaacctccgcctcccgggttcaagtgattctcctgcctcagcctcccgagtagctgggactacaggctcacaccaccatgcctggctaatttttgtatttttagtaaagggtttcaccacgctggccaggctggtctcgaactccagaccttgtgatctgcccgcctcggcctcccaaagtgctgggattacaggcgtgagccactgtgcccgccaagttttttctttataagagctttgaaaaaattttggctaaggttgtaatatctcaatcagacactggttaaaaaattagcagtaggggaattatcagatggtggaccttcttccaagcccccagcaagttcattaaactgttaaatttcctttgggcactgatcactctccgaggcgatggtgtttatttctttgtgtttataggcagtctctcccttccacaccagagtgtaggcattttgtttagcttgctcatcatggtctttctgatgcctagaaggatgtctgccacatagcagctgttcaataaatattgtggaatagatgagaaaaaatgtatgcagagaaaaaattagaagacaggagacatattacaaaccccatggaggaacaataaatcactagattcttccttattaggaacgtaaaaatattatttaaaataggtgataatagggccagtgatagccaacagggttaagtactgttgtaaacactaagctaagtgctgtacaggcagtcacttatttaatcctcacgatacccctatgagacatttgcggtccttcccattttacagatggagaaactgtgacacacagagatttaataacttgcacaaaggcacagctaatgagtggagaagcagggagttgaactttaaccatctgtctccaaaacccatttgaatccctttgctttactctgtcaaggtgatcatagcaatgtagcacaacaaaggacagctgggttcagtgtcagagtctagcccatgctagagccagagagacgacatgtgcagtgggaagaacatgcggacaggggtccagagaatagttgctcatgctagagtgaccaattagtggcttacccactccagatggctgtcttctgcagggagtatctcaatccccaaattgagacctgagacctgggacctggaacctggccttagctgatctctgaggttctttccaatattaaagttttcaagccccaaagaagaatagttgaaaattactttgcctccccaggctacaaggtgacatagatcaaaaaattttattagcctcctgtgttagtgtttatgtttacaataaagtcctcactaatttgattggaataaatcagcaggtctccatgtagagactgtcttatgaatacatttaaggagatttgtgcaaattattgtatgttcatactatggaatgctatgtagtttgaaagcatgtggtaggtctgtgtgaaatgatacaagagaaagtctataatatattgagtagaaaatgtaattgcagaacaatgtgtatacgtgtaatatcccaaccaaagagctgtgtacatgtgcatacctccccacacctgggtgtatgtgcccaggaaaggatctgtaagggcacacccgaaactgttagtggctgttttccccgcaagagtagggggaaggagggaaatttcaccctgtatttatataatctattgtttgatttttttttacaagaatgtgctacttttttattattaagaactacataggctgggggtggtggcacatgcctgtaattccagctactcgggatcctgaggcaggagaatcgcttgaactggggaggcagaggttgcagtgagccaagatcatgccgttgcgctccagcctgggcaacaagagtgaaactccgtctcgaaaaaaaagaactacgtaaaggcaaaaagttaaagtggtttataattaggttaccaatagtgtgtgtataaatgatatttccaagaaaggaaacttgagagtacttggaaggcttgttttcaagtatttgtaccatttcctgcaatcttgttgaacattaacttattccacctgggaaaatgcagttgtttatcaaggagacccttcagccccacacgagacattcagagaaacttggttgctgtctttgctgtcaggaaagaggaagactacctagacatgttgctccagagcagaatttccagcagtagattgaaccttcggaggccgagtcccagcccagtgtaaactggtaaagagtgagccctcttcctacaatctggttattgctgctgtgtaaaaagtcctcttgatttttatgtatttatttcttatctgctgccttactaaatgttttaatgttgctaatcattttgatttctgcagatatatatcattattactaatattgtaactcattttattttctaatctgactgaatttttggatacatgttaaataataacaattttaaaatacagacctgtgtgccctgttgtgactaaaatgcctttgactttctatcggcctctgcttgtgcttcagattaactcacagatagccaggggccactctctgccctctcagaaggggacgggggtccttatgttcaactttatattttctttctttcttttttttttttttagtttgagacagggtctcactcttgcccaggctagagtggtacagcagcgtcatcttagctcactgtagtctctgcctttcaggctcaaagggatcctcctgcctcagcctcctgagtagctgggactacaggcgcgagctaccacacccagctaatttttgtattttttctagagacgggtttttgccatgttgcccaggtcaaactttatattttcatttaggattcgtatacattggtgctatagtgccattattccaaaaatgtattcatatgtttaccgcaggtcagagaagttttgaaatttttggtgaaatatccatgtagtttgctatctgaatatctttatgattatttaaaaactattttaaacatttgtttccttttttttttttcttgaggcagagtcttactctgctgcccaggctggagtgcagtggcgtgatcttggctcactgcaaactccgcctcccaggttcaagcgattctcctgcctcagcctcccaagtagctgggattacaggcacccaccaccatgcctggctaatttttgtatttttggtaaagatggggtttcaccatgttggccaggctggtctcaaacttctgacctcaagtgatccacccacctcagcctcccaaagtgctgggattacaggcatgagccactgtgcccggccacatttgtttccttttaagaggatttttacattatgttaaaaatcttgattggtagaagttatatttcataattttcttcttcctttgtatgaataatatgcttttatagtgatgtcacaagaggtgccttttgcagagtgcctcatacgtgtcactggactaagtaagcattttatctcattaatcttcacaacaggctattagagtattataattttaattttgcagatgagaaaactgaaacttaaaatgttttaaacttggcaaggcacggtagctcgatagctcacgcctgtaacctaatccaagcactttgggaggctgaggtaggtggatcacctgaggttaggagttcgaaggcagcctggccaacatggtgaaaccctgtctctacaaaagacacaaaaattagttgggcgtgatggcgtgtgcctgtagtcccagctactagggaggctgaggcaggagaatcacttgaacccgggaggtggaggttgtagtgagtcaagatctcgccattgcactccagcctgggcgatagagggagactccttctcaaaaaaaaaaaaaagtcccaaggtcacacagccagcaaatgcctgaacctggatgtcagccctggtctaactttagcgcttccttgggcatttttgggggtgatttctgcttgagcagccagcattaccccctcagacccctggagttcagtcaagaggatgccttttagaagaacgtctactgttgagtcagaataactctggaaattccctgtactctggattggtaaaaagaggcagggagttgtgggctgaggttggactctcttagttccctcagcagcatgaaggcaacttctcccaacctggggaaagtggatcctggtgcctctgtcctgggcagtgtggtgctctggggctactgtgtggaatcttggaatcgcctgtggtgttgactttggttgcacttctcctaagcttctggctcatctaatattagtcacgctacttcaggtgtttgcatgtgccctgggctcagggcatcgggcatctggcatatgtcactgtggagggcagttgtgagtccctcctgggctgtgagggtggggcttcatagggagctgcaagccttgagcagtccctgtagcgatccctggagcctgtgttttgggactccagttgaaatattgggtgcatttgaagatgtcccagatcatcttagaccaccggccatttttctcaggacatggcagagatttgccaaggttgggagtcacccaggacctagaggatgtggttgagaagggacctg

SEQ ID NO: 759 - DNA, 32744 bp, Homo sapiens
  source 1..32744: mol_type = other DNA
ggtctgaggttgtaactttaacaggtgtaagtatttctttcctctgtttcagctggaagttttgagagtgaaatattcacagccattaagagacctccaaattaatttctcaacatgcttattctatagttcacattcaatccagagcactgaaggaactgaacaactggacactgtagacatcagatagctggccatggtgttggccatggcgtctcaggatgttcagaacttcttccagcctttctcttcctggatatctcgggtttatgaagctctccagcaagcaggagatatgttatctgcttcgctggttaacataagcaaacaagactctaaattgagtgacaaactagatcaggacttagataatattcagattcaggaaacgtactttgaagatgaagaacaagacaatgattggagtcaagaggatgcaaattccttgtttcttgaagtggatcatttctcatgttgtaatagtgatttgcaggactctgcccaaaattcaagcccaagccttagccaacatgcaaaggactcatgttccacaatgtcccagtggcccaattgggccagtgatgaccgcaagttaccacatgtgctttcttctattgcggaggaagagcatcaccttgaaaagcaaagaagtggccttcaacatggctttgacagccagctccctggtactttagaaactgttaatggaaaaaagcaaggtaagctagccagtcatcattttctctgcgttcctccaaagagcatttctacttattttattttgacttgtttttagttatcatgtggattttatttttctctctcttataccttcccacatactggcttctgattgagagatataatccttaggaatattttcaatatataaagctttggaggatccacgtttgggagttccatatttcaaaacaatagttctgagcaagtgaaatggtgaaaaacgagtctgtggattctgtttgagaagccccttgtgcacatgtcatgcttttaaaaatatcttgcaaaatgttctttttttcttctaggttaggaatttctagatgttactatattattcagtgtgaaatcctgtgcaaaaagccgtacttatcgcagaatttttagttgataacactccaagaacacttctcacagtgtttcactgagacgtgatgtgagatgacagtggataggaaatctctgaaataagaatagcttgattttcttttagctctgaatggtaaggacacatttaataaaaactgcctataaagatttatgctgtgagaactgagcacatattgggccttcaataaatgtatattgaatatgataaaaatgtaattaactctctaaaagtagctgaggtgtgttccagcatgaatttctcatgcctctaatactctaaccttgaagtaaggacattccacctggttaagggacagaggtaaatgatatacacagaagggatttgggtatgtgtgcatggtgtgtagttgtaatgcacatataagtcacacagattggtgagtcatttatgtgatctaaagacaaagttattcaatgtccctcttgctggagagagcagacttttctggaatacctcatagtcccttcattcattttccatgattcctattagctttgtctttttagggaaaagttttatccagatatatgaagtcttggcatataaagaaacacaatttcatattcttctcataatgctctcttgatacttttattcaaattaaggtaacattgaaatgctagaataaattggtgaaaatgaggtaggctgatattctttctgaacctgataagctgtagctaattgcaattttgagtcttttaaattggctatagaaatattctagaaatatctgggccagcagtagaatttcttagatttgagttgaaatttcgattcctattttagaacattcttgaaaaggttgaactatatttgaaattgatatgaatttggcataccactaattttgctaatttttgtaattgtaaaatctaatggcagtaaaacaattgtgttcatctggcctttccagagatgcttattcactagattggagcctccaggaagtcagggaccatgccatagattcatctctgttttcttaacaatgagcacagtgttgggtaggagatcaaataataattaacgatggaacagcaacaaggaaagctaacaatgttaagaggtagatgctgttattactctcactttacagttgagaaaattgatggtgagagagtttgagaacctacccaatatccacatttattataggaagaagcagagctcaggcagtctcatactaacatttacacatacacatattcttttttttcctcttaaaggtataatttactataataaaattcatccttagtgtatagttctatgctttttgacaaatagacacagtcttgtagccaccacaaccaaagtataaaatggttttgttatgtcagaaaattctcctacattcctttttagtcagtcctttccctattccagccccagacctgtgtggatacatttttagcctctcttgttttatctttttcagaatgtcatataaatggatgtacacagtttgtcgtcttttgagtccagcttctttcacctaccataacgcgtttgagattcatccatggtgttgtgtgtttcagtagttttccctttttaattgctgaatcatattccattgaatgaatgcaccagtttgttgattgatcagttgaggaatatttctgttgtctctagttttatttatttatttccaatatcaatgtctattatttctttttcttgactgattacactggatagggcttctattatcatgttaaataagactggtgagagtgaatatccttgcctcaatcttaaacagtgttaaatctttcagtctttctctattatcctcagtagttaggtgcaggcttctgtagatgctctttattatggtgaagttcccttgtattctagcttcctgagagttttatcaaaaaaaggatgttaaattctgtcaaatgctgtttcacatctattgagatgatcatatgatttttgttgtttagtatgttgaaataaataacactgttttgaaagttgagccaattttgcatagcttggataaaatccacttggtcatgttatggtattcttttaatgtattactggatttgatttgttagtctttgctaaagatttttttccattttttttttagggatattggtctgtagttttcttgcaatatctttggttctgggtaatgttgacttcataaaatgagttgtgaagtgtttttcctttcctataaactagaaaaatttgtgtacaattattattttttaatgtttgctagaatttttcagtgaagccttctgagcccgggattttctttgtgggaaggttttgaaacataaactcaatttatttaataggtataagggtaacctagtttgtttttttcttaagtgattttttggcactgagtttttcaaattttttcatttcatctatgttgttgaagttatggacatagtagttaattactactttttaaatgttgttaggatttatagtaatttctccctttatttcctgatattggtactttttgtctttttttgttgttgatctgtctggctagaggattatttgtctatccacctacctatctgtgttttttccaaatatctcatttttggtttaattaatttatcactattgtttttctgttcttgagttcattaatttctgttattattattttctttgtttttcttgctttgggaataatttgttctttcttattttctattatggatgtataattttccctctcagcaatgctttagctgtatctaataagtatgaatgtattttgtttttattttcattcaattaaaaatattttctaatttcccttgttactcctctttacttaattggttatttaaaagtgtgttgattaagttccaaatattgggaatattctatatatttttctgttgttgatttctagttttattccattatggcttgagcacatactttccgttattttagtttttaaaaattaattaaggtttgttttattaccctgtcctgaattgttggatatttcatgtgcacttgaaaagattgtatattctgttactggagagagtattctataaattacaagtttcttgaggctattttttctgattttctaatacttattttgtctctcgatttttttttttttttttttttttttttttagcgtactgattttgttctgttgatcactaagggaggagcattgaagtctgtaactctgtggatttggctatttctcttttttatttctgtcagtttttgctttacgtagtttgaagctctgttaagtacgtacatgtattagaaatatgtatcttcttggtgaattgacctctttgtcattatgtaatgtaccatttttacctctagtaatatttcttgtcctaaattctactttgatattaatacagctgctccaactttcttttgattagtgttgacatgatatattcttttccattctttaaacctattttatgtggtaggtttctagtacatagcatataattgggtcttactttttaatccaatatgacaagcttccacttttaatttgttttaactgtttgtatttaatataattgttgatattgctgaattaaaatctgtcttcttgctagattgatttgtttgttccatctgttctttgtttcttttatcctaatttttctgctttctttgtactgagtatttttatgatttcattatatatccactctgggctcatgttaaaaaaaggcttaatggtcatcctaggatccctaatgcatggatctttaattaacttcagtctatcttgaaataatactgtactatttcatgtatagtttgatgatgttgcaacagtatactcaattcttcctgcttatcctttgttttattgatgtcatatattttagtcttatacatgcaataaacgtataatacgctgatactgctttgccctagactattggttatctcttagaatggttaaaataagacaaaaaaaggctgaggtgggaggaatgcttgagcccaggagtttaaggctgcagtgaactgtgattgtgccactgcactccagcctaggtgacagattgagaccccatctctaaaaataatttttaaaaacccctcctcaaaaccaaaaatttaaaaagataaaaagattatatttacctcatttatgccacatgaacatataccacttatgaattatctcaacttttctttgaaaaatgcgtgacatttatgtttaaaaatattttaattatttttatttattaccttcatttattcaatttgaagcattcttcattttaacatttcttatactgtatatatgctgctaaagaattatgtcagcttttgcttgaaaaattttctcaattatttgaaaaatattttagctaggtatagaatgttggttgacagtcattttctttcagcactttaagattgccatttcactatcttatggcttgctataatactttcatttatttttctgcatgtaatatgtgtttctttcacttggagctttgaagattttgtctttatctttggacttcagtagagtgtgtctaggagtgtttgtgcatggacatgcatgcatgtgtatgttttggtatttgtttttcttgtgttttctaagcttattaggtctgtgggtttaatgctttcattacttttgaaaaagttttggtgatcatgtcttcaaatatttattctaccccattctctcttgttcctccttctggtattcagttgtacaaatattagattggtattatcccacagctctcagatatttttctttgtttcatcacttttttttcttcttcgtagttcagcttgggtagtacctactaacatatcttcaagtttactaatattttctttgacagcatcaagtctacgaaagccttttttatttttgttaccgtgtttttcgtgtctagcattttgatttgattgcattttaaaatagtttcagtccctctgctcatcacttcatgtacattccccccttttcattatggcttttaacatattaatcacagttattttaaaattccttgtctgatagttccaatatctgagtcatatttgagtttggctgtcttggttgttttgtctctagacaggatgtttttctttgtttcttttttgtttgtcttgtaatttatgactgaaaatagaacattatatgtagggaaagtatgcgatattttttgcctggaagtgagcaaatcttttctaatgcaggatgtttagtgtgagggggttgagtcagtttagtcagcatttgagttgggtttttgttttgttgttatcgttcatctcagtgcaatacaggcttcaaaatgctctattactacattgtgtttagggtaggggcttgtttgttacacagttttgtcaatattggctccatctttaacatcgtctcctctttttgcctatgcatcagagagtgtctctcctttcaggcttttgccccttcccaggaaaagcctgttattatgcattacttattgtttgctagtgtgatgtggttgagttggaggttgtgtttcctgctgttgtagagtgctctcggtcttaggcaattgctgtgttcctatgtcttgaggttaggacgttctcagtaatcctgcctctctccccggagacaggggaatctgcagtggtctgaccccaggagtttttcctgccccttccccagggatagaagtgtttactctgttctgcttactcaccttaacgtgtctttacctgtggtctgaaagcaacaggatttgctgttgtattagtgcattctcatgatgctatcaagagctgcctgagactgggtaatttaaaaagaaaagaggtttaattgactcatagttccacagggctggagaggcctcaggaaacttaaagtcatggtggaaggggaagcaaatgtatccttcacatgacagcagcaagaagaatgagagctgagtaaagggggaagtcccttgtaaaaccatcagagctcatgagaacttacacattattatgagaatagcatgggggaaaccacccccatgattcagttacctccctttgggtccctcccaccacatgtggggattatgggaactgcaattcaagatgagatttgggtggggacacagccaaaacttatcagctacccttccccaagtggcctaaggcttttgtttcatagtggaaattcaagagcagaatcttggtggggcttcttattttgcctgtagtagccattgttccccttcctcatgactgtatcacgacagcagctttctctgcccctgctctccacccgtctttcttgtgagtgcctggtgagctctgtgaagaacttctaagtgggcttgaatttccatttggtttgtgactcccatgggttctgtacttctgtgctagtccactgggcctttacaaataactggaaaatattcatttaattcttaccagcttgtatgaatctagtatctgccccttgccagcaagtgcttgtgttctttctctccttgagataagttgcctctttttaacttttggactagttggttgctgagtttaagaaaatatgtgatttgaccacttatataaattttgttgttgtttaaagagtgggagcattatttccaactgtctacatcttaagtggaagctggaacatagagtttatatgcttaacactacactgtgaaattgaattggacattcttattaaactgggtagcatgtttgggctgagggataattgtgtaaagaacatattggtcttccattaaagagttctgtgatgtgtaagatatatgtaaccaatcctataaaaaaagtttgtgagaagttatagttatgtacgtgataacttttgtgatgattttgccagaggtgatcagataaagttcttgtcaggatgagtcagaatttaataagtgaatgaaaggagaaaggcattccacctggaggaaatgtcgtgaatgctgacatgtgaacaagcctgacattttcagggatggatcatgaggctagagctaaggctgtgattgggaaggtctttggtttttgtgttaagaatttagccttcatcctgtgtattagtccattttcacactgctataaagacataccggagactgggtaatttataaagaaaaaagctttaattgattcatagttctgcatggctggggaggcctgaagaaacttacaattatggcagaaggtgaaggagaagcaaggcacatcttacatggcaacaggagagacagagagacagagagagagagcgcacaagcgagagtgagcaaaagggaagcgtcacttttaaaccctcagatctcatgagtactccctcattatcatgagaacagcatgggggaaactgcctgcatgatccaatcacctcccaccttgtccctccctccacacatggggattacaattcaagatgaggtttgagtggggacacagagggaaaccgtataatcctgtaaacagttgggaatcttagaaagatcttaatcaagggtagcacccacagaactctgatatagaaggataactttagcatcagtttggaggctaaattggaggggagaatattggagaactattatagtagcttgtaagaaggaacctaagagaatatgaacatataaagagaaataattgtcattattttgtcattgttccaccaaaaagacgtgccatgaagagtctgtgacatggttctggcatgcaatgggataccacctcattactgtggaggcagaagacgaggttcccctcttggcatctttgacccttgaagaggtgctcttcattaatgctgagttaagatgggagttccatctcctcatgtggtttccactgaccctgcggtgtgggtggcctcattaccactgggttgtggtgaaagtcttgggtctctactagacctcccttgacatcacctaaatggggagggggaggtgtgcctcatgacttccaggcaggggtggtagatgaggcttcccagatggtctccagtgaacactgtgtgggtgggggatactcacctctggcatcagggatagaagttccagttcctagcttggccttgtctggcatgccttgtgagagtattgggttgcctcattacagattggtgaggatggaagtctaggttccctatgtggccttgtcatgggtgaagatgaggacacaatttttttctgtgctgtttggctggagtagagcaggtcctatctaaacattttctggcttactaggctgcccttttcctagtcctttgggaagaaagagcaagcctttattgagacttttgttttggtcggtgtacattgacatttttgtgttgccagcttcttcagcttcaggtctgggatatatgaggtaaaagagcccagggaactcacgactgtgttgttccttgagtcccaaggttcctatccattctgccttcttctctgtacttctcagtcttctgatctctgttttatagacaatgtctagggtttagggtggtacttagagggaagaagagggaaaagtatgctccctttagcttcctggaagttttcacattagtccttaaacagcattatgactttgaattccacccacttctttccatttcacaggcaaaataagagcagtagaaaatgataaagagtggtgtgggtgtgtaagtagatatgaggaggaacatttctctataaagagaggtgttatactatggccccttttaaccaatcaaatatgtattgaacacctaccacgtacaaaacattgtggggaacagacaagtatacacaagtataagccacaggcctctccttcagactgtgcagaagcctatatcacttgtttatttgttccagaggatgcaaaaatgtttttaatgccctggctctgtggtggcagtgggaattgggaatgcaccatgggcttagaatgaggcagcctcagcccaattcactcacagctttatagatggaggaggttgcctaagttgcctctagggaacttccatttctctctctcactgatgtgatagagcccactaatttacttcaaatgccttttagccattgaacaaaagctcttatttctctttcttcaaaatatttaaataccctgagggccctataaaactaggatatgtgattggactctcagctgtatgggtgttaaaacagctgttttttgttttgttttgtttttgtttttgattttactgatgggttaacagtctggaagactcctcatgcactcatttgttcctttatactatggggtgatgtaagccatagtacatgggctgctttgcagtctgttgaagagcagtattaggaaatacgctagggaaaagcagcattttaatcggtgatttatgtgcacgtcttaaaaagccttgtcaagctcgcttttcccatttaaccttgaattcttttcataatgttgtatcttgattttatgtttcttaatgtgccatatttttctccacaatagattttaagctaaattggcccaaaacaagagggatgctgaacgctttttgtaaccatggaaacatttctgggcacttactaaggacctggttgccaatagtaatgtaacagagaaaatagatacacttcatttagcagttgccgatgattaagaggcagagagactacttatagtgtcatcccaagataggctttttggtttaaagactcaaatccaaaacaccaccttctcagtagagaagcagctatgacacctttgatatgtgatgggaaggagttctaattgcatttaaaaatcattgttttcagttttttacctcatgctttttttgaagctgttttttaaccacatatatttgtttccaagaaatatgctcactatttcctgaaatagcctgctaatggaattaatgtgttccaagcacattggcatatagaactttagaaacaatctcggaacgtacttaaaatatagaacaacaggctttgaaatcatggtgatatttgacttttcaaccagattactctgctatgctaatgtaacatggaagggaaaatcctacagtgttcttagttgttgattgatttcaaccctttgcagattgaaggtattttcttctgtcagtattattgggattgcttgtggcaattgagactaaatggtatcagataatatagctgatccacaaatcacagaggccttatcttttctacaggatatactactgcatgtcaaatgttgcattccacctttccttcctttgcaatactggaactttgcttttccattgcataagtgctttcttgaaagtaagcctacacctagttaaatttatcttcatttgttagtccttcatttgatagtatttgccatcatgttccttggttatgcagaagtgtccagggaaaaaggtttaatattctgtggctgattcagaatctgttttctaaaagctttatacagttaattttcttgatattttgatttgcatgttttagcaagggtagatattaatgaacatgttagcagctgacatacagttttcaaagccttaacgtttaagttgagaagatgattattcccattgttacgtattttgcagttttgtgtcatttttggaggaaatttcaggcatataacaaaatcctatgtggacagaagttagaatatgtaagatacaaatgatcagacaattcaatccttactttgacttctggatgttgttatgatagaatactggaacattttgaaggacagattcaaaataagaaaattaagtcctttttttttctattcttaacataattaggaatggattagaggaattagaggcaagttatcctccagataagcttaaatcccattttaacaattctcaaggaataaaaaaaattttctttattagtggaatcacttgataatttttttttaaaaaagctcagaagttttccttgccctataaaaagtaagaggagggatatctttttttcaattacccagccaaaaggggaagaagccagagctagacaggaactacaaaatcaataaggtcttttttcatgtatcttatttcttcttcctgaggaatattcttacctgtgtgtttgtgtgttgtttatttatttatttataaaaatatggagatattatcctcttcttccctcttccattcttttttcttcggtaaatctcctttctttcttcgctggtaccctcttcccatatctgcccctgaggagagcgagtcttgtttctgaaaaggagccttacagtgggaggagtttctaaaatgtgattataagttcctcttccctttgaactcatgttaattatgctaagggctggtctaggtcattgctaatggagttcttagtgctctttacatttcctagtttgtaagtttatgaaacatttttaaaacagaaaaatatagagtaatataacaaagagtcacagattgccactttgccagatcttaacattttgtcatatttaattcagatttattttaaagaagccatccaggacagagggaattgaaatcccctaagaagccctttttgttttctttcttttctctactcactggggtaaaacaaatctaaatttggaaattatgattcccattgtgtttctgttttcttttttttttttttttgctgcaagcatatgtaactgtaaactacatataacataattttgcatgttttaaaactttatacaagtgatataatgctaaacatagtattttgcaacttttttccttccttctcaatgttatgtttttgagttatgcagatacatgtagatttgttttatttttactgctacatggtagtcaactgtattaattaatataccattttccatccttcaattgatgaacatttagtttgtttctaaactttcactattaaaaataattctgcaatattaatatctctttgagcacatatactggagtttatttagatggtatgtatgaagagacagtcctattctacacctccttcttaaagtaggtagtttctttcctggtcgaggtcccttgaataaatttccttcccttcccttgctttatctttagatggttcatattggcttcttctctctgtcaccaaaagagtcatagtcaatagtgaacttaaggcattaaaagaatctaagtattagaagttgtctgtttgtttagtagcaagtttaaataatgaacaaatgagaacatgggcagtgattccaaatcttaggaggtttacaggctcctttgaaactttaatgaaagttacaaactcacttgtccagaaagatacatcatgacatatcaaaaaaatttataatgacacttcatgggttcatggacctcctgaattttatctgtcttactctagattaaagtcaaccaagtttacaagaggaaactagtaataatacagtcaggagttaatcattgtacattcatttttggcttttctaagaatataaaattggagaaatgtgttggaatctgtgctggttctcaaactactatctctcagctcaaatccattcttctagattctgctttggatgttgggtttagaattctgcaaactacggttctcctatgttggcgggatcctcctaggttctcctatgcccaaaagagcagtaaaaagacattgaaagatgggaggaggtgagaagggacttactgattcctgttttactcactgttcctattaggggtactccagcacagcccctcactctgctatcagcagtttgggttctcgtctgtaacttctttcagtgttccagaaccagcctcattgcaacccactcagaggaatagcacctgtcagacagtttctcttcctcagatgcctgagcccaattctgtggtgcttccgatttctgatatttctgataatttgactgcttccctttggttcctcagtcctaggggtgctagctgcttcatgcagttgtaatctctggcctatttccctattcttcttcctattcatttgacatccagtacctgtgaaaccaataccctgtattaaataaattgcctctgttgaaataatttctgcttccctgaaatttgaccaatagtgtagtgaaagtattgtcaaagcatttgtatagattataaaatagtctatgttaagtgcacaaaacttagattctgcaggtaaactgccactttctggaaattataggtaactgatgaagcagacatctatgtcttacccatatgtgatattcaccagccaaacaaataaatataacatgtcaggtgatgaaaagtgccatgtagaaaaataaagcaggataaggggatacaaattaattagatgaatgctaccttaatagggtggtcctatattttataggatgatctctctgagaaggcagcatgtaaacagagacctgaatgaagtgaagatgagagctgtgcaaatatttgagggaagaacattctgggtatagggaaaaataactggtcatgccctggggtggggtgaggagtgttttggtattcgattgattcactttgcccgtgcttattagcatctggtcatcggtaataccatccagtggttactctggaatttctgctatcctagaaatttcctaatatttaatacatttttactgaaggatgtcaggtataggatcatcacaggagacattgctgttcatggaaggactttgagaacttttatattatttcaaaaattgtttgtctttttttttgcggggaggtgggggtgaggataaacaaagttgaaacatcaagcagtatcttcttaagctgtaatatcagagcctatttcaaaaccaaaataagaactttaggtttttctgggactacttggtttttattctgtttcgatctcacaaaaagtagccactgcaaaccctatgtgcagaaagttagaaaactgttcttcaacatttagatgcatgatgaccagcagttacttcttttggtgtctgctaaatcagtttgtacatgaaccacaatttcttacccttaatatttccctttgcgaagttggatttattcttagccataaagtgacatagaggcaatattgcttatgtcccagaaaccatgctatttacacaattgaactaaactcaaattaggaatttctcggtttcttataagcaaagataaaggtgtgagctcaagtaatggatgaatctgggagtaaatctggtttcatggggagttctatccagaagtgcaaatgttatctttgggacccagtttctccccttcaactccagtttctaatctctacttccatctgagctggctccattctcaagctccatgtgtggtcagatggttaccagaacctccaggtttatatcctcctaggttacaatccagtggagaaaaataaaaaaaaacaccaccactttctggcaataagaagaaaatcctgggattagcactaattggcttgattcacgtggcttgacttaaattatgtgacaaactttagcaatctctgaagccagggaaatgtgatgttctgattggccaggcctaagtcacctgctacttctggtgtttggggtagagagcttttccagaaactacctgagagtggaggaaaggtgatttactgaagaaaatgaagattccagaagtggaaagaatagatgatgggtgtcaaaaaaccccacagctctattagaggagtcaatgccattcatagacctctccactgctttgacattgaatgctgtttacaagcctgtttcaaggaaaagcctagatttgttgtgtcaccacatatgccgtatatcaccacaggaccccaaacacctatttctcagtgcttatggacacatgtctaccacaagtcagggaacactatatatacacacacacacacacacacacacacacacatatatatacacacacacacacatatatatatatatatttgatgctgtgcatcatctgtcactgctgatttagatcatggcttttctcctgcatgttaaaaaaaaaacaacctctcatgcacctttttagaatagtgtaaccatataggatctgtattagttatctattcatgcataacatattactacacatttagtggcttaaaacaacacacatttattatttcacagtttctatggattaggagtccaggcatgtgttagctgaatcctttgcttagggtctcacatggctataatcaaagtatcagctgggctgcatcctcatctggaagtttgactggggaaaagtctacttctaagctctctcaggttgttggcagaattgatttctttgtagttataggactgagggccccagcttcttgctggctgttggttggaggccaccctcaactgctggaggctgtctgtggtcccagaggctaccttgccacgtaggcttccccaacatgtctgcttacttcatcaagctagagtctgatagcaaaaggaatctcatgtaatgtaattgtggtgtgacatcttatcacctgtgctatattctactggttggaagcacaagtgccatcagtgctgaagggggaggggcaccaaaggcatggacactagaaaatggggctcaggggggactactttagcatcttcttaccacaggattctatattgtccatttaagtaaatagagaaattgcacaaaaggtgggagctacttacatgccttcatgtgagttatttactcttatagatttttttttaggtgaggaaattatatttttgtcttaaaaggcaacttttactttaccttggctattctgcaaatggtgcatccaggaattgttcttaagatgattttggttacaagctaaatctatatatttgaattgattttgaaattataaagagagtaaaaggaatacagactgcagggaaactcacattagcatgagctttcacacggaaagtgcctaagacaagagacttgccaagaatccttattggttttgtagatcacttcaggtgaagaacttcttaattgtgaatgttagcaataataagtagagagtgacatccttaactatatagtagttatctatatagtagttaactacgttgtaaccttaacttatggtagactttttacatatattatttaatcatcattgaaatgttatgaggtatatccagagtggtggtagattattattcctatttttaaataaaaggtgatcattttagggaggttaagtagcttgttcagtgtcactatatggtaaagaagctgggttttcaagccacatgtatctgactcaaaacatcaaggcattctcctcatggtgatggttgtcccaaagggggttgaagtgcccccacttccagcccatgcctttgctacaagaaattcagctcaacagcgtttactggcaatgaaaaaattcctgggcattatggtttctgagagtggacttacacattcctaggtcgagtttaaggagtttatgggaaaataggctgtatttgcagtctccatttcctcctgcctgcttcttcattcactgtgatttggcttctcttctgtcactcccatgggcatgtttttttgtttgtttgtttggattgccgtgacctcctgaatggtttagtagcaaaatcagtcttcctccccacctccttcaactttacctgacttattttgacagttaaaattgttgactattcggccaagtgcggtggctcatgcccgtaatcccagaacgttgggagaccgaggcaggcagatcatgaggtcaggtgttcaagaccagcctggccaatatggtgaaaccatgtctctacaaaaagcaaaaaaattaggtgggcatagtggtgggcacctgtagtcccagctacttgagaggctgaggcaaaagaattgcttgaacctgggaggcggaggttgccgtgagccgagattgtgccactgcactccagcctgcgcaacagagcgagattccatctcaaaaaaaaaaaaaaattgttgactattccccccatgaaatgcattccttacctgggttctggactccacttgttcctggttttctccctgccactcctagtcattccttttcattcaccttcctttgcccgttccttaaatatttggttccctcttatgcatccttccatgacttccatgacaaatcttcatctctagtctggacctctttcgaaccgtgggttcacagatccaactgccttcacgtggatgacagatatcacatacatgtttaaaaacataactaatcatcttcctttcttagttatggacatcctgttatcaaagtaagatataagtccttctcaatctcttatccttcacagctcccccaccttgcctatattttgttcagtatataccaaatcctattgattccgtctctgctgcttatcttgtatctgtccaactcctccttatccctactaccttaattcagatatgcatcctcttctgcttggtctattccaataatgtccagagtgtaatggtgcagtctcagctcactgcaacctccacctcctgggttcaagcaattcttctgcctcagcctcctaagtagctgggattacaggtgcccaccaccatgcccaactaatttttgtattttcagtagagacggggtttcaccatgttggccaggctggactcaaactcctgacctcaggtgatccacccgccttggcttcccgaagggctgggattacaggcacgagccattgcgcccggctggtttctctatttttatgttatttccatcttttattcattcttgagtttccccctccgaatgttcattttaaagtctgcatcagatttcatattttctcatacaaaaagccttccagtacaacttcctttgaaagatacatagccttcaatgatttatgtctactgtcttctagcatcctgaaatactaagtacactttatacctaaaacctttggtttcatctcccccaaccttgtgccttcctcgtgaaaactgttcatctttcaagagtcatctcaagcagcattttctctaggaagccttccttgtcttctttctccagcttctgttgcattctgcacattccctctccctgcctttttctggcagttagctgcttcctcttctatgttccgatagcatgttacatttctcaataatatagattttatattgtatctaaatttttttatggatgtacccactcaaatctgtagactctttgaggggtttatgctttcccaataatttttacattgccagcatttagcatggcatcagtttcattaacaaaaaaaaaaatgaatggctaaatgaaggaacataaacctaatcttagctgtcaccactgtatttcatcatctccagaaagatgaccagtgtaaatatcctataaatacttttagattacagattattagaagaatgcagccgaagttcttaacatttttgacagtctgtgtttgccttatgaagacatttgccttgaccttctcctcccaacattaatgaggacttaaaaaacaagtgctatgatctgaaggtttttgtgtctcctccacagattcacatgttaaaacatagtccccagtatgatggtattaggaggtgggacctttgggagatgatcagatcatgaaggcagagccctcatgaatgggatgagtgcccttataaaagaggccccagaagccgccttgcctcctctaccatgtgaggacacagtgagaagactctgtctcagaagttggccttcatgggacactgaatctgctgacaccttgatcttgaatttctcagcctccaaaactgtgagaaataaatttctgttgtccatgagccactcagtttatggtatgttgttatagcagcctgaacgaactaaaataagtgaaaataaatcgtgactattattgtgtcagccttcactcttagtccttaattgtttctttgagatataaggcaagacatatgagtccttcccccaggatagtcctgggagctctggttgcacaggtgtggctaacatggtatcaccgttaccgtgaacagctgtgaatgggtctgtttcagaaaacttgtcaatagtgaaaccatttacagtgtctcttgatgtgttctggcaacacctcctgagcatgctccaggaacaaaagatcaagggagcagtaactcttctctggcactccagctatggaaatgaagtcatgatgtttcagtttccatggcacagctccaagtcattttcacaagaggtgtcctcctgttaaaagattttgtagcaaagatgagagagatgttatacataccagagaggcactatcattcaatattagtgctgaagaacatttaataagatcatcatcatttgagtctttgaaataattcaagtacattttgctttaaagttatggcattggccgggtgtggtggctcacgtctgtaatcccagcactttgggaggccaaggcgggcagatcacaaggtcaggagtttgagaccatcttggctaacacggtgtgaaaccctgtctcttctaaaaatacaaaaaaaaaaaaaaaaaaaaaaaattagccgggcgtggtggcgggtgcctgtagtcccaactgctcgggaggctgaggcaggagaatggcatgaacccgggaggcagagcttgaagtgagctgagatcacaccactgcactccagcctgggtgacagaactagactctgtctcaaaaaagaaaaaaaataaagttatggcattgcttataatgggattcttgtcaaattatttgatgcctaagtatgtttttataactgctatgattttatctatgttaactttatctctatttctgatgtacatatttgagctctcctgctaaactgtggactctttagaacagggaccccatattattactcatccctgtatcccatcaccagtgtgtttagtactgtgattttcctgtgctagattcataataaatatttcacaacttaagttagtgggaaggttagttaaattttgctgaaattctgccataactttgtcaggcaaagtagaagacttgaggagaacatgcccaaagaatcttagtggcatgctcttttgggttgctctgttttattgaattgcggggatttaaaaaaagaaaatttgtgaaaactgatattcatcaaatactggttttattaataattctttagagatccaaagtttcattgttggtgtaggaaataaatgcttcctcctacttacctggtcactttctcttagtttcctttgcttgatctccaatgcctccctgacttctaaatgttaccgtgatctggggctcagccttaggattggtctctcttcctgatatcatcacatcctaatctcattcacatgctgacaaatctataaactatgcttgaattatccaagcatatgcttataactctgcttggatgtctaacagatacctcaaaattagtgtgtccaaatctgaatttctgacctcctctcaaaatcctgtgctttccacaattatgcttatctctaaatagcaacttcattcttctagtttctcagtttaaaaatcttggagttattcatacctctcccttttattcatgcatgtaatccatcagcaactctggttggctctaccattacaatatatctaaactcaggctgcgtcttcccaccatcactgctatcgtggtgctttaagcaaccattattctcagtgtgtggtttttttttttttttgaaatgaggtcttatgctgtcacccatgctggagtgcagtggtgcggtcatagctcacggcagccttgagctcctgtgttcaggtgaacttcagcctcctgagtagctaggactacaggtgcacaccatgacacctggctaatttttttcatttgtttgtagagacagtgtctcactatgttgcccaggctagtcttgaattcctagcctgaagcaatcctctggcttcaccttctcacagtgctgggattataggcatgagccacctcgccctgtgttattgaacttacctcctgatttctctgtatccatctctccctctcatgtggtctgttttcgacatagtgcattccttttaaacttacgtcaaagcatgtcattcctttgctgtcaataatttccaaagcatttagagtaaaagccagagcccctgtagtggcaataaggtcctgtgtcatctagctctgttgcctctctgaccttattctgttcctttctctttgctcactctgattcaggaactctggtccccttgggtctttctcttcttcttcttcttcttttttttttttttttttttttttttttgagactgtctcgctcttgttacccaggctggagtgcaatggcacgatctcagctcactgcaacctccgcctcccaggatcaagcgattctcctacctcagcctcccaagtaactgggattataggcacctgccaccacgcctggctaattttttgtatttttagtagatggggtttcaccatgttggccaggctggtctcgaactcctgacctcaggtgatccgcccaccctggcctcccaaagtgctgggattacaggcatgagccatcgtgcctggtctaccttgggtcttcttctaaaatgctagttatgcttttgcactagctgtttcccctatctggaacacccaaactccacatctccccagggctggattactcacttccgttgggtctttgctccaatgtggccccctcagaggtctccctgactacatgaatgtaaacggtacctccctccactctccacctgtccccatcccctttccatgccttatgtttcactctacggtgcttcttactattggacctgttttacttgtttgtttgtttccatgagggcaggcgtttccatccacctctttcactggtgttgcccctgcatctgcgcttgcctcatggtggtaacaaatctttgttgaataaatgaaagaatactttaaaaaatttggtgtactctgtttccaaacagttcattgtgacagcattcacaaactaagtgactgaatttactgtgagacatttttagttttgtaatcagtggaattataagctattgacatgtaaggaaaagtgaagtttttcttcacttcacaatgccttagaaagaagtaggccaaagcttgaacagaaggaataacactgtagtaatacaaaagattttatttttaagcttgaattttagcagatcatctagcagaattagaatgcgcctttctcttaaaagaattggggaatgtggaactaaacacagaaatgaagatatttgatatgtttttttcatgaaatgagtcagtcccattttttaacttatcacagtgagcgtgtgtgtgaagaccctggtttttggagccatctgggttcaaatgctgacgctgctactttcttgctgtgtacctgtgggaacaggtagaggctctcttttctcatctgaaatgcgaggataatggtatctagttagatgtgagaagctgtacaaacccaggcacagaattaggatgaaacaagcacattttctgttttcacatattgctgtacttttttttgttttatctttatggtcttttgaaatgtgaagtttggcctagaatcaaaggagatgcttccaggtgtttgcttcttcatggggtacgtttgcaaacacagtgagtcctcttttgctagccagctatattatcagacaataggcagagtgtaatctaagtcatgggaagtccctgttccaccctatgaggtgtgattgcagtgcagcgggcactgaccgcttttcctggggctcctgtgaagatgagctgcccactacatcatttaaaagcgcctatctgacacctgattctaaatggtggcctgaccacaatcccatcaaacactagtaatgctgccagaaggcctggagataggcggtagtcagaattagtcaagggaattgttcttttttaaatttttaaataaagaaatcctttcaggtttttttctaacttactagttagagataggtttaaattcatgaaggaatttgattttatctgggtcacttcataaatcacatgtagtggttcctgaagaaatttgcctgacagtcttgatggagttctcatgctgaattctgatcccttattttgtgacaccttatttcagtgggatggaaagaaattcagtgagtgattccaaaatgtttaaaagcctcaattatttcattttcttaaagaattttttcacctcaatagtaaaagtacattaacatgccacctcactcaagtttactactgtgtgtgtatatatcttgtataatataatatataataatatccatctttgtcacttaattttaggaaagcacatgtgatcctaccgcatacacctctccctctccctctttctgtcctcttctctctccgtctttagaatagttcctaaagttacccatacatttgcccaggaattgttgaattgaatttggagggttcagttgcaaagttttccacattttccaagggaggagggggacaaaaggtaacggagattccctttcaactcttaaaaagttgtccatgttttcatttccctctctccaattcgttttcaccagccagcagtgggctctttccacctggttctgactttggttaaactcagggaatctcggcgaagcttagctaaaattcctggtgggcgtcaggagcctcctaggatcaagctggagatttctaagcgagcataaccactgtgatggttggggcaccgcatgtccccagtgctggcacacaccacctatgctgcttggcagtgaccatgggcatgatccatgcagccacatggcttctcaggatgcaggtggcttgagaaagagcaaagctgtgaaggttcacactcataagtggtgacattttattctttcttggagtgtgagctgtttctgatttttaaaaaacctgtgtacctgctctctatgtcggtgccctgctcatggttttattctgtgttggaaattttcttcttaattcctctcctaagaactcatcttgtattataataattattaaggctttttgtgatgttctgtaaatatttttccaaatatgcttttatagagtgtgagttgatcattttgaggggatgattattccattgcttttacggtcacaatcactccagaaggcaagagtaaaatccaaaataagttttattgcattttctaaggcattgcttggaatttgcctagtgggcagaatggagtggtggtctttgttgttctggtgtaagtgtggtcttaggtgggtgttacctccttggctgtcatgggtgtggccttcttattaatccttcctctttctcagatgtaggagacatctcatgacctgggcccaggctctattcctgccactctacagtgttagaggttgaggttattttattttattattattatttttttttcggttgttgtttttttcctgttccctttccccagttgcagaggtcttcaactgtgcccaaaagccaacaggattttctgtccttcccccaatggcttaagtctattttttcctaggaaagatggacaagaatctgtgtagatttagtgctgttttccacagtgcctgctgtttccctctaccaagaatggactaaaagggaggctttctctagtctctccctcagcccccagtctttctcattagcatccagtgaaggtggttgagaagagtctgtgagtgggtgtaaatttctattttgtctgcagctcctagaagttttgtgctctcttgctaactcatacttggtctttagcagtctgttaaaacttttagctgaaattcttcctaatggcttgtcaggggtccactgtctgtctcaggtaagcaaattctagtatcttgtctccctttggaggctcctgtcttttcttaaattttgggttattttggttgccctaaaagccaagtgctttctaatgggttcaataaaagttataattttgcaaatctcttctttttcttttttttttttaaggagtgggagacaatcttttccaatgggaagagtattataattcttgttagtcagtattttatatctacctacacatgtactcaatcttcccttctacatttccataattccatatgagactgttttctgttagcttcaaaaattccatttagtacttctcatagtgccagtttgctggttatgaatttcttagcatatatgtgtttgaaatgtattttcctttatttttgaagtaaaattctgaattggtagttctttttttgtttcagcactttaaatatatcattgcattgtcttccagctttgaaattttttgttgaatatttagacctcattcttattgttcttttgaagctaatattctgttctgcactggctgtttctgcgagttctctttgttttcttaagcagttttaccatgatgtatttaggtgtgatctgctttttatttatcttgatttcgtgtttgatgtttcattcattttggagaatttttggcccctatttcttcagatattgcttctgccacatttccttttctccttctataatttgtattacacacacacacacacacacagacatatgtatatatgtcatacactatttgtgctttttttactatccggttttaaaaaatgtacttcagtgtaggcattttcagtttgcttattttctgctttgctttgtctaatctgccattgggttcatcaattggattatttcacttagcaataattgtgtactcattggctatgatactgccactgtgcaaagctatcaattggattcttaattttagttatagaatacttttaagttctagattttccatttgagtccccttataaacagattctacatctctatttaaatattcatgcttaaaaaattttaaaaacatattaatcttaataattttaaagtccttgtctgataacttcattgttagaattgcttgtggttctatttctgttgactgattttctcttcggttttatgtcatttggtactgttttttcagtaagcccagtaatttgtgacttactgccaaacattgtgcatcaaaaattgttgaggctgtccatgattttttcttctttttccctgctggctgggagctggaataccagtggattaccttgacactttcaagggcttattttaggctttgtttgggtaggtttattgcagtcttacctttgttcttagagatggctcttattgctaacctgcagtgcctcacatctcaatgaaagtccaagtatttatcaagtgtactttaccttagtagaatttgaccaccaaactctgacttcccccaaacatacaggtgataaaatctctgcttagctttttagtttcccagctgccagcttaggaattggccaacaacttgggggaaatttttactcatatttttgggttcactcttctgtgcttacctactcccaggaattttgtcccagctgctttggctgattttaccattttctcttcatctctagttccccatggtggaattttgaacagtgctcccaaggaaatagttgaagtgaatgtgtagattaccttcagtgcttttcttctctcaaggatcatagattcttaagtcctacctgtgccagttgttcttgaatagcttcaaaattttgttcaaacaattgtgtatattttttcattcagcttttagaggtggcttttgtgggatggttattctgataaaaggtactccatccttagttttttaatcgtgtagtcttgctaccttgcaaacatgtcctgtttatcttatctttaaccaaacattggtagtgtattctttttcaaacatgtgctagtcttggctgtttgattctaaagtttatatgggaaaatgttttatcaatttcccataaaaaccttattgtgtttatctaatataaaaagtagaggaagaaatggtgtctttaaaatatgcctttccacttaggaatgtggaatattttctgaattttttcctgttacccttttacaaatattagtaaaacagctcagatatgaacaatatctttatggtcataataatataaatagcaactgttgacttaatgaaaaattttgtatataatatttggacaaaggtggaagagaatggaagtcgtgcaaaatagctagagtttcatctaccgcaggaattctataatattcaaacttgataagtgaaaagtagtagtgtaaatatacttagaaaaatgaaggtaaataccagaagaatcagctctaagagtttaaaatattggctgcagaggagcaaaattgcgaggtgggacaaaggattgctatttttattactgattactactcttttatttaagaaaagtgatgtatgtgtattatccttaaaataaaaattatggaaaacagatagctttttagttaatagactttctagagcagttttaagttcccaataaaattgatcggaaagtgcatagttcccatacaccctgtgttctccattttccccccactatcattcttctccaccagagtggtagatttattacaatcagtaaacctgcaatgaaacatcattatcacccaaagtctagagtttatattagcctgcactcttggtgttgtatgttctatgatttttgacaagtatataataatatgcatctaccatttatagcatcatacataatattttcactgctttaaaaaatcttctgtgctctgcttattcataactccctcctcactaacccctgacaaccactgatctttttactgtttctataattttgtctttaccagaatgttatatagttggacttatatagtatataggtgtttcacgtgggcttttttcacctatagtatacatttaagatttctccatatcttttcatggcttgatagctaatttcttttcagggctgtataatattccattatctagatgtaacagtttatgtatccattcacctactgaaggacatcttggttgcttctaaattttggcaattataaataaagctgctataaatatccgtgtacaggtttttgtgtagacgtgttttcaattcttttggacaaatacacaattgttgtatcatatagtgaaatcttagttttgtaagaggctgccacactgtcttccaaagtggttataccattttgcattccctccaacaatgaatgaaagttcctgttgcttcacatccttgccagcatttaccatttctaataagtatgtagtagtgtcttattggtgttttaatttgtagcccctgaatgatgtatgagggtgagtgtattttcctatgcttatttgccattggtatatattttctggtgggttatctattcaaacattctgcccatttttaattgggtttttcatttccttactgttgagttttaagagttgtctgtatactttagaaaacaatcgtttatcagatatatctttcacagatatttcctctcagtctgtggcatgtcttatggttctcttgacagtgtgttttgcagagcagatgtttttaatttaatgcagtccaatttattatttatttcatggattgtgcctttggtgaaatgtttatttttttcataattttttgtatatttttatgttatccagccccaaaatgtcaaaaatatttctaagtgtttcattttggggggtgctaatgtaagtggtattctattttaaatttcaaatttattgctggtctattttagttttattgttggtatataggaaggcagttgacttttgaatactaaccttgtactctgcacccttgccatagtcacttgcaaattgttaaaaaaaaaacaataaaatatttctctaattacatttttctattggatcaaatgatacatattaattgctaatattaaactattcttgaattcttgaggtaaaccttatttggttatgtgtggtgattctccaagtttgctacactttgctgtcttcattaaaaaattaggtagcttttcttttatatgccttatagtaaattattacatgtaatgtagtatctgagccctcaaagtttggagtagctctttgtccctgtctttttgtttgcttagcaacctgcccttttccttaagtatagcatggatcacaatgagtggggggaatgtctcccatgatccatacaattgtcatatcaaagtatatttcaaactgttgcaattacccattttcttaatctgtttatgttgctataactaaatacttgagactgagtaatttataaagaaaagacatttatttctcacagttctggaggttgggatatccaagatcaaggcactggtatctggtgtctggtgtctggtgaaggccttcttgctgcatcctcacatggcagaaggtggaagggcaagagagcaaattcactgagtgagctcactatgtgaagcctcttttgtaagtgtcttagtcctattcaggaaggaggagccctcatggcctaatcacctcttaaagtccccacctcttaatactaccactttggcaacacctggattttgaaggagacacagtcaaaccatagcccccattttcttttctctttcatttgctagtttctaagctttgtagaggcagcagcatgtctgtcttggttactactgtaacatcagagccagtataccgcatagcatgtagaaggtactcagagaatatatgagaataaatgaataacagcttctccttctagtaatgtattggcttttcctttaagaccaagtataggtactttgacactttaaaattaggtgtcctttttgcttttaagagatgaagttttatgtacctgaagctattagttatatttttattttcaactacttttttgcctgcttgatctttcagagacttaaaatgtttttttaatgcatgtcttaaatgttttttatacatttcaatgctgtgtgtctccgcaaaattgtttatgatgctgatgtcttcattgcgaattttgtcttttatcctttgtaaaactaacttctctgtcatttaatgctctttgccttaaatttatctttttctgaaattagcctttatttcattaaaaataggtgggaaaatgagagaaagttccctgagagcttcttacttttcctgtttcctccccttagcatctgtgactgcagtatatggcttcccatcctaattcagccttgaccatgttatgtctctgatagccatgctttccaaaatgaatgtagatccaatgatatcgatgtaggaccaagaaagagaatggctgtagccatctcagaagtagagcccaagaagagagatggagaggaacctcagtttctggttggtagctctagacctaggtctgtataagggcacatggaagggatgggtataagcaaagcttttacatccagacagtattctgacaggttgttacctatgtttcattgactgtttaaaaatgtttactatcatccttctctcactagatattccattttttatactgaagcatgagttggttgttcattgtatttcagtccagccttacatgcaccacagtaatactctcagaggtgacatatcactgatcactatcctttggttcctgcagcaccaagaccttgcatgttttatgttatgttgggagtttcactgtctttgacctgcccattgaatcagacatggatccctgattggaaatacatctcaagtctgtagtcagccatgtttaatttgagtcttgtgttctccttttttgccttccccaagctgcttgaaaagagcctttttatttcagagggaactttatattttgtgcaggcggtgtatttctgaaatgttgctcatttttattgcagacttcttcactgctgggggttgtgccaaatgtgggatttgattccttgggaaagagaaacctctgagttttatatgccagaaagtgttattacccttatccttcttatcactgaaggctgtgatgttccatctgaggttctctatattgagaagacagctctgtgtccttcctggcctggctgggttttggaaggcagaatttgctcagttgtgttatgccattatatgatgtgctgactagtcatttatgtttggcttctaccttcaattgattgtcttgcaatggtttgattagagccccaaacacagtgggttgtgcatttactaagttgtattggacagtgttgtggttgggatgacaatgattataatcactatcgcttcctgaaagcctgcttactgtacgagttctaaatgctttatgtacactaaatcattcaatcctcccaacaattctgtaaatactattaactccattttacaaaagaggaagctgaggcacagagcatttaaacttaccagggtcacacagctcatatttgacagaccaagatttgaatataggcagcctgtctcttaaccacaatgttatggtctctctatacagaattaactgtgaaattcctctgttcatttaaacttttag

SEQ ID NO: 760 - DNA, 32744 bp, Homo sapiens
  source 1..32744: mol_type = other DNA
ttcagattgcaaaccttcttgccttcaagcctcggctccaacaccagtccggcagaggaacccagtctaatgaggtacgctcccttcctgccattctctattccattaacctgtttcgtggtaaacgtaggactgatcctccaaaattaccttattaattagcttacatatttattatctatctgtcccaccagaatgcaggtttccggaaggcagggatttaaaaaaatctgttttgttctatgtgattttcccataccaagcaccgtgcccggcacaagctgggatcccagtacacatctcgggacggaagaaccgtgtttccctagaacccagtcagagggcagcttagcaatgtgtcacaggtggggcgcccgcgttccgggcggacgcactggctccccggccggcgtgggtgtggggcgagtgggtgtgtgcggggtgtgcgcggtagagcgcgccagcgagcccggagcgcggagctgggaggagcagcgagcgccgcgcagaacccgcagcgccggcctggcagggcagctcggaggtgggtgggccgcgccgccagcccgcttgcagggtccccattggccgcctgccggccgccctccgcccaaaaggcggcaaggagccgagaggctgcttcggagtgtgaggaggacagccggaccgagccaacgccggggactttgttccctccgcggaggggactcggcaactcgcagcggcagggtctggggccggcgcctgggagggatctgcgccccccactcactccctagctgtgttcccgccgccgccccggctagtctccggcgctggcgcctatggtcggcctccgacagcgctccggagggaccgggggagctcccaggcgcccgggtgagtagccaggcgcggctccccggtccccccgacccccggcgccagcttttgctttcccagccagggcgcggtggggtttgtccgggcagtgcctcgagcaactgggaaggccaaggcggagggaaacttggcttcggggagaagtgcgatcgcagccgggaggcttccccagccccgcgggccgggtgagaacaggtggcgccggcccgaccaggcgctttgtgtcggggcgcgaggatctggagcgaactgctgcgcctcggtgggccgctcccttccctcccttgctcccccgggcggccgcacgccgggtcggccgggtaacggagagggagtcgccaggaatgtggctctggggactgcctcgctcggggaaggggagagggtggccacggtgttaggagaggcgcgggagccgagaggtggcgcgggggtgccaccgttgccgcaggctggagagagattgctcccagtgaggcgcgtaccgtctgggcgagggcttcattcttccgcggcgtccctggaggtgggaaagctgggtgggcatgtgtgcagagaaaggggaggcggggaggccagtcacttccggagccggttctgatcccaacagaccgcccagcgtttggggacgccgacctcggggtgccgtggtgcccggccccacgcgcgcgcggggctgaggggtcgggggcgtccctggccgcccagctttaacaaagggtgctcctctccaccccgcgaggaggggcagctccggagacccggtcttcagcgagcggggtcttagcgccggggaggtctacttccttttggggttgccattttactattattattgccttttttttttcttcaaaaggactggagactgatgcatgagggggctacggaggcgcaggagcggtggtgatggtctgggaagcggagctgaagtgccctgggctttggtgaggcgtgacagtttatcatgaccgtgttcaggcaggaaaacgtggatgattactacgacaccggcgaggaacttggcaggtaaagggggtaccagaagcgtaccctcctggattgtggaaatgcataacgatggggccattgggtggtaaacaaatgcagtttgaatcaggcgtctccctcgccctttctggagatgcgcaaatcatagagaaaagagttactaacccagcggtaaaccgcctgatccaagggcctgggggtggaggagaggcagcagttcagggctagattatgatgcacagtatattgatccagtcccctggacaaaatcagatttaattgtccgtgctaactcttgtcagcccttgcccttctgtgacaacaggacaaacactaagattataattgcaattggagttagcttttatgtgtgatttaaacggagggtacaaactaattaataggttttaaaaatcttagtactttaccctctatctaaattttcagtgtaatttgagcaagtattggtaggtggtaaatggagacttgccagatgttgacattgggcttggattttgaaacttcttccaaccaggaatttaattacctggttggtgttggtggttgctttggtttcatttacaatgttaaatttttaacaaatcaatgagagtctaatatggctatctggattcagagcatacctccattgctgtagcagctgtgattctcagtgtaaaatctttcagtttctaggtaaacaaagaatagtttctttcggggcatctaagggctgattgctgtttcctttgactgtgtattagacagagtgttttgggctctggtcaactttagtagaaaacctagttttcatacatacatttaaaactgaatttatggaatttgactgtggtgtatttacattgtgagtggagtaggcaaaaggatctttaaacaaacaaaatatgtatttacttatatgtgcattgaaatatgtattttcccatatacatctgatgtcctgatacaaagcttcctttttctccatgaaaaggaaattaaaaaacacccacatcctggattgcctaatgagaattatggaaactaagcttaactaaatttttttaaaaattcaaatgatagtgtagaatttttttaaaagttactgtaacagagtatttctctaaatatttagtatcgactgaaaacatagatgggggcctgtgcttaggaagagctctctgtatattgatgatctggtgagtaaataaggaaagctcttcaaacatcacatttcatggatatgtttaagattaaagtttaagagtgtgtgggtgaaatatttggtttaactggaattaaataactttactgtggttttcagcaagatgagtggtatttggagttttcctttgggactggaagaaaaaagcaaaaaaataaattttaatttgatttgcatagtgtggcctgatcgtttaagtgttgttagaaagagagatgactaaaattagttgagattattatattatggattaagtatattgaccttattttcattatgattttttggtaccattatgtgttatgagaaagaaatagaaaaagaggcctccctgtggttggcgaagggagtttttgatctttatttcgtgggcgtgatgatgaggggagggaggtggcttacttatttgtcactagcactttgatttgctcagtgtacatttttgtgtataacgttctccccactgtgcaaggcaaattgacaaattgtttattaaataatttgtgtgacctaggaattttaaagaaatgctctgaaaaactggaagtctgaagtttttaaaaatgaaatgtacagactcatctatcttgtataactgctattgtttttgccaaaaaatgagtgaatgattgttttttggaaaatttttcaagtcctgattttatgtctgccttggatgtagccacttcctgaaaacaagtcctaatgtaaaatggacatgtaggaagatgctgcttatatgacatcacgtgtcactgagggaagattgggagtggaggcaggagtttggtggcaggaaaatggaaatgggcagatatgtggcacaaatgcaaggtcattctaagcagtgaattactagtagaccagtatctaagatttaagactttacttggccaggcgaggtggctcacacctgtaatcccagcacttttgggaggctgaggtaggcaaatcacgaggtcaggagttcaagaccagcctggctaacatagtgaaaccctgtctctactaaaaatacaaaaaaaattatctaagatttaagactttaattggccaggcgcagtggcgcgcgcctgtagtcccagctatttgggaggctgaggcatgagaatcgcctgaacctgggaggcggaggttgcagtgaatggagatcgcgccactgccctccagcctgggtgatacagcgagactctgtctcaaaaaaaaaagaaagaaaaaaaagactttacttatatatctttagcagtcatctaaataataacgattcacttaccttataaatgtagtgagacaaagtacatagccaggaggaaagatgggtttttgaagaagtagagtacaagtattattgttaatgttattttacttttaggaaaattgaaaatgttcgtatttgtgtgtactgcctaagacttctgtaaaagctctctgtcaacggtcaggaactttatagagtattgcaactattgcagcagtccatctgcagcagtaatagagcagatgggccactggacagataccctggtccaaaacctggctctgcaacttgccagttttcttgaacaggccatttacccactctgacactcaggattttcctctatgagaggtttagtgcttttttcattgctgttgtaaaaataatctaacttgtaaaagtagttgatcagcagtagagagttaaacaaatatagatattatctgtagactggctgagacatctgggtgccccaggcaagctaataacttggccggcaagtcaatattctttaagtttctgtttaccagctttgggaggggatgccttataggaaaagggtcatggggagaagggttgctgacagcattcagcctccactatgattctgaataatgcagccctggccttgagctggcacaccctccaagcagaagcaagtccctgcagcagatgcacttgttatctttagaagggtgcttggtggccttcagttttggctcctggaggccctttagggtctcaccctctgtcccaggaggcggaacaaagaactgcctccatgatgtgtaatagtctctgggaggagttcttataaatctgctattataccgaggtgttttaatgccccaggatgccctagcatctcttatcagttggcacctcgggcagctgcaggctgacttgccccattgtcgggctctagttacacccttggccgtcgttcagcctaacctgtgagcctcctgggcacctctctgtgtacactgctttcctgagggactggccttctttcctattgcaccatctgaccttatatgatcttaagacctaagtcctacttccttaatgaatccttccacaatgagtttccccttttaaagtcaagtgacttctctgagactctctttgtccatgaccatagactgcccagtgacatgtttatcctgtttcatgtttattagtcttgtattactctttgcagccagcttgtgagtttctttggggtgtgccctgtggtttggagttgttgtggtcctttctccccatggtgtgcagggtttcatagacttcctgcaaattggtatctatgatcaatattgggattaatgcatgcctcaatgagctaatgcagtttggcaagtgtaattttgagaccagaatggggatgtaagatgcaaacgatgatgctgatgctgatactgttagagaggcagtgtgcagtgtggaaaaacctgagaatgctcatttggaaagtggggagacacctaccctggtagagtgttgttagaattacagacgtggctttaaacatctgacatgcagtctgtctttctagtctacaggtagatatgcatttactgaacacctactaagtgtgatgtgtctaaaatatatatatatgtatatgttttttatatatatgtgtgtgtgtatatgtatatatatatatattttagagacagggtcttactctgtttcccaggctggagtgcagtggcacagtcatagctcactgtaaccttgaactcctgggctcaagcagtcctcccaccttggccttccaaagctctgagattatagggcagagacactgtgcctggcctctaatatatcatttttattatttttaataacctgttttctccatcacagcatttaccacattgcatagtaactgcttatttgatgatctgctttctccatggggccattaccttggacttgctcctcactttttatttctaatgcccaggttgatgcatggcacttagaaggcgctcagtaaatgcatgctgttagactagactgagtggatcaatatatgtaaagcaacttgaaagaatatgtatgtattagggcctcaacaaatgatggcttgtggtgaagatgaacacttaggatataatggctgccgctcatcaaaataaaaactgctcttgtttttgcattctttgtggctgaacagtaatgagcacagcagccaaaattttcaagcacaagatcagttttaaacaaaacaaatgaagtggagcattaaatattttacattggtttggatggtcattggaagctaataattcaagtttaaaacattcccctttcggcataaaatccataggcattttaattgaagtaagaaattgtcataagccctggcagtccaagtgcttctctagaccggtttactgtggattgcaggagtcagtcctatgaataatggcaaccctgtgtggctcatagaaggggagagactttctggcatgttttttcttcagaaatgggaaccgcaggccaccggtgggtttctgcatccttataggactgtgctgaatgtgacatttttcctcttagcatttttgactcagaatgctctcagatgtttcctctgataggaaagggtccaaagttttaagagagataaagttcagctacatagattaaaggcaacggttagtgattttaaaagtgtgtacattttaggaaggtctaataataattttccaggatgtgaagggaaagcatgatggtgttagtaagtggcagtttggttgaatgcttgcttgctggcactgggagtgtgttgctggattactagggcaggcatcaaatttaggttcaagggggccaggaacagagtaggtggaggtgcttattggtcgggaagccagggaacatggaagctcacttcttggtcccccatgctcttttaccctcagcttgtgtctccccggccaatgaggaaactgaaggccccatatcattggtatatgcctctgcaaagccatgaaaaactcataagaaacctacagagatggatgtccagataaattccagtgcactcatccctcggtatccatggcggattagttccaggacctctggggacaccagaatccacaaatgctgaagtcccttatataaaatggcatagtatttgcatataactgatgtaatcttcccatatatcttaaatcatctctagattacttacaatacttagtacaatgtaaatgctaactaaatagtagcattataatgtttagggaataataaccagaaaaaaaagtctgtatatgttcagtacagatgcagttttttcctgaatatttttggtacaaggttggttgaatccatggatgcagaacccacagatccagagggctgactgtagttgtatacaggtgttatatcaggagaggcaacattggctcttccaccttgttctcttccctcctagcagagttgtaatccagaccacttctttccagatgattaggggtgaggggctgagctgctggatatctgatatctgggagtggcatggtcaaggtcacattgcctgactcagcagggaaatgtgttaggaactttcatccttcattctagccaactgccatgagtacctaacattttgtataaattaagtgaatattattttagtagaaatttatttctgattatgagacaaaggaagccactcttctgacaagaggggagtggtttccattggggaagagtaccccagagagctcagggactttgtttgtttgtgtctttttgtttgtttgattttgttttgtttttttgagacggagtctcactctgttgcccaggctagagtgtagtggcgtgatctcggctcactgcaacctccgccctctgggttcaagtgattctcctgcctcagcctcccaagtagctgggattacaggcgcctgccaccgtgcctggcttattttttgtatttttagtagagacggggtttcaccatcttggccaggctggtcttgaactcctgacctcgtgagtcaccctcctcggcctcccgaagtgctgggattacaggcatgaatcactgtgcctggccttttgcatttttggagacgaagtcttgctctgttgcccaggctagagtgcagtggggcgatcttggctcactgcaacctctgcctccccagttcaagtgattctctgtctcagcctccaaatagctggaattataggcatgcatcaccatacctggctaatttttttatttttagtagaggtggggtttcgccatgttggctaggctggtcttgaactcctgacctcaagtgatccgcccgtctcggcctcccaaagtgctgggattataagcgtcagcctctcgctgtgcctggccgggactttgacctggaagaaggctgagtgaccagcattgcctcccttcacattttatccacctgtgtttagacaggtcaagtggctttctccaggcagctgattaaaaggtggcaagacatggacccagaacccagggccaggcctatttcattatctgtgctatttaggatttggcagttttccatctttgaaagccagatgaagttgatatttaagagaggtgaagtaggcagccatttggcgccaatttatttcagcatctgcatggagaaaatggttagggataaatagtagacccttcatggaaggttttcatttgaagcccagccaaaggcaacagggtctgccctttgagctcagaactttcgcaggccttaacgacacactgggaccttctttccttttccaaatggcttcagccttgcagtttggaatgatgtcaacatgtggcgtagttttattcaagtcccaagttaatggtttacctttttagaaaactccaaaaacactttcattgttatttaacttttgagttatgtaatgtctaagagtcttgtctctgacccgtgcacctacctgccactgaccaacagtttctcatttccttacgcaacaactagtctggctagcttagagttggtgtgtgattgtttgagactttatgtggaagataatatttaattgttttgttctggtttgttggggtaaattatacaaatggaatgcatcctttctcggccttgaaagaggttatatgacagtacaattataataaattcagtgtatgactttgggtacattctattataaacgaatttttttaaaggtgcagttagaagaaggtggaagaaaaaagaagttgacactccgattttccacatcatctaactaaaatggatttaaactaactttctctaactattaaatctttcttaggtaagtacagttgtatcccagctctagagttaatgtgctgggtgggtttttacaaataaaaaatctaaaacctaaaatagttgtgttttatcttctgtcccaatccaaaacaaaacaaaacaatcatgtgatagtaactaatctctggagatacctgacaagcgtggtccaatagtgacgcgggtttgtcactttggtctttaggtgacattgacagctggtgtggcatatggatcacactgtggtcattgaagtataatgttgcttacttctgagaagtgatcatggggccttttttttgagacggaatttcgctcttgttgccctggctggaatgcaatggcgctatctcggctcactgcaacctccgcctcctgggttcaagcgattctcctgcctcagcctcccaagtagctgggattacaggcatgcaccaccacgcctggctaattttgtatttttagaggatttctccatgttagtctggctggtcttgaactcctgacctcaggtgatctgctcgcctcagcctcccaaagtgttgggattacaggcatgagccaccgcatctggtgttcacggggcttttaccttatgtactacctttcgatgtttcagttgtgagcttgaaaaattttattcagtaacctaacatataattagagatgccagagtggtggggaggggagggaaggaggttgggagaatgttgttgattttttttttccctttataaacacatacaactttggacgaagaacataatgtttgagcaaatgaatgcttgtaaactgccgatctctgaagtgtgaaaagtttatattgatggcacttatattcataagcctgatgggttttggctgggaaatttggctcgaggtacggacttcttttgggacacattttatttttctgtcaaaactgcctgattattcttatttaggaaatatgtgatgaatgaggctggctggcaaatattttaagtgcagttgatattataaattttcacctacaaaaatgaactacttttcattgttgaatagttatgtcttagttcattgcttttacttttgaaactgtataaacttttccctttttttggagacggagtgtcgctctgtcacccagactagagtgcagtggcatgctcttggctcgctgcaacctctgcctcctgagtcaagtgattctcctgcctcagcctcctgagtagctgggactacaggcacccgccacgacgcccggctaatttttgtgtttttagtagagacggggtttcaccatgatggccaggctgatctggaactcctgacctcaggtgatctgccctcctcggtctcccaaagtactgggattacaggtgtgagtcgccgcactggtccaacttttccttttcaccttagaaagattgtcaggatttttttttttttttaaacggagtcttgctttgtcgcccaggctggagtgcagtggcgcgatttcggctcactgcaacctccacctcccgggttcacgccattctcctgcctcagcctcccgagtagctgggactacaggtgcccgccaccacacctggctaatttttggtatttttagtagagtcagggtttcaccgtgttagccaggatggtctctatctcctgacctcgtgatccgcccacctcggcctcccaaagtgctgggattacaggcgtgagccaccgtgcccggccacgattgtcaggatttttgagaccttactacaacccctgacacctgacccacagtatagaattttccaggtgaaaaagacatgtagagaaagtcatcaatgccattcttttttttccccattcatgaaaatgattagattttcctttgagctgcctgtctgtctgcctagcacctcatatgtctatccaggactgggctgcctcagagaggataggtacacctaaagcaatgcaagaaaaaaagtggcggaaggataccatgggacaggcagagagaagaggtcagaatttagtgttgattcagttccgatatttccaccctcctttgagaagtttttcgaaattgttttgcctcctctgtgtaaagctcaatttttgaggccatctgtggtttatgggtaagcagcagaaatgtgtgtctctgggaaagtgatgaaaggctgcaacctttggagtgtaatatttaatagactaggaattacaagctgtttggctttataaaaacaaagctacaggcgctgcaggtatacgtatcctgtagagaacagacttttaatgggtgctgctcatgttggagatgctgaatggtatataatacacagaagagctgtccttaggaatttggtaaggcaaaaagcgctaaaaagttatttattaccttaaaataatatttcattggcctataaatcagtataattgaaagcacagcctgccagcattttcttttctttttttttgaaatggagttttcctcttgttgctcaggctggagtgcaatggcgcaatctcagctcaccacaacctctgcctccgggttcaagcgattctcctgcctcagccccccgagtagctgggattacaggcatgcaccaccacgccccgctaattttatatttttagtagagatggggtttctccatgttggtcaggctggtcttgaactcctgaccttaggtgatccgcccgcctcggccccccacaatgctgggattacaggcgtgagccaccgcgcccggccatcctgccagcgttttcttctgtgcacttgggatgggaatatagaaaattgtcttcctagatattggctttgccattcaaagtctctacagtcagtgtgtgaactgctgggagtgatgccagaatctttcacagatttcattcctgggagctcttctggcgtcagatgatcgcggtttcttttccttctgcaccacagcacatggaggaggcctctttctcacttgctccgttcctttgccattcatggaggcagtggcaccagtgagctcacggccaggccgcttttgccctttttctgactaagtcactatagatggactaaacagaatatatttacagttcgcccatttagaatcgataagggtgtgccccaggctccatcgtatattccattacatacagcctcaggcatccgtttcaattgtttgggagaggaagtgaattagcacaagtggaatatctacaggatgaaacgttgtcagtctgtgcgttcctccccaccccttcgttggctggaagagataacgcttgacacgtatggagcagacagggtaatgtcagcctcgtggccatggagaagcaggaagtcccttggttttgttcagtgtgatttgggcattgaatgagtagatcctgttttaagaatattactcattaatatgaaccatcattttgtaggtcttttagaagcaacattctctttagtgcagataatgcttatctgcattgagagaagttataataacctggagaatgagaaggaaatacacatgcgaaatggcccagccggtttctcctggcaacctctccagagcatgtcctaggctactcctccaggaaggctcctgctctgatttcctgtattccttcacgatttggagtagataactggccacttggcattcttattacaggggacttatgcgtgggattattggcttcccctgtggactgtgagttttctgagggtagagaacatggccttttgtctctggtgttggttggaattcagctaagtgcacggtaagccatgtttatttcgttgccttataaaggtacatatgcagaaattagaacagtgtttcagggctttggacccaaatccctgtctccacaaaacacattagctgttactttgggaaagtcacttgacttctgtgagatttagtttttctcatctgtaaaatggggatagtcatcacggctaattcataaggtggttgtgaggatgtctgtgatatgtataaagtgcttggcacagtactaggcacacagtaagtgcttgagaggtggacgctatttaacaagacagagcaggaacgggagagagagggagagcgacagtataacatgcttctgaatctgtgttcccgggtcctacctcttcattcattcctgccctggcctcccacaggcagagtgcgggtgagggctcacttctcctcagtttcatccttcctccctctcttctcctctgcctgtctctcctttggctcagcttgcctggtgggctcattctgccaagtttgcctttgcttgtctgttccatttttctaggtatccttgcctccttccgactggactcagtttatgtgccgagctctcttggtgagtccaccttattatgtgctcattagatgatgcttagggttcctaagaaacatattgactaggaatttagctgtgcatctgaaagttggctgctgaacgcagagcttcaagggatacccttttcaaagtccacaagacaccatgggaaagggagggaaaagcttcatgttaaggaggatctgttaagatgggaagagatgcatttaaggaagcagagacaactaaaagccgctctgtagccaggaggagttagctgctcagcaagaaggctgcttggaaatgctttgagggatatcatcctggtgttacagggaacctgagactatgtgagcacataaattcgtgtttttaatgcagtgtgcttcagttcctgaaaggtagattttctttttcttttgtgtgtgtgtgtgtgtgtgtgtgtgtgtgtgtgtgtctgtggtttgtttttttttctcccagatggagtctcactctgtcacccggcctggagtgcagtggcgcgatctcggctcactgcaacctccgcctcctggtttcaagcgattctcctgcctcaacctcccaagtagctgggattacaggagcctgccactacacccagctaattttttgtatttttagtagagatggggtttcaccatgctggccaggctggtctcaaactcctgaccttaggtgatccacccacctcggcctcccaaagtgctgggattgcaggtgtgagccaccacgcccggcctgattttatttttctagcttgctttttcaagagaaaccatcttttatttatttgtttgtttatttttttagagacaaggtcttgctatgttacccaggcacagtggtgtgatcatagctcactgcagccccaaattcctgggctcaagtgatcctctcacctcagcctcctgcatagctgggactataggcatgtgccaacacacctggcttaaaagccatcttaagtggccaaataagacactgggaatttgattagggatacaaataattgatttttttttttcatggatctttatggagaaaggagtctgagatgagtgtggacacctgagtccctgaccaagagaagccttgtgcagcatgtcagacagacagcagatcctgaagctccattcagttgtgacatgtaccaatttaagatgtgaaaatgagtgttttgccaagccagaactgtccgtgccaagaaaagcccattaggttggtggctgaaaggctggattgttaggatgtactgaatggtgaggccctgccagctgctgcgggtaaatgcccacttacatgtctaagtactcattctgttcccctggagtggggtccagtttgttcaagaaacatggctgctgtgtgagaggctgctttcttttttttgagacggagtcttgccctgtcgcccaggctggagtacagtggtgtaatctcggctcactgcaacctccgccttccaggttcaagagattctcctgcctcagagtaagtagctgggattacaggtgtgtgccaccatgcccagctaatttttgtatttttagtagacacagggtttcaccatgttgaccaggctggtctcgaactcctgacctcagaggctggtgatccacccacctcagcctcccaaagtgctgggattacagacatgagccaccatgcctggccgagaggctgctttcttttaaagaattatttcttgttctttgggcttgttgggtgggtatctttagtttgtaaaagtaacataacactgacaaaatctgaaaaggaaaatacttggaaattgggtctataaggtgaatttaggtaaaacatcaagagaactaacaaatagacaacaaataagctataaacaggtaccataaataggctgttaaacgaaactgtcatttgaaccgtaatatttgcccatcatttattcattcctcaagggctaattgaatatctgaatgatcttgctgcagtgttgggcagggccctctatctcagcaagcttctagtcatgtaggatagacagacttttgcacaaccaacagtattggaaagcctaaataggaagtgagatgaagcatggaaaaatgttttttggagttcagccaaggagagcgttttgacttggaggtttcattccttcattcagattcttgtggacgacgtaaaaatgtaagcaggtgggtgcaagtgtgggtatgtatgtatgtctctacccttgccttccttggagaaaactggaaataagacatgaaagaaatggggacaaggaaactaagatttgctaggaactctagaccagcagctggaggtaggtattgtaattcacatttgaaaaccgaggttcagaaagatgattggccttgaatagtgttttaaaatgctggaagcagtagttggactcccaagctgctaagccatgtctggaaattgggtggtgggtggtgcagctcattttgtgtcctgttctactgtcactgtcttggaagggaagtttaaagaagttttaaatgtctagcacagtgctggctcatacgatgtgttcaatgcctgtttttcgccttgcttcctctaaaccaggtgttctcaacctcggcattagtgacagcctgttctggatagttttctgttgtgggggctgtcttgtgcattgtattttaggataggatatttataataggatgtttagcagcatccatggactctacccactggatgccagtaacagccacctcctcacactctttatgacagccaaaaatgtctccagacattgctaaatgtgtgagggggcgcaaaattcccccaccctctgtagagaaccacaggactacaagatcaagagagatcagtcttgactgatgtgcttaggaggctagagctggtgtagggaaggaggagcctgcacctagtgggcaaagaaaacacccctgtggaatgagatgagagaagatattgaccttgggtgtccagagctggtgaggggagagaaaaggctgccagatggtctgagcgtgaggtctagggcagttgctgttgtactttgatttgtatggactgtcccaggagtgcgtagtttcctgtgtcccagaggtctgggctgagacagacaatgggtatgacctggagaacctgctggtgaggcttgtgggtgtcagagccctgttgaatcacttttccctctccattcaaatagccactgcaattccatacctatttgtataattactttcaaatgtcattctcttccttaagactggaagctcccatgatctaggtctgtgacttgttttctggttattgaattgagcacaagaaccagccccaaattgaacatttaagtgagtgacatgaatgaatgatggaaggagggttcgcattaattgttggattgaacaaagcccgacacgattaaatgtaacagatacaaagatgaagccagacaattaagttggagagaaaaagcaattgctcaaattcagcagcagggagacttgtcatgacagtgtccttttggagaagagtctgagagctttgataattacaaatgtctatggaacccatatcctcgtgactgcattaagaagaaaatacagcttttgtctataccatagaaattgaatgtctgcaatgggagttgctggtttctctgttttctctgtttttgctgaggtcattctgcatctgggacatgagagtgttctgttctgggagagacactgacaaacttgggggagtccaaagaaggcaaaagctggagaacccgagtatctcatgaataatgtattttacttagctatggagtcaagcaccatgtgcatctttttgtaaatattactgcatgtaattcctcaaactagcctcttatggggatcctctatttcagagcttggcagacattttatgtaaagatagtaaatatggtaagcttcgtgggccacatggtttctgttgcaacaactcaactctgttttaactcaaaagcagccacagacattatgtgtccaaaagggtgtggctgtgttctaataaaaacaggcaatggtctggatttaccctgtgggccatgatttgctaagccctgctctgttttattgatgaataaacaaaggcttaaagagattaaataatttaatatgctgaaatgagtaagtggcagaactgaaattgagctctgagcctctctggctctgaagcccatgaaaacacacatagatggtcttttggatggggataggcttgttttgggggcactgggggtcagtggtgggagccatgaggaggcagaggttggcttagtaggaagaactcagctgtccaatagcagagcagactgcaagtgaggtcacaagtggtggacactgcagtgtttgcactaaatacccacctggtggggatattgaggaaaagattgccgatttggggaggaaattgagctgatagcctctgaggatcccttccaactctgtggatctgtggtcatcaacaaaggggaccacgtgggtaacagcttccaccagggtgctcttgagcaggagctgcggggcaagtagctgccgttttcttcccattctcagagtccatcctgctgacctctcctgcccactcctaatgaccctttcctgcaggtcggtcttaccagcctccccccatttccctgcagtggtcagcgggtgcccttgcccccctttccctagctcccagctctcaccgcacactcagctgaatccccagggagaacacaaagcagagagttgtacagttatgggcttgtatcccagtcagcgcatccctgcctctgaagggatgcagatgaatgtggcctcttgctgttttatgccaacttggagttcactctctggctgtacttgccgccccccagcttctgcccttctccttggtgtggaagctgggattctgtctccagcattactccaatttttcccttgtgtctctactggattccagatcctcttgcacactgccagcgttgcagcatccatactgttggggctcaagagccagccaggtcatagctgtggtctaggccatatcgggttctcccagcgggcccgttctccctggggttaagtccagccgtggcaaacacggagtttctgccttgcctttcctactgagcaggcctcatgagtcatgagtcatggccccgcaacttcccattgctatctgaccttgcttccccctgctctgtcccaagggtgatatcctgcttgctgtcttggtgattgtttctaaactgcctaatagctgtgattttttttttcaggctgatttctaatttttcttcaatgtcaggtaactccttgtttcttattctcttaggcctctggtttctgcctttccagcaggctggatggtttagcatgctgcgtgtgtggccaggggcagcccacatggcttaattagctcttcagccccctggcaggaggtgtgaagaatgcttcctacagtatgtaggcaccctgcgattggggcattttcccatgtgctaggttcggtggattggagaagcttgaaggggtggatttggaggatattgtgcaaaaggaaggtgtggcagtcagggtgctggcagggaactgggcccttctgatggtccggatgtaggttatgggatggtcaggtacgtactatctggcagcagaaggggagcctgtaccatgcctagggctgcactggagtcatagaggggggtcaccagtacatgccacttcagggaagaaacatcacaacctctctcttcctgcccccatagtcccaccagtgcctctcattagccaaacctaacaggaaccacctgcagggagccacccagggtggtgcagtgtgtaggagagtgaagaatgcgattgggggcaggggaggacagacagatgggacagatggagaataaccaggaaggggcatccacttagtgggcaccgatagcaggcttgctacattactgctttcctccgggggtgcaggtggtcagtatctgcagaacccatctgctgggcctctcttcttctcggtggactgggtttataatccattttccctctgaaggcattcctgagactcaagcagtgtcctccttttgcaaactcctggggtaattcctcattgacacattcatccagcactgagactccccactgttctctcccccacctctctctctgtgtgcccatctttcctagattgtgagcccgtaaagtgtaatcattcttttgttccccacatcttgcaagacccttcagaaacacctattgtctgatgatcatttcattaactggtcagaattacaaaatcctgaactgaaggattgtagccatggttcctgtgagttttaaaggtaaactgaggaattgccgaaaagttccttaagatgcatagtgtgttgtgcacgttttcatccttggcataaccctgtgaggtgacagccccataaaagtgcaaagtgggtcccagatcactctctgctagctggggtagagtaagcttcagataaaatggctgtttcctttccatcccattgatgattttccccaaatctattggtacttattaccatgttagcttgtcccagtgtcatatttttagatttgaaagcagaatgggaaggtgagtctagtgggaataaaatgtggttgaccgcatttctactacacaagaggaaatgggcaccagtgatcatgggtgcctgggtcccaatctgccccatagcacgggtagtgggtttctgaaagaaagcagcacgcatctgtcgctgaacctgcgtttttacagcacagttgtttgccctggaatatttgccgtttatgttgttgttttttttttttttttttttttctgagatggagtctggctctatcacccaggctgaagtgcagtggcacaatcttggctcactgcaacctccacctcccgggttcaagcgattttcctgcctcagtctcccatgtagctgggattacaggcgtgccccaccacacccagctaatttttttttttttttttttttgtatttttagtagagatggagtttcgccatgttggccagggtagtcttgaactcctgacctctggtgatccacccacctcagcctcccaaagtgctgggattataggcgtgagccactgcacccagccatatttgccctttaaaagggaaaacctaaggaaactgatgttaaccctttgccatcgtcaatctcattgatgtcggccagtcaatcctgtcaaatcttgctctttttttaatgatgcttgaaaattggagcctcacaactgtttactaggtgggtctaggatggtaatttctggaaatgactgtagactatgccaaatgtctttttagcctgttatctgaccatgcccagatggcttaacttttctctagcagtgtcactttttccttatttctctgtatctgtggagtagcgtagaaccgtatgtacaaaggtttctgctgacatatcagtgtctacacagctatgtgggtatccatgttggtgcctgaagagtctggcccgcgcccagtatttggcagctgtaaaatgttagatgaacttccaccctcagtaaaatcagccaccccttcaaaagagtcacaggcatccatccagtaatatctttccaggaaaaaaaaaaaaaagatttacgtgtagtcaagaaaaagtagagatcgcaggaagcactgctctgagcagattagaacagaggatttcgcaagaggtgctccttggccaagtcgagtaagtaacatcggactgataggaggaagagcagcttagcttggggccctgtgcccagtcctgcttgtttaggcctttgtccctgtctgctttcctggggctggggctctgggcccggccgatgcccctggtcccaaccccagctttatcactgggttcagcaaggggccctggagagcaggcagcaatggcaggcacctcccgcatgcaccattaccttcattcctcttctcaggtttccacagttgcccctataaaaagactgctgttggcccatgccaagtactctggaatagacaggagtggtatttccgccctcttggagggttggtgtttaccagtgtcccccttcgctgcaacccaatggcaattgtattgccccggtgctccaggaatctgaggatgattggttgatttcctatgatttctgggagagtagtttacccaaaccttttatgaaccaaagccatactccctgggagtgtctggctgatcatgtcagagacatctgcctggtggattggggctgtcacgtgaccagtggcccgctctgtctgctgcccagtactgccaattggggagtgtccttctgcctttttctctgccctatgtctgggacacagggatggcagccaggcccaggagcacccagcatcctccaagcaatgaggtagcactgcttctgacttttcctcaggatctggtctttttccatgacaatgaggtggggcccaaccttctcgaaagtggcattgtttctgcacagttgtaactgctctcaggggtgtcagtgaagtaggggtgggagggaagccatgggatgctgagagaatagggccgagaggacatacctgctctccagcttggcctttgatccagacactagggacgaggctgtcactgtgggtgcctttgttagtgtttgtgtgtttgagtagtctgaaatgctgtgacttttttttgttgttgttaataaagataaggaaacaaacagaaaaaaggaaattggagcttccaaaaggaagaaggaagtcttaatatagaattgacttcttcccaggtaagttttaattgcttctcatgcttgtagaaaggtgtatcatgtgttctaataggttaggatttaattatggcttaaaattagttctataggaagagcttggagttgcacctagggagaagaagcagagggttccagaattgtgtaaacggattgatggaaaaataggcttctggtgctgagggttcaggagccttgccagcatcacaacaaggtgtgaattagcctcctcgcactctgggaggaagtggaggaactgctggggtgtgaggctgtgaaaggaccttggagagccaagtcctccctgttcagacagggacaggcacagctggagacagcagttttcagctctgtggaactcttgttctctgggttgcacttcttcctgtgataataaagaggttgaagacaggaagacaggtgcttgaaagccggaagacaaggggaaagttgtttgaagcaggtgtttaaaaatccgccactttggggggatgaattaggatatcggtaacaattttatagcctatatggtttctttttgaccctcgaagataggtgggaagtggttttctatacttcttttaaaaactgggaaaccagagcttaaagaagttaagcttgaggcagcagagttcaatgcactggtgaattgaaatgtttgtgtgtgtatacatacatacctgtgtgcgtacatacataggtatatatacatactcagtataaatatacatgcacatatatctatacatgtactgatacaaagggtatataatacaatttacaactaataacaaactatgtgcactctttattataaattccattcagccaatgtaggctcacagaatgcttttattgatttttactgtggccaacctatgactgacaatggtttgacagagttgcattccaattcactagttttttacctagtaaatttattaccattaaatctaatatgtgatctactgttagactatttctcaccttgtacaaattatgttccttaagctgagcttcattttggcttcagcactgctgattgcaatagtgctagctatgttttaagcttttggtgttgttgcaggggttgaagcattgttggattctgtatcacctaagggtgtctgtgtttagcaaccaggtcatgaaattcctgaaaaatgaacagttgtctcttgtgagccagcacaggcaggctggagcacatcactagctccattgtcaaggtctggaaaggcaggtgcttgtctgtcttattcagtctttagccccagacccagggaggtgctgaatgtatgattagagattcagtgaatattggtgagatggatgaatgaggtttcaaagctgggaccaggagccagtccatgggactccagttcttatcccatgaggacaaggtccagggtgggcattgaagaatcacaggaaaggaggggcaccagagaccgtctccactgtcagaactcagctgccatgtcctgccttccgctaggatgtcagcactggggcactgtggtacaaagaagaggagaaggatgacatctcatttagtgtactttttttccagctttatccaatcttttggcaattttattccccatcatttaggaaagagaagaccttcttatctagcagtttgatgacttatggtagttgctttggtttgaatatttatcccctcaaaactcatgttcaaacttaatctccagtatggcagtgttgagaggtgaggcttttaagaggtgattgggaaggcagagccttcatgaatggattaattcatacgtgggttagtggatgaaagggctaatggattaatgcgttatcgtgggagtgccactggtggctttataagaggaagagaggcccaagcatatttagtgagcattttcttgccctcttgccatgcgatgccctctgccacgttttgatgcagcaagaagatgctcaccaggtgccagcgccatgctcttagacttcccagcctccaggaccacgagctgaataaattgcttttatttataaattgcccattctgcaacagaaaatggactaagacagtagtcaccaacaatacttaactagaatggccagttatggagaacaagagttatattttttttctcagacaggtccctttacatcttttaaaatgaaatatgtaatacattcacacagttcgaaagtcaaagacagtatcttgccctccagtgactagttccttctagtgagtcttgagatcattccatatatattctatgtgtatttaagacaataaacataaattttttcatgtttttactgaaatcgtagcatgttatacacattgttctgcctttggcttttttgttttttcacctcatagcataacttgaaaatcattccattactacataggaagacatgcctttttcttctctatgatttactgtcatttatttaaccctttctgtctgtgaacttctaggattcttttctaatttttctattataagcaattctgcaatgattgctgatgtacaaaatgttgaagctatctgtaggtaaattcctagaagtggaattgctggatgaaagagaacatgcatctgtcattcttgtatgtgttaccaagttactcttcatagaccgtaagtcagttttcagcccaactacaagagaaagctggctggcttctttcgctgtctcacagctgcttgattcttgctactttgataagtgtagtttcatcaatttttaagtatgaataagtgtaagcatgttttcaagtatgtttaagaactatttgtctctgctttgaactttctattcatactctttgcccatttttctctacgtttgtagacttttattaatttgtaggagctctttatctattaaatagctttatgttcatgttatgatttgcacatcttttctctaggttgtcatttgtcttttggcattgtttctggtacttttctccccatgatttttttttgtgttgtgataaaatgtgaaacttgtcattttaactatttttaagtgcacattcagtggcgttaagtccattcacattggttgtgcagccatcaccactatccatctccagaagtctttcaccgtcccagacagctgtattttttaaaatagtcggatttatcaaattcgtttaatcttttatgggttttgtatcacagttagaaaggcccttaccgctctgagtttatttgttttgagacagggtctcattctgttgcccaggctggagtgcagtggcacaatcatggctcactgcagcctcgacctcctgggcttaaaagatctttccacctcagcctcctgagtagctgggaccatagacacgagccacaacacccaactgattttttaaaaatttattgtagagaagaggttttgccatgttgctgaggctggtctcaaactcttgggctccagcgatctgcctaccttgacctcccaaagtgttgggattacagatgtgagccaccgtgcccagcccactttaaattcatttttaaaatattctctcataatttcttctagtactttgatggcttattatgtatgtttaagtctgtgatttgcctggaatttattttcgtgtgaagtgtgaagtatggctccaggcgtagtttttccagagcccctcagttaccatttgctcatcaaaacatggtttgagggctggctggattcaaccagggagatttcctgcactgttggtagctgtagggaatcagcaaagctgctgtttccaggagctcttgtgagctggggagtgaagagcttcagaaatgaagcttgagctagactgatgaaatcccactctaggaaaatacaagccttacggtgtttatgtttgctatattcagaatcacaggcatgctagtgagtgcactgtctaaacatgttgaaagatggtctgcagtatctctactcagcgaggtggatgaaacaggtacagcccatgagaggcaagttagtgtcttggataaggcgttcctggtggatgagccatttgtgccccgatagaggttcttacagaggaggggctggagtccactgatgctctgggcctctccctgggggaaggggtgcctgtttctcttggcccaaaggccctgcacattccagcatgccctgaccttggaactgttcctcaggtctctgggcccactgcatctctcctcccacagctggacctgagagtcagggagcacctcttgtatgccagccatgctgggtctgggaccccctcaccctcagggccctcaggtggttccctcaggctgcagcggacatagagatcagttctgtgtgttccctaagctgacgtggaaagttgggaagcacacgcttgagcccttgaacttcctctttctcagagcctaacagtagagccggggtgggtttcttgccagaaccacctcctcgcagaatcccaggagacaccagccaggtcctttcacaccccaaacagtgtgaatgcgcatgtttacagcagcacaattcgcaattgcaaaaatgtggaaccaatccaaatgcccatcaatcaaaaagtggataaagaaactatggtatatatacatgatagaatactactcggccctaaaaaggaatgaattaatggcaattgcagtaaaccgatgagattggagacaatgattctaagtgaagtaactcaagaatggaaaactaaatattgtatgttctcactcataagagggagctaagctatgaggatgcaaaggcataagaatgacacaatagactttggggacttagagggaaagggtgggaagggggtgagaaataaaagactacaaatggggtgcattgtttactgctcgggtgatggatgcaccaaaatttcacagatccccactaaagaacttgctcatgtaactgaacaccacctgttccccaataacctatggagataaaaagattaaaaacagaaacaaaaaccgaacagtgtgaacagtgcaccctgaggtctccctggggtcccttgtacccctcaggagcctgtggatgaccctgtgcaaacagttgggtggaagactgtgtcttcctgtgtgtttggatgagtaccagaactttctgcgtctgtttttcaccctacccaatgcagtgcttacctaaaaaatgcgttgaatagagcttcttgcttttacctcgttgcactcctgagagcaagatgggtcaccagcagctgtactggagccacccgcgaaaattcggccagggttctcgctcttgttgcgtgtgttcaaacaaccggcacggtctgatccggaaatatggcctcaatatgtgccgccagtgtttccgtcagtacgcgaaggatatcggtttcattaagttggactaaatgatcttccttcaaaggattatccaaggcatatactcaatgaaaaaccatgatagttctttgtacataaaataaacatttgaaaaaacaacaacaaaaaatgcgttgaataaacgaaggccaaaatgtcagtttccaaaaagaacctgaggcggttctttggtcagagcagccctgttagggctgagggcctcggttccacctcctccatgttttcctctctcttcccactgtgagctctctcagacctggcactgtggccgctcccagctcctcgcacccagcatggggcaggtgctgaatgtctgaggagcttaatttcccctccctcttgccttctgcctggggtgagggctcagttgctctgaagctcatgaccaggcttaatagtcagttgagctataggcctgcagatcgagtatccctttaagtttgtttttaaaatattaaatttaccaagaaacagtaaatatttaaaatttttgttgggttttgctcttttactgatttctactagattttttggctccttttaaaggtataatttatatgctaggagtggtgtctcatgcctgtaatcctagcactttgggagactgaggcaagaggatcgcttacagccaggaattcagccccagcctgggcaatgtagcaagaccctgtctctacaattaaaaaaaaaaaaacagaaggaaaaaaggtatagtttgtgttcagtaacattcacaccttttaatatgcaattctgagttttaacaaatgcatagtcatggaactactactgcaatcaggacgtataatagttcataatcccctaaatttccatgtgtgtattagagttaatgctccccacctcccttcatctggcaaccactgtcagttttctgttcttgcagtgtctccttttcaagacagacacagaaatagaatcatggcatatataccttttaagtttggctagcatcacacatttgtaattcatccacattgctgtctacgttaatagttcatctcttttttattgctgagttttctgttgtatgaatatgctacagtctgttcactcaccaactgaatgacatttggatttttccaatgccttcctggtatctatttccctccattagtctatgggaagctttctagagaatcattgtgattctaaccaggtatatttggtattttttttgagggcaaaggtttttgggcagcgtcccccaagtcatcctgtataattgtgtactgagtggtcctttatggtgatgagatggtagtggtggtgtcgccgtgcccaagtctgattgacagctaaccattcagccatccttggttattctctcctctctctggtgaacaacataccttctttgatgttgatgccaattagacatgttataaggacttctctgaaaactcagaacccaaacataaccatccccatatgctgtttctacttcaaaaacagttggaggattgtaagacagaatttcttcccattagcagtgggggccaagaaggaaggggaagaaagaaccagttgcccagggcctttgactgtgaaagaggacacctgaaggtgaaggacccatgacattgttaattgtgattatttagctgatggaaacaaaattccataaacattctgtaagagcaaagcctggtgtagagattcattctgtctctttaggtgttggtctcccagtgactgtaaaaccacccaagggtggcattgaagacacttgcttttgcccttgacttatgtgctcttgagcattgtacgtccttgggctaatcgcttgccttcagatcttctgcgctaggttgaggggcttggaggagatgggcctcttggctctctgacactgaatccttcctctcaggcccagtagtctttgcggcctgttgggtctgcaagtctagaaacagcaactccatgccacgggaacgtttctgcttccattgttactcaccggccttacacggatgaccatgcgctgtacagggaatgccagggctggccaagctggctccagcagagcacaaaatagagcttgctcctgctgaggtgaggtccgttcctggaattagatgctctctgcatctaggtctatcaggaaggtgagctggcaaaagatccctaaagcctttaaacatcacttaaataggtgtgtgtgcaaaattgtcttccattaacaaatatgtcaaaacacaagcctaatgttttctttggacagtttccaaacactgagcttctttctgaactgttactggccggattattgggactattcccaggtgtttatttcacatcctcctctttttgcaagtgacatttaaaatacttcttcgaagcacacacattaagccaggagaaaaatcctaggatgggaagcaatcttatggctgagaccttgtctgcgaacaattgtttgctgaccaaaatgccgaagtcattaatcctcctttctactgactttgaaatggaaaattaaatttcagaaaccttttgattgcacacatgcatcccacaatgtttcatacaccaatacatatataggtagtttgaattctgtgcaccaagccacttgcactgacactgatactaatgtactgtgagagagcagcatactttaaacacttgccgatgtgaatcagacttgagagaacttgagcgtgcgtaagcaccttgatgtcttatccatttggaagcttattgttacagtgcgttttcttttctttctttctttttttttttttttgagacaaaatttctctcttgttgcccaggctggagtgcaatggtgatgtctcagctcactgcaacctccacctcctgggttcaagcgattctcctgcctcagccttccgagtagctgggattacaggtgtgcatcaccactcccagctaattgttgtatttttagtagagatggggtttcgccacgttggccaggctggtctcgagctcctgacctcaggtgatccacccgcctcggcctcccaaagtgctgggattacaggcgtgagccaccacgcccggcctaccatgcaccttttctaatccctcttcctggaatgctcttgctccagagagccacaaagctaactttcatctcctgcagcgtttgttcagatgtcactttctcagtgaagccaaactgaccttcctataaaaatcacctccgactcctgagctcaggcctgggcaacatggtggaaccccatgtctactaaaaatacaaaaaaactagccgggtgtggcggtgtgcacctgtactcccagctactcgggaggctgaggcaggagaatttcttgaacccaggaggcggaggttgcagtgaaccgagatcgcgccactgcactccagcctgggtgacagagcaagactccatctcaaaaaaaaaaaaaaaaaaaatcacctccaacctcacaccataccccattttctgccgcactatataccctggtatatgaccttccagggacattcaactggtaagggaagaatgcttcaagggagccatgtgtatgactccagtaaacacactgtgtgtgctcacctcccaggtgctggcaggctactaagcatgcagacagccaccccatgggaagaatcaggggagaaggggcacaagaccccagaagtctgacaacatgtaaaaccccaagtcaaaatgttaaaccgcgtacttgatctctcaagtcgcctcctgggccctcttccaagtgtactttacttcctttcatttctgctctagcgcttttcaataagctttcactcctgctctaaaacttgcctcagtctcttctgccttaggcccccttggtcgaattctttcttttgaggagaaaagaattgaggttgctgcagacccatacagattcgcttccagtaacactagtacctagtagtttctaaggtatttctaacgtgatcttactaatttatcttttaaattaaaaattaagggtatcatttattctgtgactctttgaggagatttggtgtctgttttatcctgagcatctacaacagtgcctgacacatagtagatgctcagtaaaaagttatggagtgtataccacatgctctgggggatatatggcacagtctttggattatcagtttgtgtttatttcttggctgcaaaggtggagggaaggcccaggttgcacaggaggggacagagctttaacagtacgtggaatgcagtggacgtgcctttatctgcaaggacccttgactgcattgaggctgcctggagcaaagaagccaccagacccaaggggctcaggctaggctgggagaatgccaggaggcgagtccctgtcacctgcccctagaacaggtcagacctgttctgttgttctgtggtcatctgctctaaatttcctcctactcacctctgggcctttaaatttgggattcataagaatgcttggtgcagaggaggagctgatgcctccctaacttccctaatgccgcccgcccaagc

SEQ ID NO: 761 - DNA, 2694 bp, Homo sapiens
  source 1..2694: mol_type = other DNA
agaataatgcagacaactgatcactgcaagtcactctgccttggagctattggaatggctccagaacagggcactgggggccaaggcaggatttcaaccaggagggttttacagaagatggacttcacctgtgagggctggggttggaaccgagcaccaaagaagtggccactgtccactgatggccgtctccctcttctctgtagccctcccccacccctaagcagcccagcttcagcagaggaggcctgggcacaggaatggattgttgctagaaacctggcttcagctggaggaagtcagaagaccgggctgatggccgcgcagacagagctgtgtttatccaggaaaagaggtaggacgtaggcagcggaggcccctgccagctcctcccataaggactgcgctgggggagcaagctgcagagaaagctgctcccctctggctctgaaagtttcagggcctgaggccagaacccaaaagcgacccacaggtgaggccagcactccgggcgcgcgacggagagggtcgctagctcggatcccagggcagagggtcggaacacggtgctcttggtggctccgcgcaggggtgaggcgagcgcgtggtggcggagccttccggagaccgctctgagggtggcggagaatcaatgctgcctttgtgctcggtggtttccgagggagaaaaggagtggagagtaggaggggcgacccaacggcccggccccgccctgcagacgcgggatgcggtagggctgggaggcgcgggagctggacggtcagggctactgggggtgggattctgtgtccccgggaggtgcgtctccttggaccagcccagggtgtcctgaggtcagcagccaggtgtgtcccctggctgccaggagcagaagtgagtcctcttctggcttggagcgactcgaggaggggaaggaggagccagaggaggcaggtggggctaggactgagggatggctcaggccagagaagcttgagccggggcagcctggcaaagggaggaagtcccaaggggcgccagactggatcccagaggaaaacccaagtcttcgaaatgggcgggggaggagggcgtgagcccgcctagggcgcagtgtcccaggggggttgggatctgagtccttttgctataatgcggttattatcctatttgtcctaatagtaccctagggttctggtggatactatatgggccctctaactgtaaggtgaatggggcatctttagtaccagtgggagaatctgtgtacttggtgacggaggcccgtatatgaaaatgtgactgactggccctttgctccctccatttctccccagccccccagactgcgccgccctttctttttctgctcaaataggggtccgcgctcccagtgggtccggagaccggggcgcggtggctgaccgcccggtgtacgccagcatcactcacctctgactcctctgcgctcctcgcccagccccgctccgccgagcactcccatctgagacgggatttggaccctctcggccctgcggaattcggaattccattaccccacccaccgcatgtggctcttggaaaaagctggctataaggtgggggccgcggagcctgcggcccgttgggcgccttccggcctgttctccaagcgtcgcgccccgggcccgcccacaagcgcctgccccaacgtcctcaccccggatcgcatcccgcagttcttcatcccgcctcggctcccggacccgggcggcgcagtgcccgcggcccggcggcacgtggcggggcgcggcctccccgcgacctgctcgctgcctcacctggcgggccgcgaaggctgggccttcctgcccgagagcccgcacacgcgccggcgggaatccctgttccacgggccgccacctgccccggccgggggactccccgcggcgcagtcccggctgcacgtctccgccccggacctgcgcctctgccgggcccccgacagcgacacggcctcgtcgccggactcgtcgcccttcggctccccgcggccaggcctgggccggcgccgggtgtccaggcctcactctctgtccccagaaaaagcgagctcggccgataccagcccgcactcgccgcgccgcgccgggccgcccacgccgccgctcttccacctggacttcctgtgctgccagctgcggcccacgcgcgagagcgtgctgcgcctggggccccgcggcgggcagctgcggctctccaccgaatatcaggccgggcccgggcggctgcggctgcgcctagtgagcgccgagggcctgccccggccgcggtcccgccccgggagcggcggcggcggctgctgtgtggtgctgaggctgcggccccgcgtccggccgcgggagcagcagagccgcgtggtcaagtgcagcgccaaccccatcttcaacgaggatttctttttcgacgggctcggccccccggacctggccgcccgcagcctgagagccaaggtgctagacaggggcgcgggacttcgcagggatgtgctgctgggggagtgcgagacgcccctcattgcgctgctgcccccgctgggtgggggactaggtcccgggtcatccctggcgcccacccatctcagcctgtagcctgagcccctggcttcctcaggacgtctccactgtgtctgcagtccacattctttccaccctg

SEQ ID NO: 762 - DNA, 32744 bp, Homo sapiens
  source 1..32744: mol_type = other DNA
agaggcgcggcaggcgcgcggagccagcggagccagctgagcccgagcccagcccgcgcccgcgccgccatgcccctggccttctgcggcagcgagaaccactcggccgcctaccgggtggaccagggggtcctcaacaacggctgctttgtggacgcgctcaacgtggtgccgcacgtcttcctactcttcatcaccttccccatcctcttcattggtgagtgcgcgcagcgagccgcggaggaggggacgggagagcagggagggaggaggaggcgctgcgcgccgcaccgctcggcgtccccttccggcccgcgaccgccgtccgcctcgttcccggggtcccctgccctgtgtcctgcccgccggtccccgcactcgcacaccagctcatcccttcactcccccggtgcccccgatcccgcgccaaacacagcggacgtttgtgacccatgggatcaccaagttttgcttctgcagggccaagagctgggatggggaaaagggaaagaggaggtctcagcacgcagtgggaaactggagaggggtcgggcctcaccctccgtggcgcagcttagggagccgggtcacccctcccgcaaggcagcctccctgtcagccgcagctgggcctagggaagagggaagcctgtgctttggagtctgggatggaggcccagctaacccctatgctttcaccgggctgagccgcgcagtggtccgtgatctctgacagtcccaggcccgcgccctgggcgaggagaggcgagagctagggacttggattcccttcccccgccaccccacccgggcatgtgtctccagagcgcaacttctcaggctctgcgcaaagtagctccgactcgccgacgcagcgaccccggcgcccttgcttgcaaagttgggcgccacggccgggacaatcgtgcgtgcctctccactgaggtcccccccatctctctccaagaccttgactcttccagaccagtcaagtctatcaactcatagggtgtcccctgcatccccaaaacgtgttcattcactttaagaaaacaagcaaatcttaaaattcatatacagctttggggaagaaaggaaagattgtcacaaaattagatttacaagaggttgctgcagaagcagagttgctagttattaacaaagacagttagatagaaatagaaataaaacatacaaaatatgtgctcatatgtgcatcaaaaatcaaaaaagaacagcatttacacttctgttctcagccaaacggtttattaacctgatgacttgtcacacaagaagttagtatgtataatggggtaccttggcagggcacagtggcttacatctgtaatctcagcattttggtgggctgtgacaggaagactgcttgagtccaggagttcgagaccagcctgggcaacatagtgagaccccccccgccctttctacaaaaaattaaaaattagctgagcatggtgatgtgcgcctgtagtcccagctactcaggaggctgaggcgggaggatcacttgagcctaggagatcaaggctgtagtgagccgtgatcgtggcactgcactccagcagaggcaacagagcaagaccctgtctcagtaaaaaggtgtggtgggggaggtaccagcataggaccaggctgaatgagttggacgtttagtttgtgtgtaccagccttggggatcctcatgtgtaggtgtcaccctcaccatggacccaatgcccaagcacctttctggggttcatgcaccctcttcctcctccaagtgggcaggcatcctgcctctgactgtctctccctgcaggatggggaagtcagagctccaaggtgcacatccaccacagcacatggcttcatttccctgggcacaacctgcggtggatcctgaccttcatgctgctcttcgtcctggtgtgtgagattgcagagggcatcctgtctgatgggtgagtgactgtctgaggactcaggaaagtgaatctgctccagggtacttcctgaaaggcccaaggagatcctagctcacctatattccacaagcccatgtcttttgttactacatccagcagctcagtgtcttctatgtgccaacctctctgagctgggcactggacgcaagtgagtcccaggccctgccatcagtccaggagagcagagggaacacggacctgcatgccaagtcccagtgaaataatgctagagcctattagaatgccacaactccagtgaaaaatgtctggcctcttctacaacctgccggagttaccttcttggaaaaaaaaaaaaatctaaccatgccacccactcttgcataagacctttccttggttctcagctgttttgaagatgtggtctcagatcctcagcccaccattcaaggtcttcacagtcagccccacctatctctggcctcattccccatgcccaccttccgtttgggcctcacagcacactcctcacacctctgctacagcacagatcacactgtatgttaaagtttatgtctatttgcaaaactgtcttcagagtcagaaaggcctaagagttagaatctgagtcttgttcatctttgtgttcacagtgcaaggcatgtgataaacataaacattattcagtccataaacatttattgggtccttaggagaatgaatgaaaccatgttacaaataagtactctgggaggtgagaggaaggcagaattgggcaagctccatggttgagagggctttggagcggagtctggaagggtgactaggcttcagacacacagaggaggaaggagagagagaactggtggtgcctgagggaagggaaaaggcaccaaagagaaaagcaggtagggctagggagcagcgcaggggctggagcattaaacacaggctggggagcgatggaggctgaggctgggaacccaggttggggcatctcaggaggactgtgaatcccagcctgcatgtttgggtcggatttggtcagcagtttggaacagaagagagatgtcatcagcataacacttttaggtgggaacctgaggtgttcagcgcaggctggaggcagggagaatctagaggtataatagaagcaggacttagcattgactgcagtagtctaggtgagcaataactgcagacagaaatggtgtgtcagcagtcagggacagaagaggagcgggagcagccatctcactaaggaagaatccagtaaccagcaaggatgagagactgccaggagagggagtggtggaggagagggatatttggcttgagtatctgaggtccagcgccccctgagctggaatcagattatacccagactgcactcctgcagtgctgcctggctcctgtagttggatggcaggggataggctccctcatcctccctcccgttccccaccttcccttccccaatgtccctgcatcctggcttcagcagtgatctctaaaatacctgcttgacttggaggcagcagctctgcctgcttattaaagtccctagaccagcaagaagaccagaaggcatactgctacacaagcacgtgacaagtccgcctccacccccacccctacaccccttccaaagtagcacaaatgccacagtgagccctcagatgggaaatactcaccagatggtgacagagaaagacacctccgcccttggagaaggaagacctgggtcttcagtgagcactgctgctgtgtaccagctatgggactttgcacaagtcattcaggctttctgggcctcataagcatttataaacatacgataaaacattttagttgccaacttaaaaatgtgtgagaaagtataaggtgtttcaaaattatttcaaggagtaaagaggcaagagttttgaagatccctgggcagggtgttggctgttcccagtgtggccattcatgactgctctctggccttatgaaacaagcatcatagtccctggcttgcctgcttcatggggctgtggagggtgaaattcgagcatggacagggtgcagagcccggagtggcagagcactgggtagactgtgtattcccagaatgtgggaaactggaatgaatcggtccagggatgccctcctgctggctgtcagcagcccctcctgtgtgtggctgtactgcttcagctcagtgcaaagggccatctcctccccagggcacagatcagctcaagctgagtaattgtcatctggtctttgtgagctcctacccccaggcctgagtgaggggcaggaaaagagcagacaggagaagtcacagacccttgtgatacctccagtctaatccagcctgggttttcagagctgtctggaaatttagggggcaggtgggagggggctgattaaggcagccctgatttgatttagagtgagcctcatttagtgactaattaagccatcttaaacctgtagggcttcccctcttcctttgggtattatttctttctgtgatgttctgaattcagaacaatcaaaacagtataagttagtgaagaagatattttttaataactacaatattttcccagaccaccatacactggataaagcctgtatataaaactttacctaatttcttaactaattgaatgtgtattatttaacaaagcagctaaaaactattctatgaagccatgtcatgaaatatttagttcaattatggttaatcctcatcttatttcgtcttataaaattttaacatttctacctcctattgcaaaaaaaagcatttatatcagcatataataaaacatgtctagatgtcagcttaaaaatgtgtgagagagtagagggtgtttcaaaattatttcaaggagtaaagaggcaagagttttgaagatccccaggaagggtgttggctgtgcccagtgttgccattcatgactgctctctggccttgtctgtcttgtaccttctatattagtttgaagaccttttttggagaatattcactaaagaatatcaatatctaccatttcattaaaaaagaaatgtggagtttgccttttcaagttggtttgatgcttattgatgttttcagggacccagcctcttcccatctttccataccatcctgtgtgtgtgtgtcagcctatcttccccatggtcacaaggtggctgcctagctccgggtattgcttagcatgagcagagagggcatgctgccgacatgcctctcctttatgacagagatcattctttctttgacatctcactggccagaatacgtggaccaacactggcaaaggagtatggaattgcatggctgcttaaaccaatcaccatccattccctggggctgggtatattgctgctggagcaaacctgtggtcctcctggcacagaataaggggaagatactctttggtggacagcccacattgcctctacacttgcacctcagtcccaccagacccactgaggtcacaggatagctctcctcatgtccttcctccttctctgttgaactcttatgtatccttcaaagtccagcctggtgccacctcctctgggaagctgtccttggttgcccaccccctcctttgtgctctctcagtctctgtccatcggcagtatcacttccctagcctgctgactccaacagttagctctgagcatggcagccccctccataccatcagcttctcaagggcagggacccttggcacactggatagaagtagcctggtgggcaacagcagcactgaggcagcaagctgtagcaggccatctgggaatggagtgggtaccacagggctggagcagaaagggcaggctgggcagatctgataaagtggctggaggccacatagcctgggcctttcgttccaggctgagcagagtgggttttgctgtctgcaggagggagctgtggaagggcatgatcacgaccaactaaggtgaccctcctcaccaggcccagggaagactgaggcctggaaggaggctctggctgcctctgggtcttacccccaggccacagtccacccacttagaggcctctgtgagttaaggtggagagactatgagctggtattgactgctccattccccatcccgagagaggagacaaaatcagtgaccttggaaatgcctcttcgtgcctcagtttcctcaccccataaaatgggagactaagagtacccactcgatggggtttaatgaagattaaatgggttaacatatatcgcatgcttagaacagtgcctggcacagagtaaatgctccataaatactgactctcatcagtttgttatcacagcctctggggagggcgccagtgctgacttatgctgttcgtgttaaatggggctgtcactgggtgagttgtggcatacaggcccctgcactgttcaagagaccccagcaacccttgtgcttagggctcagcacatagtaaggcctccagatcatatacccagctctactccatgtactggcagctctgcccagcccataccccaaatacgcccattaactaaagggccctgcagcctataaagtgatgctataaaggttcagtgttcagcctttgaaattcaaggcctgggctgctctattgcagtacttagcatgtccccatcctgtctgtttctctctcccatctcagggtgaccgaatcccaccatctgcacctgtacatgccagccgggatggcgttcatggctgctgtcacctccgtggtctactatcacaacatcgagacttccaacttccccaagctgctaattggtaggtgaggtgtaggagggaggggcagtaccttcattcatttcttcagataatgtttactgaggactcattatgtgccagctattgctctaaacagtagagatttggaatagaaaaagaaaaaaatccctgccttcatggagcttacagtctggtgaaggaggatagacaggcaaagacagtgaataaacaagcaaacaaataggtggtggggatgctatgaagaaaatcaagctgagtaaggggtaggggcaatgacaatgttgctatctacacaggatggtcagggaagggctgtggtaactgtgggcatgcagatatttgggggaaggtattccctgcaaggggagtgacaagtgcaaagtcctctgatagggatagatttggcaaagatgtcactgtgggcaaagccaaatgagcaaggggaagagtgggaggtgagggcaggcgtcaggagaggagcgagcaagagtcccaggctctgggcctgagagcctgggtgaactgtggcatcaataactgatgtgacagaggagggggaggtgggctgtggtggggataaagttttctactgggggcatatcgagtttgagatgtcacagagacagccaactcaagtgtcaagttgggctttcatggggaggtcaggacaggagctacactttcaggaggtgggccttgtagatgacatctaaagcttgagcctggggctggctgccgtggctcacacctgtaaccccagcactttgggaggccgaggtgggcggatcacccgaggtcaggagtttgagaccagcctgaccaacatggagaaacccccacctctactaaaaatagaaaaattagctgggcatggtggcacgcatcggtggtcccaggtactcaggaggctgaggcagtcaaatctcttgaacccaggaggtggagattgtagtgagctgagatcgcgccactgcagtccagcctgggtgacagagcaagactccatctagaaggaaggaaggaaggaaggaaggagggagggagggaagggagggagggaggagggagggagaagaaagcttgagcctggatgaggtcacctggggagagaagagaaaggctctgggaccagagcttgaggtttgctaacatttagagagactcgggaaggactgcccacttagagcttctgagatgttaaatactgcaggactggggtcccaggcagaagcaacaggatgatggttggtgtttactgagcatgtgccatggggcaggctccatgccatgttccttacattcattgtcccacaggctaattcccccagcctccttattggtattgttaatatccccattttccagtgtggaccctgaaactgagaggttaaaaataataacagtaaatactcactttgtacttactgtatgccaggccccatcctacctatgtgatatattaattcatttaatccttgcaacaactctatgaggtaggtaccattattattttccctttacatatcagaaaactgaggctcagaggttaaataactggcactagtctagctcgtcaaggggcacagccgggagtctagcatctgtgcaatctcctaatcatttctgagactgcgtgtctaagggccctcagacttcgtccttggggtaaaggtatcaatccgcaggtctgcctctgtgttggggttcagcctgtgtgtctaaggctggggctgtacatctggcagttagactttgttcacactatgtccttaagtcagactgatttttaggtatcacagcatcgaattgacatttggagtctggcacactctgtgctaagccagtgacatcatggtgttgtcagggagtacagggtgtttcttgcactagtcacaggtctgcctttctgtagaaggtgggatctgagctccattaggattatccaggtgatccccctacccctagcccaggggcccccacatgagtatgaatgggagctgggggaagcaggttgagaggggagatgttaaatacaggcttcagagagccaccctgcttccatttctgaagtagctccttgtctgtagagaacccttcattaaccagggcctggctgaccagtgtcctctggaaacaccctgtctggacatctgaggagttcattttctcattctccagcaaacacataatgttctctctttaaagcacaagttatcacccgtggatggatttgtccttttctaaggaacaaagactaactccctccattccccttgttggagttatctccccttgaaaggacactccacagagccagaaattctagaacagggaaaagtggaggggacgtgcctgtgaactgcagggacagaaggaaatgggtattgggagaatggccagccctccaaggggctgatgtctggcctgggtatggagtcccacagaaaggggacctgtgatgcagcttacattgtcccgtgagggaaccatgatcctggaacccagatgaggccaaggaaatgttctctgaaaaagtcatatttgagctgagaactgaaggaactaactgggagaagggaggaaagagtgcttcaggcagaggaaacagcatgtgcaaaggccccaaggcagaaggaacaaaacacattagaaaattcagaagaagaagagtggcgtgggtgcaaagtggaggggagctggactttgggttttgtttgcttgtgcccaggctggagtgcagtggcaccaccttgggtcactacaacctccgcttcctgggttcaagcggattcttgtgcctcagcctgctgagtagctgggaatacaggcgtgtaccaccacactcagataattttttgtatttttagaagagttgggatttcaccctgttgaccatgctggtcttgaactcctggccttaagtgatcaggtctcaacttcccaaagtgttgggattacagccgtgagccaccgcacccacctggaaggtcataccacagatgtttgcctttatcccaacagcaatgggaagttgtgtgtgtgtgtgtgtgtgtgtgtgtgtgtgtgtgtgtgtgtggtttaacatgtttaacataaaatttatcatcttaactgtttttaagtatagtgttctgtggcattaagtatattcacagccgggcatggtggctcatgcctgtaatcccagcaccttggcaggccaaggcaggtgaattgcttgagctcagaagttcgagaccagcctggccaacatgccaaaaccccgtctctacaaaaaacataaaaattagctgggcgtggtaatgtacacctgtagttccagctacttgggaggctgaggtgggagtatcatgggaggctgaggagagaggatcagttgagcctggaaagtggaggctacagtgagccaagattgtgccactgcactccagccaagattgtgccactgcactccagcctggacaacagagtgagaccctgtctcaaaaaaagaaaaaaaaagtatattcacagtgctgtgtagccatcaccactatccatctccagaactttttcatcttcccaggttgaaactctgtactcattaaatgataactccccatttctccctccttacagcccctgacgaccaccattctactttctatctatgaatttgagcactctaggtacctcatctaagcggcatcatgcactgtctttttttttttttttttttttgagatggagtcttgctctgttgcccaggttggagtgcagtggtgcaatctcggctcaccgcaacctctgcttctctggttcaagcgattctcctgcctcagcctcctgagtaactgggactataggtacctgccaccacgcctggctaatttttgtatttttagtagagacggggtttcaccatattggctaggctggtctcaaactcctgatcttgtgatctgcccacctcggcctcccaaagtgctcggattacaggcgagagccaccttgcctggcctatttgtctttttatgacttgcttatttcactgagcataatgtcctcaaggttcatccatgttgtagcatgtattgaaatttccttcctttttaaggctaatattctactgtatggatatgccacattttgtttatctattcgtctgtcagtgggttgcttccacctcttgactcttgtaaatagcactgctatgaacatgggtgcattgaggggttttcgacataatcataataattgctttatggagaccagcttggaggagaacaagatggggaggaagtgtggaaaccaatgagaaggctctcagggtatagcgggaatacagaggacgcatgatgatgcctggacttaggtggtaccacagggatggagagaagtagatagagtcaagctatttaggacgtgaaatagacagcatttgttaatgggagaggtgtggggcgagggagaagaatagagggagaaggaggagtaatgggagctcaccagcagcccccatgttatgcctctttccttccttttccctcttctctcatcaggcattcagcttttgctgagtacttctgtgtctgacaacaggctgagcactcagcactgcaggacaggactatgcaaaaaacctctgggcctagtcctgggtgcactgctaattccctgtgtgaccttgcacaagacatccaagctctctgagcctcggattccccacctgggcaggaagagtaagtccctgcctaagtcatagggttgtaatgaagagcaaagcagaccatatctgttaagtgttagggacaagacaagcatgaggcatattttcaagtctcggctcctgtaggcagctctcactaagggctaaagggcttctgatgcctgggatagaatctgtccggcagagtggagtggaggcagggggacagccttcagctgtggaattcctccagtcctagagaccagcctgagctgggggacattattccagtcctgaggcatgagagcagaaggccgatgcttctgccctccatcctaatgtcctcctgcagggacccaaggtggatggcatcgatccccccgggtgagctcagccctgggcgcatggtggggcccaacatctcaacctgtttcctaaccctgagccaggcaggacagatcccagatttgtgcccaagagatgctctggcatccatgcccaggcccacatagggatagagggcagggtgaaagtctctctccctcactcgggtcctctggagaggggctctgtgtcatgaagctgaccttatccgcatctggtctaggagggaggagggaaggagctgccagtgctaaaatctcccccaccctcaaagggggacttcacaggttattgctggttttggttgttggaagctgacagtgatttattggcagattgaagtgagtgtgtgtgcgagaatttaggatagaatctactgatagcttctgaggtttaccttccccaggtcttaaatctggagataataaaaatataacagctaatgtccaaagagcacccgctgcgtgtgaggctcactgcactaaatgctttccatatgtttctcacaagaaccttctaggtagcactattatgattcccacttaatggatgaggaaactaagctctagaaggctaagtgactaatccaaggtcacacagctattatgtcacaggctctgagcccaggtgtatctggctgcggagccaccaccactaacccctgtataacgctgcctcacagaactgtggctggctctttccgtatcccccatgcccctgctccatcatcatgctgtggtgggctctgaactgtgaggacagggatccaggctttcaccctctctctgtccctagctgccagtgcacttgggcaaggtcacatcctatttctgggcctcagtttcctcatctgtaaaatgaaaggctggattgaatgacctttaagatttccctcacttggaaattccacaagtaagtcattatagcatggagcttgcatgcatgggctccagcgtcaggccagcccagctctgccagttaatgggtgtgtggccttggatctgttacctaacctttctgagcctcatttcctttgtctgagaaattgggggtgacggcagtgtactttctttgaaaagttatggtgaggaatagataagatcatgtgtttaaagtgcttacttggcacagtgcctgtaacttagttaaattcaataaataaatttcccattcttcccatgatcatttatttttaagggacatttgtctgaccagtttgatttatgagattattggtgtttttcatgaatgttaagacgtacgtgcgtcatcttagagtcatgtactctgatatattcacacgtgcacatccacttactcggaaatgtacacacccaggcacgcttattctgtctccttctctgccacatacttgcacacattatgtgagtgtacacacatgatgcacacacgtctctgcgatcttccatctctcctcggcagccctgctggtgtattggaccctggccttcatcaccaagaccatcaagtttgtcaagttcttggaccacgccatcggcttctcgcagctacgcttctgcctcacagggctgctggtgatcctctatgggatgctgctcctcgtggaggtcaatgtcatcagggtgagggtaagcaggccacctgggccagggtggggtgggaagcagaggctctggcctctgtcctgccctgggttcaggcccccaccctgcttctcagccaaactgagaagggatcagcttgttttacccgcccgtgtaaaggggagtggggccgtggcggaaatttcaggatagacactgcatctggcccacgtgtgctctaccccagggtcccagagggagaggggggtgatgggtgtgttcgctgaggttggcggatgactttccgtagaaagggaagataagcatcaggcactggcctctcctactttctttcttcgggggtgggggactttgctttaatgtattcatatcgtcacgctggtaaatgaatgagtaagtgttttgttttcctttctgtttgctcccgcctccctctctcttcctcaccccagactccaaccttccccttcccctgcccctacctccccaggcagcccagactaatgaactcgtttgtctttcccatgctttgtttttattagtataataccatatgtgtctgtctaaataaatacctattcaggttttttcctctcaacacaagtgaatatgtaggtttcccccacggtatttatcttgtaagaatgggatcatattatgcagttttctgcactgtgcttttctcacccaacaaatatctcttgggactccctccaagccatctgatatggctaattccgttttcttaatggctgcataatattccatcgtatggatgagccataatgtgttcagctatttctctatggatgggcatttactttgttgccaagttcttgccttcatgaataatggtgtgttgaacatacttatatatttatgtattgctgcttttatttctatgggagagagtccaaggaatggcgttgctgggtcaaagggtctgtgtattttaaattttgatcagtgttacatattgccttccagaaagactgtaatctgccagcaatgagtgagaaaaccctttccctgccttccaaccagcagtgagggctacagccctttcgaacttggactgcctgcatttctctgactcttctgcttttagttggtgatctgcagggcacaaagctccttatgtgtccccccatccagtgaccctcacaggaaccctgtgatgcaagcaccatcccctttatagatgaggaaacattttagatgaggcttgtccaaaaacaccttgctagtaagtggaggaggcaggattcaaaaccaggtctgcatgacttggagttctgtgaactgtatatgaaacatggtggtatccttagatctgtggagaagatagcatatgagagattcctgctcctccccaacccaacctaaacccaacccagcctagccatggggggttcaaagtcgacctcaatgagcagttacaaagtcaggatgccctgacattggtggccaagaagtgttggggaatccttttcctggtaataattacaggcgaaagatggccccatctgttagagatcaagtgtggaatatcacaaccccagatccttgctggggcaaggtagggagtggtgagaagttggacttacccatcccccatggcccatgtgccccacagagatacatcttcttcaagacaccgagggaggtgaagcctcccgaggacctgcaagacctgggggtacgcttcctgcagcccttcgtgaatctgctgtccaaaggcacctactggtggatgaacgccttcatcaagactgcccacaagaagcccatcgacttgcgagccatcgggaagctgcccatcgccatgagggccctcaccaactaccaacggctctgcgaggcctttgacgcccaggtggtcagtgggggcacagccacaccatctattcactgccttctggtttagggtcacagagagggacctcaaagggcattaggtcaaaatcctggtgggacaagaggggaaactgaggctggtgaggggaagaagcttgccttaagtcacacagtgaaccagggacaggtgcagggctgaggattcataggacaggcacagttggaatggcccttaccgtttaggtcgtctagtccaaagtccttatccagatggggaaactgaggctctgagaagggaagtgaccccactggactctcacatccctgtgctctttcctctgcagcttactgactataaaggttggagtgttcacttgatttggagcaggggtgttagtggcctgatccttatggtaactctatgagttgagccagacaggaatctccccatatcactgaggagcaaattgaggccctgagaaaggctgtgacctgcccagagctggccacagctggcaggcggcagaggcagtctcctggctcccagtccagtgctccttcacttcctctgccctcgcaccagggcagttgctgaggcagacacggtggcaggtggtaatgagtgagtgtggcacatggccacctcctcattccagtgctgtgctcatcacatagtccctgaccagctgtgtgaccttgagcaatcatctggccttagtttccccatctagaccatgttggtgttgatagggccctcccaactgtgcacttgctgattccatgatctcttcctggagttcacctatttgcagaggatgtgaccactgggtttccccagacaacaggagctaggggcatcctgggaggctaggcccagccgtgaattagccctcaggcactctgacctggccatggtctctctgggcagcggaaggacattcagggcactcaaggtgcccgggccatctggcaggcactcagccatgccttcgggaggcgcctggtcctcagcagcactttccgcatcttggccgacctgctgggcttcgccgggccactgtgcatctttgggatcgtggaccaccttgggaaggagaacgacgtcttccagcccaaggtaggcagccccaggggtagggtaaggcaccctctagatggttttcagttgtttctgagagtgcaacaggccaatgtgtgtgagccatggccacactggagtggctcctcacacatgcgcaaagcccatagcagtatccccaccacagaatactctacatctggtcaacagaaatgccagagggcgagcctatgccccaagggtatcctactctcctctcaccgtcactaccatagtacctctcccggtagttaggtcagtccgaaaactgcaggaagtgcttttgtttgtccagtgtctagagcttctgtgacttggatttgttggctttcagttcatgtcatcttagtaaactctttaaaagttttcaagatctgtcttcttcagtcctgtaaaggctggcacttgagctttctgcaggggcatcttgggagctactgtcagaggagagagaagtgggaaaccctcacgagtggagctttgtctctccccactccaaatttcattcaaagctgcccgtagttttattaatatgttggacttttccattaaaatttcttttttaagaaaagtttccatggcttaaaaaacactggagacttattagactagattatatccaatggccttggcagttgtaacgattctgcaaactgaaatttgttggagctagaaaacctttccccggggttatttgccctgcgtggggccgtagcatccacttcgggggctgggcagactgtgctctgttgtctgtttccttgcagccgtttaggtttaaatggccacaaaatgaaaactttttcacccctaataagtttcagagttttagtttccaagtgaggatgtcattataacattttaaccacagacagtctgaaaataatgcagagaatggggaattagggtttttaataatttatgacaccctttgcgtaacatttgttcatctcatgagctccaaaatcgcagccagcagttaatcctcaggaggtttatgttcatttttctggagacataattagtcagctgaacagttttggccacagatatgagatacgttgagtctgatttatgcagcaaactttcattgaacactgctgtgtgccaggcctgggttgggctgtgggaatatgaaagcaatagttatgatgaggatgattaacaatattaacagccacttactgaccacataatacatacctggctgtgtgcaggagttatccatgtgttatttaatccctaaaactatcctttggcgtgagtatattttgcaacatctttactgtggtatacctcaaatactgtacagtttatgagatgataggtattcttatccccattttacagatgagaaagttgaggctcagaaagtttaagtaattttccccagggtctctcagctagttaataacagaggcagaatttgaacacaagactcactccacagtctgggcatttacagccaggaagctaaattgactattattatcaagccatcacctctggctccaaggattatgaaatccaacagtgaggagagaaatcaaaataaaatacttttatgctatgtgttacatgtgactcttaggaggaatattcagggaattgtgggaaaagatagtgattaacttagccagtggtcatgaacagcttcatagaggaggggatgtttgaaaggggtcttgacggatgagtaggaatttgccaggctgccatgggaagatttcttgctcaaccaagaatgcaaggaccacttttgcttatttaaactttgatggcttttgaagccatatctggctttttgagcctctctactttacctggcccataaaagagaggggaagcggctgcttctcttgtctacaggagtgtcacctttggctctagcctgaccataggctaccccagaatacccccattggcgatcctgaagcagcatggagccagttgttaatatcagggggaaatggcacaggccagagcccttatcagagtgtccacaccacgctcttcttcctgtgtttcccaaaacccttgtgggattctgctaaggagagagctctgaggcaggacgtgccaaagagatggcgaaagcacttagaattttagttcatctgaacgttatcattgccgtttttttctctttgtttatacacaaaccctggggtttattaccgtctcattggaatgctcttgtcccagttacttagcacacaaatccctgagacagatggccctgcctcagtggcagtgggccttatcagatttaatattttttccctgcagcccaaacacaatcagaaaatttccgacacagaaacaagagttgaaagtaaatatagtctccagtgtccgcaacaaagaactctccatcatgtggttgcctgggatgtggcttaattctcatgtgggcttctgagctcagaaaatgggggaaagggatcatttactgagatcatttggttcatctcccagcccccaagccattctaatccagagagaaccgagtgctattctggtctttatgaatgacaaagaaggaagctccctagctacatgttgcagtgtttcacagtctgggagaggaagccgttttttctgcccagcctgaatccatcctgcagcagttggcacagcgaggcacctgtggtttattcatcatcactcttccttcctaagatactcagagttggcaagaaacatgtcatccttggtatccgcaaggacgaacatttctgatgtcctctttagttactgaaagtgtctgtgacttgccagatctttgatgctcctgtcaccccgctgccactccccagggaaagctgggacccaggttgggctctgcctatgatctatagctctttccagcctcctctccaacccaacccctactcccaatctgtcacctcccatggatgccactgatctggctgaaggacaagagaattagattcataatgagctgctggtgtctgaaacctgccagcactgccctgggctatcagttgagccaaaggaagaaggaacagtctgggtttgatcgaagggctaaagcttcaaacagcctctaagtctcagtaggaaaatgtgtaggtttgggagggtgtatgtgtttccgaatgagttcccctaagaactgcttatggttctatatgtgtgttctgtttgtccctgtgtcttttggtgtgtctttttctgcgtgtgtgtgtgcatgtgtgtgtgtctatgcccccgtttggattgccatatttgtggctatcattatgagtgacttaatgagtgtatatgcattggtgtttctgtgactttgtggttttgatgcatgggctggcctcttcataaccatgtccatgcagctggtctggcctagagtacctgccttcaattcactagctccttcttggccatcaagactctgctcaaatgtcacctgctccagggagccttcacctggttgaattagatgccccttatctgtgctcacataacatcctatcaaagcgccctgtttctttccctgacttgatcctctgtcccctattgcctgacctctgtgtgcccagcactcagcccactgcctgacacccaggagatgcacgggaaatggttctgcaaagaaggaataatgcagcaattactatatattgagtgcttacacttactgttttttcacatgcactgttacattgacttctcataacaactctctgaagtcccttcatagcctcaccttacagatgaggaaactgaagctaagagaggttgaggaacttacctaaggacacagtggctaatatatgatgagtcaggacctctaagtccaggctcttaaccaccgtgtcaaacagtcttgtatgaatgggtaggtgtgttggtctctgggtggccaaagataattttattctttacccagggcctcccggggctgggacctacggacaactcaccttttgacacctgccaaaataggaaacaagagtccaagtgatcccctctcctttaagcaccagagaacatgtgaaggggacctttccaatcatacctctggcctggcagagacaatggggctccaaactgtagagtcgggagtgctgggttttagtcctacctctgcagctaactcatttattctcctcagcagtcacattctgcaagcctcaaatgcaaaatgtgtaataacttctgtagaaagtacatgggggcatgaagatcattggcttgattgcttttaaaaaatcggtattgagcactactggggaaatccctggaaacaaacacaattcttccctgagagcttgtgaaaatgcaagactagggcctatgattttccaaagcattttcttccaccaagtgtcaggttgtaggtccttggtcttttctctcttgccttggtacctgcagggtgctgaccagtgctatcatatcccctccccgtttcctaggaccctcttctcggtagactccaacagggcctgccttccttgggcagcatggcaggcctcttggctagtctagtacccacttcttttttttttttttttttttttggatggagcctcactctgtctcccaggctggagtgcactggcgcaatcttagctcactgcaacctctgcctcctgggttcaagcaattctcctggcccagcctcccaagtagctgggattacaggcatgcatcaccatgtccagctatttttttgtatttttagtagaaacagggtttcagcatgttggccaggctggtctcaaactcccgacctcaggtgatctgcctacttcagcctcccaaaatgctggaattacaggcatgacccaccacgcctagtcaggtacccacttcttaactgaaacttagctattccaggttctatcccttttaaaccaactctttgaagagaggtctaataatgacccaatgacttatagctgcagtgagatttttattttaacaggtcacaaaattctcaatccacaaaagtagatttctgaccctaggttattttgttgggggcggagagaggaagtcaaaggttttgcagcctttagagctgcaaaaccagaatttgttgttttgttaaaaatgcacaaataccgacgagtatatttaagtaacacccatagtctaacgaacaaacatgatcagttggcttttccagccctcattctccagcctgtgtgttttctgctcattgtaacacagcgtgtgtgtggcattccatgtttctccagagctttcatgagaatcagtggtcttggatgcatagtgttcccatgagtaccttaattacctaaccattccctgtggttggaaatttatatgggtttttgcattctccttctgctctgaccccaaaataaatgtctgtgttcatacagctattaccttatgtgaaattattttctttgggataaattctcatgatgtgttgttgctttaaaatagtggactccagtctccagagctgcgtctctgcagaggacagtgggacagaagaatcccagggcatgttaaaaaggaccgggtcttcctaaacccacatgcctatatttctgacccagtaccagccaggggggcaagtttccatcccccacaagtcacaaacctgtaactgacactaggatgcttaaggtcaaaggcctggacgaggcctagacagtgggtctggggtagtgtttttgacatcactcaggttcatgttcacatgttgtccccttaccagcatgtgaccttgggccagccactaaccctactgaaactcctttttttcatgtatgaaatggggctaataatggtaccctcctcattagggtattgtgaggatagagttttgcacctgataaatattgtctcctgccccttcctcccctggaaattcaggtctctccctgcagcctaattttaaggcccatttttctgcttccagcccacccctgcccttctaccttcgacctcctccctctgcctctccctctggtgcactggcaaatgggacagagagcctcggtagggccttcctcttagagtcttgcacgcatccctcagtggtctccctgtggctgcttcctgctgccaccaacagatacagacccctgtcgcacagatcatggtagagacagtggtgagcaggaccagacagctccagggagcagtgagggctggcttagagaacctctgttaaactgagaggccaccatcaggaagctctgatccaagatccaggaatccctgactctagggaaaggcctccaatgagagcctgggccctctctgcctgattctgattgtggatgtgccctcaaactccttctcatcactttgttccatccctctttaccctgcagcagctcccacaccctgccaaacaggatgcacagtccagggcagtgtctgagaaagagcagagatctgtcttcatggaaatattgatgtggctctgctggggagcaatggatttatcaagatcaaagttttcctgggagttattgatgcttaatttggaaatagacacactgttgatccctggtatctttagcaacaaagttaaaatgtttgtttttcttcactggttgccatctgagatcttgccggaagtacacaagagaaccttaaatttaacaggaggccctgggagcccatgaggctggcgggcttgggtctgaaatcttttcagtctcttgtaagtgatgagctctcattctctcctgagagctctacggtgccatgttttccactggccttttctgctcagtaattgctacattacaggctgttggtaagttcggaacaagggagctgctgattccatttctgtagcagagaacatgcaccgtgagacttgttgtaccagttcaggttttaggtgctctatttattcttgccccattcagaatgctctcccctgggtctgtggccacaatgctaagagtcatatttatgggcctgcagttgtaattgggccccattctgttcccccaagtggaaagatgaacagggtgtaagcaaccttccctgtagttagaaaaacgtttagttggatttatcagtctgatttttcactcataaacaattgcacaagcctttgcaagcccagagggtcttgtaataatgatggccgtggtccattatggcacagtgatgtgttctacggtggtcattttgctggcaatgacagtcacctctgaacttctctttccaacagacacaatttctcggggtttactttgtctcatcccaagagttccttgccaatgcctacgtcttagctgtgcttctgttccttgccctcctactgcaaaggacatttctgcaagcatcctactatgtggccattgaaactggaattaacttgagaggagcaatacaggtacttggatgattattttttcactttgccataagaaccattattaggaataatgtccatgagtgttattcatcctcatggacactcaagaataattctgctgtaaatttattttttgttgcccattaacgatgttttaaaacagtaaccattgacaaggcagtgtgggatagtggaaaatatcttgggctgaacttgggagacagtgtagctctggctctggttctgccttggactgggtctgaaaatccagctgctcagcccttggcttgaaagtggtagacgtcactaattgatcacagcactctttctgaccaagggtaaatgcaaccttggaatcctctctaagtggctgttccagagttctgctaccagacagtcttctttgggtgtgaaaaaaggaatgtgcttgacatacaaggtctagatagcctctaagacagggtcccctctaagatggggtattggtccatggcctgttaggaactgagccacacatcaggaggtaagcagtgggagcaagcattactacctgagctctgcctcctgtcagatcagcggctacattagactctcataggagtgcgaaccctattgtgaactgtgcaggcaagggtctaggttgtgtgttccttatgagaatctaatgcctgatgatctgaagtggaacagtttcatcctgaaaccatccctctcccccaggtccatggaaaaattgtcttccacgaaaccagtccctggtgccaaaaaggttgaggaccactgctctaagttctatttgaacccttaagtcttgctcactaatgagagtgacctatttggtctgttgggtcacttaagtctaggctcttggtcctgccttctgtgatttccttcttagagtttctggaaagatgatcaaagccagggagtgttcagggcccctctgaagaaggtgatgatgagagttgtccaagtcccagggtcttcactaggattttggttcagctatcagactagagagacatcctgattgagagtagtttaaatgggatagaagtttgtttattcttcagatagagtcagggctgacacaggagctactcaatgatcagagacctggcttcttctgtcatgttgctctgccagccttcttttgtgacttttgtctccatagccatggtgggtattgaaactgccactatatttacatttaaactagccagaagaagggacaagaggagggaacgcattttccttttaaaatggtaatacctgatttgcacataccctctcgcatcccattggtgagaaagtggccaaatggccgtatctagagagtctagaaagagcttggtctttattcttgacagctatatatgcactgctagaaattctctgtgcaaagaggagaatgggcattgggaataactagatgcagctatgcctagtgatgtccatgaagttgtggtaaaatcctgaagctaccttgttctttggaaatgttcctcagaatcattaacattagtcatgtgggagacaggagaagaagctctgcagaaaagggaccgagaggacaaggatatagcttgggctggggacaatgtcagagtccaaactctggctatcttggaatagtctgtgtgaacggtgccctcccaagttgtgcagtgcacaacctgtgcagctatatatggcaaccctgcccatccccagtggtttctcactgggaaagcagagtatttcctcagggatgtcattatgtgacaatagtggaaaaagcccaggaaaatctaagaccttctaagactcatgggggcccagagctgggaggaaccaagctgttgctcagttcagaaaacttctctagaaatcccagcctctcctcacacccctccagtgacaggcagacttgcaccaccacaagcaacagccacttttgtggttgggcagttttgtaattaaatatactaatgtgtgtatgtcataaattacattttccaattatgccaaaagagccaaaaatggttttttaatggttagcatataatcgtttttatcaaattgcttgaatctttcatgttaataagagagattcattactatgccacaaaaagcaaatactggcattaattatagaaacaaattaggggggtggagcgcaatggctcatgactgtaatcccagcgctttgggaggctgaggcgggtggatcacaaggtcagaagtttgagaccagcctgaccaacatagtgaaaccccatctctactaaaaatacaaaaattagccaggcatgttggcgtgcacctgtagtcccagctactcaggaggctgaggcaggagaatcgcttgaacccagcaggtggaggttgcagtgagctgagatcgtgccactatactccagcttgggcgacagagtgagacttcatctcaaaaaaaaaaaaaaaaaaaaagtggctcatgcctgtaatcccagcactttgggaggccaaggcgggtggatcacaaggtcaggagatcgagaccatcctggctaacatggtgaaaccccgtctctactaaaaatacaaaaaaaaattagccaggcatggtggcgggtgcctgtagtcccagctactcgggaggctgaggcaggagaatggcgtgaacccaggaggaggagcttgcagtgagccgagatggcaccaccgcactccagcctgggcgacacagcaagactctgaaaaaaaaaaaaaggaaagaaagaaggaaaggaaaggaaagaaaggaaaggaaaggaaggaaagaaagaaagaaaggaaagagagagagagaaagaaagaaagaaagaaagaaagaaagaaagaaagaaagaaagaaagaaagaaagaaagaaagagaaagaaagaaagaaaaagaaaagaaaggagttagggagaaaaaaaccctttctttctttcttttggagatttccggaaaatgtacccttacggatgagagcctgtgtcttcatgggttagagaataaccacgctttgtgcataaaaagttattaagcacaattcctgaattatacataattactagctgtcagtcagttgtgcatttctgtgtatgctggtcttcacttaataagactttatttcacagatcacttggtgtccctacttcactgaaactaggtgattatcttttgaagtctcatttcacataacctaggaggtatatagatttctttaaaaatgtcattgccattattttaaaccttacccatggtatatataaacttacagaaagacagaataggttcattattttaaaccttgcccatggtgtatattagctcacagaaagacatagaataggttcctgccttaagaaaacctgacccacaaaaaagcctgggtttacacaaaagaggaattaagggcggggagcccaccttacaacagaatgaataatagaattttatccaagagcaggcatcctgaggacatttaagacccggatgcatttttccttgttcaagagcacacatccaaaaattgcagtctttctgcgagtcatgatcactctgcacataaagcgtttaggttcagagctcggggaggccattaccatggctgctctctgtctgccctgtgagggtccttggggtggctgcactctggggatggtgctggggctgactgactcacgcggtcgtgtaacacatcagaccttccaaagtcgaacccttgttttgtttcaaggctcaattatgacaggacttggtctcagagcagatcccctccctaggctggagaaggccactttaaaacagatggcctgccccacttcatcatttttatggctctgatctgtgttctccactggcctctggtaaatcaagaatacaagtggacatgaagatctgctttaaaaaataaagaacagaccgggtgcggtggctcatgcctgtaatctcagcatttggaggccgaggtggatggatctcctgaggtcaggagtttgagaccagcctggccaacatggcaaaaccccatctctgctaaaaatataaaaattagctgggcatggtaggcacgtgcctataattccagctactccggaggctgaggcatgagaattgcttgaacccggaaggtggaggctgcagtgagctgagatcatgccacttcactccagcctgggaagcagagcgagactctgtctctaaataaataagtaaatgaattaaattaaataaaaataaagaaccaattaagtcctgtctacaggaaaaggccttacttgctggagaagtagcttgctgtgctggagtagactagtaagttggaacggtgatacagtaccaccttacagagctgctctagggcaccatggggactgtctgagaagcccctggcacactgtaacaggtggcatctggtgtggtgatgatgatgagaatgatgatgaatgtgaaacactctgctctcatttctagaccaagatttacaataaaattatgcacctgtccacctccaacctgtccatgggagaaatgactgctggacagatctgtaatctggttgccatcgacaccaatcagctcatgtggtttttcttcttgtgcccaaacctctgggctatgccagtacaggtactagatgggctgaggggaagggaggggggcagcaggacacacaaccagaatctgctggtccatggccagtaactaggagcacaccgtcttccactccatgcttgcctgtacctttcacacacttggctataccacaggctgtacctctgggtccctcctgtcccatactctgcaagcactgaccatctctcttaatgaccagagaaggcagtatcattaagactttaaaaatggagccaactttataaactatagaaaaatcaagccaggttcaggggctcacacctgtaatcccagcactttgggaggctgaggcaggaagattacatgagcacaggagttcaagactggcctgggcaacacagtgagaccccttctatgcagaaaaaaaaaagaagaaagaaaagaaaaatcgtacatggaatgcccacagatcttaaaagctatgttgtagcaaaatatttaattacatcaaaaagtgttagtgatgtatttttaagcaaaaagagtaagttacaaatagtatatgttgtatgcttactactaaactggaatatatgttatgtatacatttgtacagattcacacatgaaaaagaattggaaaatcacatagtgggattataagtgatttttattttctttatgtgtttctaaattctctaataagcgtgtataagatttggaaatcaacaacatgatacttttagcctaggcaacaaagtgagaccctgtctgtacaaaaaattagctggaagtggtggctcacaactatagccccagctactcagaggctgaggtgggaagattacctaaagtccaggaggcagaggttgcagtgagctacaatcacaccactgcactccagcctgggcgatagagtgacaccttgtctcaaaaacaaacaaaacctggtgttttttagccagatgtggtggtgcgcccctttagtcccagctacctgggagtctgagatggaaggattgcttgaccccaggagttcaaggctgcagtgagcaatgatcacgcccctgcacttcagcctggacaacagagagactcctgtctcttaaaaaataaaaataaaaacgttaaaacatggtatttttttaaagcaagacaacctttggtgctggctcaggaagaggtacattaccccccaataatcagaggagaatcgtcagcatgattgatctgacctcgggcttcatgtgtcccatctcccacccggagctcttccaccacagagtctgatcctgtcctatgcctgggactaaatcttcaccctggtgttcaggccagaaaccgaaatcccagacccattcccagagggcgggaaggttccaccgggagagcttgatgtagcagaaagtgacttgggtgagacaggctgattcaaatacttaacctctctgagccttggtttctttatctatgaaatggggaggctgcccaccctctggagttgctatggcaattcagttagataatgtaagtaacacagcaggcagagtggcccccagagtcttcacttcgtaaatatcagatccctctaccttgcacatgtttggtatgagtgaggtgttaccaatccagaatccattgcttcttgggataaagattccataaaccttcatctccagtgatttgtattggtcctccttacttgtaaagcttagagtttaaaaatattaaaagaaaaaaaggggagaggctcccacagggacacagctagacaagatgagatgcagggaatctgatgttcttttttatgggaacagtcatatatgccatcccccattaccacctacccatgcccagactgcccccgctccattctgccaagacagatcaatgactataaaagctacaaaagggcctggagatctcatctagtttagttaccaaccaaccttttatgcacaagactttctaagctgggtgtggtggctcatgcctgtagtctcagccactcaaaaggctgaggtaggaggatggcttgagcccaagagttcgagtccagcctgggcaacatagagagacctcatctctaacacaattttttttttgaaacatgaaaaatgaagatttctgaccatgcttctctcattagttaacactttgggctgtgagggtctgatgcagagagacacagcctgggaggatcctaacatgtacacagcattcaaaaggctacaagacactttctgttgtgtccccttgaacaagcagtttgtaagattttgttggccaggcatggtggctcgctcctgtaatcccagcactttgggaggctgaggctgatggttcacctgaggtcaggagttcgagaccagcctgaccaatatggtgaaaccccgtctctactaaaaatacaaaaattagccgggcatgatggcgtgtgcctgtagtctcagctactccggaggctgagacaggagaattgcttgagcccaggaggcggagactgtggtgagctgagatcgtgtcactgcgttccagcctgggtaacagagcgagactcggtctaaaaaaaaaaaaaaaaaagaaatcaggttttgtctactaaacctgctgcacggttaccgttactagtactcacagggtttgttgcacatgcatcgttgctaatagtgctaactaatattaacagcccttgccctatgcctggccctgtcccagcccccctcccttgtataatttaacccttgcactgggggtagagattttcatatctactgatttcttacctttgctcatttatcatggagtgtcctttggttttctgtgtttgtatatacctttaccacttatagatttgaccagcactcaagaaccagtgttactcctgggagttaatacaatcccagccccatggcaaagaaactcatgtggttaggattctgtgtgcagcctggttagccacagggcacgtaaggctttttataatattgacatgagtgcagaagccccattcccgtgtaagccctgagggctcttgtttcataatctttttttggtcacatgcacacagctttattgagatataacccactcatttaaagcatacaaatcagtgggttttagtgtcctatattcacagagctgtgcagccatcatcacaaatgtggaagttttcatttccccaaaaagaaacccgtacccattggcagtcactcctcatcttcgcccccagcccttggccaccgtttatctacacatacttttgaaaggctagtgaaactttctcagaaaaataaatgcttgctcaaacatttgggctataatttcaggggcttcatgggtgcccccctgacatttatcaagaacaccaggttaaggaatttagctataatggaggcctctgtgtttcccagtctcctgggtatcagaggcccagagagggcaggtgccttaccctgggccacgcagtgaaccagtggcagcaccatactcacacatctcctttctgcggttccccagtgacagagttctcaggaagctttttcatttattttctgagaggagggtaggccatcttgtattgatctccaactatatgccagccacaattctaggtgcttatcataaaggttcatttaatcttcacaatagtcctgcagagtggacagagtccttcagagtgggcattataatcaccattttaaagatggagaagctgaaaaccagagaggttaagtaactcacccaagactgcacagcaaaaggctggggctttgaaactcagggccacagactccaaagactatgtcctccccactatgctagatttttttcctaacctgtgaataggagacaaaatagtccttttatttctcacagttgctttgcacactcagaatccatgatttcttctgcatgagggccattcagacctgtgcagaagagagtaatggaccaaggagtcttgggagcacctaggaggaggggatgggggagcatgaggaggagccagggaacagcagcagctgcagcaccagctcccaccccagcctctgccagtctcttggaggtggtgtgggtgcagacaccggctcacaaggtgccctgttagtgagcttggggtgccatgggagccttcttgttgtcaggcccaacccaagctggctgaagaacaccctgatggcctccatttgagcacaactaatgaaggactggatgccagagataagtccaggagggtgatgctgcagggcaggccagggaagagggtacttcatctctatcatggtcctctgcccatccatgccagcatctaacacctgttaaacactgggaggcaggtggtgaaggggccacttcccagcctctaagatacctcctaagccaggaggcattctgtgattaaattacagggcctcccacttactcctttatccttgaggcggtgc

SEQ ID NO: 763 - DNA, 9758 bp, Homo sapiens
  source 1..9758: mol_type = other DNA
gatgagcatgtgttgaatcctcaagagaggagggaggaagcaagaaggaaagcttgaagggaggaggggaggggggcaggtgctgatttcagccctgtagcgtcaggattgcgtcaattcgggttccagccacgtctggagtctcggagacgagcttctcagaagagccaaaacaggaaccgaggtggcaaatcactgtgcgagggcgagtggacctccctctttgcctcctccctgttccaggagctggtgccctgggctctgcgctgttgttttcagcgctccgaaagccggcgcttgagatccaggcaagtgaatccagccaggcagttttcccttcagcacctcggacagaacacgcagtaaaaaatggctccgatcaccaccagccgggaagaatttggtaagcaagttactgaacttatgactgcggttattccttgaatactctggggtggactgtttattcatttattttttgcccggttgttgaatacagatttcctaggtagttaatttaaaaggaaaatgagaatggcagtcaggcaattgtggcttatttctgcagcttctctcccttccttggtatctctctccctgaaactgtcttctgttagggagaatttaccttcaggaagttcttaaattttcaggtacttctgtaaattgcagcatgtactgagtaaagaaaaaggggtctgtttttcccatgttggtttcatctattttgtaggtgattcttatttgtaggtaaatctatattttattaggagaagataaatatatctctggttacattggggtttgatcttggttaaaaaaagcaacttgtctattggggtttggcaatgtatattttattacagggcgtaccatatgggtgtttttctctgctatgtttttcttgtatccttgaaatatgttgctagtgaaagacagaatcatatggtagcagggttaaagagagtttcaaaatgaactggctcagcccatttcatttcactgctgagctaaccaaagcccagagagatgagggaagtattataggttgcacaattagctaaaagctgctggaaacttgaattagggctccaattttcccgttcagttttccttttctcacaccaagtttttggtttcagtacataaaattagacgtacttcatagagtaaaaaagtactatttttagatctcagtatattccaaaggaaaaaggtcagaattttacttacacgtattttttaaatcatgaaatttcatagaaggttgtgaagaggagtgatatctacagatgtgtgataattgttattaagctgagtaaaataactatgatcttgactttcaagattgtaagaccttatcagtagagaatacatagggagtagataagtgtttccacgttatagaaaatgtttgccatttgacataactattcaatagggacaatttgtgatattatgttcataaatgaatttctttcccagccttccatttgggttattgggtttattttggtatgacatttattcccaattcttcatttgaaacctgaatgattttctaatatggaggaatttttagagactgtgccagtgaaaatatgttctagcatggactatcagtctacttttaaaaaatgattttctactgtttttattgtttttacattggctaaagaactctctcagttcatgactttgcttttgctccctggccttgggttattatggtccaggaatgtgggtgcatttttttttcacaaagacttgaatagaaggaaaaactgaaaagctgataccaagtttagctgattatctttagctcttgctttatactgtagtagtcactgtttcttttttccacctggagaagtcaaaggtttatttcatctttacatgattcagtttctgtacattaaaatacaggatttttattgcgattttattggcctttttatcttctatttcatttgtcttttcttaaccttacattctctgagttcagttttataattgtgaagtagattggcagaagatttggggggatggggaagggaagtaacaaaagactggatttcttgtggttatttagaaaagttttaaccctttctgggctggaacttataactttattatttactattcaggataaaagcatattgcaatggaactaaatgtatataatattacattagttattttcactttgatgatattaagcattgactctatggattcactatgtatagatgtagtaatactgcttttacttccatagtgttactaaccatttgttcaagaaagatgcttacatataaaataggataagccttatgcataattgatattacctaatgtcagtaatttaatgtgccatcattcaagaaaataatgacaatttcagtttgattatcatttgccatgccatgtgctagaggaagagacagttatagataaaattgaactctaaatctcactgttctcattacatgttaaagaatgctgattcacttataaccattgttctgtttttatcttatttaagtttaattaatttatactttgtataattcagtgtttgactgagaaatttgggattgtcatacaaagggatgatagtgttataagttacaaaatatcggtaccttgttgctcttctgtttttgttttactttctctaatatatgtatatttcttttaccactgttccataattgggatgaaaattattaatgagtttgtggcaatggcaaatatcatttcacaatcaatttcctacaattgagtgaaccactgagtccctaaatgtttgctgcttgaattctgagtaaagaactacttagaattccagtaaaaagtgatgctctggaaagcctcaaaatgacaataaaaaataatgaagttagtactgatccatcatattgtagctgtctcatgttatctgagaaaacaaagataggtcagagtcattaagcattcccccatatctgattcaggaccattttcatctttttatttcattaatgaaaaaccactgaaatgaaggaatttctagcacactttatgtttttcctgtggggatgtatttgtacccgaagttagtgtgaaatatacacttaactcatacccagaacagttggaaagtaattcaatctatccaacctatagcaattgctagctctattaggcttttcaaaaggctcatatctccagctctgcttctttaatgtatattattggtcatttgatttttcagatgaaatccccacagtggtggggatcttcagtgcatttggcctggtcttcacagtctctctctttgcatggatctgctgtcagagaaaatcatccaagtctaacaagactcctccatacaagtttgtgcatgtgcttaagggagttgatatttaccctgaaaacctaaatagcaaaaagaagtttggagcagatgataaaaatgaagtaaagaataagccagctgtgccaaagaattcattgcatctggatcttgaaaagagagatctcaatggcaattttcccaaaaccaacctcaaacctggcagtccttctgatctggagaatgcaaccccgaagctctttttagaaggggaaaaagagtcagtttcccctgagagtttaaagtccagcacttcccttacttcagaagagaaacaagagaagctgggaactctcttcttctccttagaatacaacttcgagagaaaagcatttgtggtcaatatcaaggaagcccgtggcttgccagccatggatgagcagtcgatgacctctgacccatatatcaaaatgacgatcctcccagagaagaagcataaagtgaaaactagagtgctgagaaaaaccttggatccagcttttgatgagacctttacattctatgggataccctacacccaaatccaagaattggccttgcacttcacaattttgagttttgacaggttttcaagagatgatatcattggggaagttctaattcctctctcgggaattgaattatctgaaggaaaaatgttaatgaatagagagatcatcaagagaaatgttagggtaatttattttcagtgcttaaagtatttataaacaatcttttatgtagcattttggtgtctaaggaatttttattaatatgataagcttgtacatatcatccttaccatgtttaattattattaattataatctaatggagatcaagggaatagaacagatgaaataaaatttaatccataactgaaatactcaaagtgttttaatgatgtaaaataaataggcattctttatggatatttagatatcacctatataaatacttttgttaatctctatcataaatattttgacagacactgctactttaaaatacaggtgaatatttcttattcataagcaagttaacaaagagatttcaaggtcaacataattgaatttaaaattgaaatttaaaattaaatcaattcttcctgaagatttggaaattgtattgactttccatggaattgcctttcaaggaagaggcatcacgtcattttcaattataaatgctcatctctaaattgtatagtaggaaatgagtcccgctatttttgtagttacactactctggtagttctgggtttattagaaaatagtaagacatcaatgaaacaaatttaaccccattttcactttaaatttgaaactcgatttcaacagtggtatatcagaataacttctctctataatacaatgatttataaaaatcaatagacatactaatttgtgttttttaaacaacatagtgtttcagagctgaaaacctgagagctcattttgactgtctcctctcctattgaaattaatgacggtcaaggttcagatacattccacagcttgtttgagacacccggctggttaagtgatacagtgggaataaggatctttcttctactcttattctccttagagtgcctacttatacagctgtcccatattagtttttgtataaatatattgcagttttagttttgtgtcagccatcactctcagttgcaaacaaacaccaagttaatatattgttactttcagtcaaaacttttactttgaattattgtatatcttatctattgtctttaaagtacaaatgaaatctaagtagcacgcaaagaaggacgctatgacactgtccaaaaacaatgctctccaatgcttaagatcaattcattccttggcttaaatggaaacttgctgttgtgaaagaggcagagaattttaactccattatccctctgggccaggaatgtagttgggatcagaataattctcactgggtctgagttcaaatttcaatatgtcggtgctaaagaatttgaaatcaaatcaaacttatctaattttttgcatgagtatgtgtagtcatttgacccaacacatactcatgcaaagaattagataagctttattactattaataactttgaaaagtagagatgttattaaaaaccaaaagccaaaaataatcctgtgtaggatataatttaaatatcctttaaacatttctaagtaatgggtgtggccaatttattgccaattttaacttcctgtagtaccaaacaagaccacaagatggcaggcagtggtttttcaagcagcgatggtactgctcaaaagcttttagttactcttcaattccttagaatattaaaataaaaataagtaagattatatttaaatgacgatgttatttaaactttaatgaaagtacacacttcaaagttaaaaagatagaaatacttatatcacatttctctttctgcagaagtcttcaggacggggtgagttactgatctctctctgctatcagtccaccacaaacactctaactgtggttgtcttaaaagctcgacatctgcctaaatctgatgtgtccggactttcaggtaagaatgcttctgaaatattcagattcactgtatgattggaatgtatttgactgcaaatgagcccacctactcttactcttctatcttttctctaataccttatgtatctgctataaaagttagcttttagttttatgactagctttacaaaaaatgaaacaaaacgccaattttatgttgtatagcacaatgagaaacaaaataagctacagtttaaaattacctgagttcaaatcctaacccttccattcactagcaaaatatgattgggtatgtttcttaaactgtacaaactggacataatgctactcatcctgaggggccttgtgagaactagaaatacatacttcttcagatatcatctaataatattattattatttaatgatgggagttgaaaacatggtcttaaaagattagattgtgaagctaaaattaactcatatggtgccaccagaaaaaggcaaaagtaattgtgataaagtagcatgaacttaaaatctacatactaacaatgacacagagaagctcaacactaggaaacagaaagcaaatccagcctgtgactaaagaaattcataaaagttaaaactaaaaagaatattgccattgtggactctaaatcctcattcgatggaaaacacagccaaaagtcagggaaatagactcacccaaagtcatacaagtcagtaaagctacatgttgtctaatatatttttttccttctatcctattctctggagtaagttaatagtaatcagaatgggtccatagaacattctattttctttccttttgtgttacttcttttcctatcattaattttttcccttattctctaatttagaacttttttctcttattttccatattcttccttattttcaattctgttgacaagagaaatgccaagttttatccatatttttctgttgttttgacttattttcctggtaaccacatgtcattggcatgccatgatctctaagggcactgttatcttgatatcagctctccagcccagttatgccattgtaatgcctgttatgttccactgcagatccctatgtcaaagtgaacctgtaccatgccaaaaagagaatctccaagaagaagactcatgtgaagaaatgcacccccaatgcagtgttcaatgagctgtttgtctttgatattccttgtgagggccttgaagatataagtgttgaatttttggttttggattctgaaagggggtcccgaaatgaggtaatcgggcagttagtcttgggtgcagcagcagaaggaactggtggagagcactggaaagagatctgtgactaccccaggagacaaattgccaagtggcacgtgctctgtgatggttagcatcctagccgtgagttggaacttaaaggtttttactaggcaaggagaaattttctttctttctatattggattgcaagcttgggaaatcaagctacctttttgttgttgttgttgttgctagaaatggattgaattagtagaccagaaagtaacttcaaatgtgtattatgataatttccctatttattagaagagttggataaattttcataagatattcaatatctccttcagattaccagtgatataactaggaatagtcagacattttatgaatactgtgccagaatcccaaattataaatgtgacaatctcattggaacatgtcacaaaaagttaatgtgattaagatttaaaaacgaaaagtatgccttgccttgtgaaaatttatccatttatcttcaggttggggaaatcaatttttctttaaatccaaagatactaaaaaaatgtcctccagtttgtatttattaattctgtcatgtgcaaatggttgtcctgcatataaaagtatctggtcatttcagtttggtttgtaattatttgatgcaattttatcataagagtaactcagattcatttcaaaaggacagtgaacaagctgagaaattattttatcaaagggctgagttgagaacactgtggctgaaatataatttttctcccccctaaggttacatgtgagtcaaaattttgtaaaatataacctcacataagaaccatggccttggattattcactgcctgtcacaagcctcagtgtggcctgagaaatccctatgtacctttgtgaaattgttgaattagttagtgaataaagaaataaacttcaactagaaatccagttagaagtgcaattttcttataggaaataggtatagtgtgcaagtgtacttttaaggccatcgtttgtacccagagtcggcatggccacctaagtcttcatttaatttattgtcccccagaaaagattaagatgctacttgaaaagactgtgaagattttttacattgccagataaaaagtgttacttaaccaacaaacaaatgtaagactacaaaatcgttcaagagcaattctaatataatttacatatgttcacgcaaaatatgcttaggctgtcaaattagcacaacaaagaatgtgtttcactatcttttctaggctaatttgtcttgagctgttgtctatagagcagtttacagacttgtgtcttgtatcattttccagtgccagggttctgaaattcattcagaacctgttagattaaagctgcaccctgtgattatttgaaaagaattagcttgagagtaatgtcactatatttgagttcttagagaagtatgagtggaacttgagtacagttgaattattaaatatgcaagttagaaattaagtctactgaaaaatttacattttgagtcaggttttgtgtcagtactttagcagtttttgagaatgtgtttgatatcacagtgtttgtaaattctatgaaaaatgcattttccaaacaacttatacatgctttttatgactatgcctaatgtaaagaaaatgtattacattctgtatgtacaaagattaaaaatcaacctcttttttgtgctttaaaatgactttgggattaaaaaagcatatttcccaatcattgtcttcattccactacaaagtcacctcacagcatcttgctccactcggcatctctgtgaaagcaacatgaaatgaactgtagtaggtgtgtagtttggggaagtcaaatggccattttatgtatgtgcatttggtatcatgggccgtggaacagaatatatgttggacctctgaaaagttgtaaggggccaattctaagtattcttcacggcagccagaagttaatggtggtagcagctgaggtatggttgttggacgaggccgatttttttttttttaacatggaacaatgaaaccaacaacaaacatttttaaaattaaaatggataatttgtaaatagtttttagcttttaaaatttaaagtgtttttgagtgtgaaaagttgagtaaaactatttgcaactggttttcagaaaagagaaaagaaacaacaaaggaattgaaacaggcagggagatcttaatacctaatttcatcatttctgaaaatgtactgttttagaatgtattacaatatcaatgtgaatatcttgaatcctgttacaaatcctgcactgtattaaacatgtaaattaattgtttgtctgattagccaatctcaccacccaaatggggaggtatacatgtttgaagaactgtgtaactcagtaattgatttgttctgatgttgtaactcaatagaagtgttttggaaggaagcatggtgtgtgagacagtgtctgttcttttgtgccagctctgtatgatgtttgtaagaccatgtttgtaagacatgaataaattgctgcttttgccca

SEQ ID NO: 764 - DNA, 20160 bp, Homo sapiens
  source 1..20160: mol_type = other DNA
cgggatcgcgctgatgtggccccaaccccgcctccctccccgccccgcgatgtcggaagaaacccgacagagcaaattggccgcagcgaagaaaaaggtaaagtgcaccgggtcgcggccccccgacccagccccagccccactccgatggcaggaccatggccagagtctctgccactcctgaggcacaccgggctgggctccccacggcgcgtccgggctccctccaccaaagtcttgtcagccagccccgccccctcagccgcccagcccccgccctcgccagtcgcccccgggtgactttgggctggtgctcccggggctccccgctccagactcggccctcacctcctgccccccgaagtccgacctccctgggctctttgggctggcgtctccaaggacctaggaccccagcaattcagcccctgccctcgccagtgactttgggcccgtgactcccggggccccccgctccagactcgaccctcacctcctgccgccccaaaccggacctcccggggttctttggtctcgggtctccaaggacctgggtcctggccctgcggtcccctcccccatcgcggagcggcgacttggacgtcgcgctgatgttccccctaggagtggaatgtagtgacgtcacaatccccctcggaaccgtaattagttgcgcgagaccagtctttgatcttaggacccagtcccctaagtgttctcatcccgcttctggttcctctggtcacagcataaatttccagctggaaggggattggggactatgggacctaggagggagaggtttcaggctgccttacacccttaacatagacattgacagtgtgaaaagcctacacttcacccgtgaactgaaaacattggcagtatctctgggtggcaatgtgagaacgggattggtttggttttcccccaggcttctactctccagagagactttaacatttttttctgacttctccacctcatattcgaattctccatggttctgggaccagagtgcccttcagtggtctctggaatgagatctgcttatcttctgtggaacaggtcttgggaaactgaacttgacagcttgaatcttcctcatatcatctcaacctggggtacttggagtgccacaggataaatacggggcatctttctgaagcatcagtctccctttattctcttgagagagaaaaaacattaatgtacttagggatgacagtcacataaatttctaagagtataccagacttttctctgaaatgaggcttgggttgtcctctttctgttaaattcccaggttcaacagaaaggctgccttctgccatgtggatacattgatgtaaaagtttgagaggcattggtgcatttcttaacattaccaaacgtgtgaggatgtatgactctaaaccacacagtgtacagttcctgccgacttaatgttccggcccacattttaagatacatatttatttttagagagggggtgtcactgtgttgcccagtctgaccttgaactcctggccttaagtaatcctcctgccttagcctcccaggtagctgggactccaggcttgacttctccacctcatatttgaattctccttggtggagtggaatgtagtgatgtcgcagtccccctcggaaccgtaattagtgcgtgaaaccagcttttgatcttaggacccaatccctaagtgttctcatcccgtttctgggatgagaggtggaaaagtacctctgcctctggttttggcccctggcagctgctgatttgtggcaaaaccccagagcttggagtcagaagactgagtttaagttcaattcttgccttttttaagccatggtatcaatccctctcagtcactaagtgattgtgacaagaacttgtggagttgttagtggcattaaatcagatggtatataagagtattttggaaaaattgtaaagtaggatgtaactgtgggggcttgtagatctcatgaatattattgctcttcttttccacagttgagagaatatcagcagaggaatagccctggtgttcctacaggagcgaaaaagaagaagaaaataaaaaatggcagtaaccctgagacaaccacttctggtggttgccactcacctgaggatgtgagtcttggatggccaggctcctggggacagggggcccaaggggcagtagagggtaattgttatgattgtggaagaactgttgggtactgattaagagttctgggtttgtatcctacctgtccatctgctagggatgtgatttagggcaaattgcttgagctttttgggcctctcttttcacaactataaagtattgttttacttacacttgtgaagtttaaatgagatttgttattgttgtttttatgttaatccctagtacagggcctgctgtcctaaacacccaggacacccaggaaatggtagttgctgtttcattttcctcatctccagtctcaaagggaagccaggccaatgagaacagctacttgccatcaggctatccctttaggagtcactgaaagggccccagggtgtggtgaggagagtcccaggtgctaggattaggggaagatctaacttttgagttcatctttgccaccagcttgctgcgtgaccacagaaaaaccacttcttcccctgggcctcagtttcctcctctgtgaggtgacattggatatgatcagtgtctttcaaacttgttttttagctggagccccctttgttcaagtgaacccttactcagaagtctggtttttaaaatggaggtggaggtttgtagttctactagattcattgcccacatcctgggcctaaggagaagggtccaaacaggatattaagagctgcattggtcaggtgactccactctgtgtgactgcatcgttcaggggacttttccatctatttgtttctgcccctggcaaggcagcaggtggccatttggaaggatggcacaggccatggtattgatctcctccactcttcttatttcatttccctgaacccacatcttcctccttccctgactttcttgcctctctctaagccacttctacctttctccccctgcccttgtttttcccttttcgcctcctgtagattcaggacattctgaaggtgctggtgtccgaccttaaccgttccaatggggtagcgctccccccattggacaagtggaaggtgaggcagtgccgagacccctctctggcttgctctctccagctgtgcatgcccctgaggcttctctggtttgggggatactttgcctctggcttattttatgttgctgccattaaccttccgcctgtttatgtccgcttcttcacctgcttgattgattgggtttttattcttcccccaaatcttttatcatcttggagaaggtgagacatatcttaaagtttaaaagtttaaaggtaatttgggaataacttttagagcaggtgtgtgggatttggggcttttttttttcttctttttttttcagagacggagtctcactgcccaggctggagtgcagtggcacaatcttggctcactgcaacctctgcctcctgggttcaagtgtttctcctgcctcagcctcctgagtagctgggattacaggtgcctgccaccatgtctggctcatttttgtatttttagtagagatggggtttcaccatgttggccaggctggtcttgaactcctgacctcaagtggtccacccaccttggcctcccaaagtgctgggattacaggcgtgagccactgctcccagtctgggattctgggatttgggcttttgaatgcccagtgtgggtactctcagactaggagagatgaaaaaaaaaaaacacaaaaaaaccaacagacctttaggttttaccctaaaggcaaagatcagtaaaccacctagaagttagtgttttttttttttttttaaattaattcactttggtttaagagtagggaacaaagggttaaaagaaaatgagttcacattatagttggaaggattgaagctattttttcagaggaactaactgtaaaagttgtgaggttaaccaaacagatgagtgaccaagacgttctgcccctaatctctccaaatggacatttagccatattcattgggctcttgacaacaaaggcactttgataaataaacagtggataaaatagatgaacaaggtaggctgcacaccgagggaggcagactcctctgaaggaggcaagagagaattttggaacattccaaatgctcagctcggggggaggttggttccaaatggactccaggctggagaaggtggcatttgaagctggcttgaagattaaaggtgggtaacattaatccatatggggagtgggggaggcagggggagcggtgaggccgtggccagagtgtgaactcacagagcacctttcaggaacacagggagcctggtggggggcagggcatggaggtacacagggctgggagacaacctcctctggctgtgatttggcatttcttccatctctaactcacctgggggactccttcctgccaagccagaggagcagggcacgaatagagcctgatcctgttggagatgggtatggggagagggactgagacagagcagccttggctgctgttagagagttgtccagtctcatacctgttaccctccagttgatcaggtctgtccaggtgctgtgactcaccttgccagctcagaggagacgctgagtggtacggctggggagcacaggcttagaggtgacctgcagccaaaagcatttggcttttgctctgccaatggtccagtggattagggggtcttcagcctgtttcctaatgctctgagattctgtgccagcccaggtccctctattctggaaacaaaggcctagatccccgtatttccttcttgctgttttgtttttgtttttgagaaagagtcttgctctttctcctggagtgcagtggtgtgatcttggctcactgcaacctccccctcccgggttcaagtgattttcatgcctcagcctcccaagtagctgggattacagatgttgcaccatcacgcccggccattttttttgtatttttaatagagatggggtcttgccatgttgctcaggctggtttcgaactcctggcctcaagtgattcacctgccttggcctcccaaagtgctgagattacatgtgtgagccaccatgcccagccccttgctgtttttataccttctctatatccgtaactgtttccaatgtaggttttgtttttttttaatttctcatttttattaccatgtaagttttctactccaggaatgcaggcctgtgatcgtagtatcctgagcggagctgataacatttccagaagtagggaataatggagagagaaaaaatatcttaatgggatgggacattttgaggagagtaggcttttttaaaaactccatcttggctacaagacttaaaataatgaaataacttggttgctcacaaaataatcatgctatgtgtgtcagaaagtcctcagaaaaatgctttttcagccaagtgcagtagctcatgcctgtaatcccagcactttgggagactgaggagggtggatcacctgaggtcaggagttcgagagcagcctggccaacatggtgaaaccccatctctactaaaaatacaaaaattagctgggcgtggtagcgtgcacctataatcccagctgcttgggaggctgaagcaggagaatctcgaactcaggaggcggaggttgcagtgagtggagatctcgccactacactccagcctgggcgacagagtgagactcccatctcaaaaaaaaaaaaaaaaaaaaattcccttcctctgagcattcttgtgtctaatcctagagatcagtgggaaccgaagatgccaggagggccctaaagcctagcagggtccattgctaggagtgccagccttccctcaaggctaatgcctggccagcaactgaacccttgctctgacctattagattcagttgtaggcattgtcaaggaaacaccaggttccatggtcacagtaaacttgcaaagatgcaaaggcagcttggctcatcttcagttccaccagcctctgcagcacttgctctaaggagggaagcagatttgggttttcagaagccagggctgaagggtccagtgagcgcgcagtcctttccctggagagaggtgtagtcacttctcccagacccagcttccgtggccaggccctggctccctggtgtttttctcttgtccagcttagctggtcagccagctttttccactgtctgcccatctggcttgtcagatattagaagatctctagaaccagaggcttgggcgaagagtaaggtcagagcctggagagaggctgggtggggctctgatcaagcaggtaggtccagttgggggcaagggagaggctccacatgaccccaagttctgaatcctaggattgtcctcaggtactattcccaggaaagaggccctacaacttccaagttgccaagagccacagggaagatgtcttacctctgttttcttgggtggtttcttggctgggtagatgtttttggaggtaagaggtcggggtgggggtgttggccatggtttatcctctttttacctccagagagttggagagagtcttctagttgggcagctttttttttttccccctgaaaaggcctgaatcagaaacacagccagtaggccaagtgcaatggctcacacctgtaatctcaacattttgggagaccaaggtggatcacttgagcccaggactttgagaccagcctgggcaagatggcaagaccatgtttctatagaaattagctgagcatggtagtgtgcacctataatctcagctactagggaggctgaggtgggagcattgcttgagcccaggaggtggaagctgcagtgaactatgattgtgccactgcaggggagaagggaagggaggaaaggaggagacaggcagatagctacattgtgcattgcccagacaactacttcctcatcaccatcctctgcccagtaggggcccagtgagggtcactctgcagcacagactggccttctggaagaacagtgcctttctcctccctgactttggcacaccttcctcctgcctgctgtggctgccacaggtcagagcctgctgctgtcttttgctgagctccagggagagcgaggtcctcgtgttcatgaaggaggccgtgcagcccctgctttgagctttggccatctgaaatgctgcctagcagcccaaggcctgggcaaccaatccacacccctgagtggctcctagcatgtgtgactgtcactctgactgcagcaacacctgtcctacctgttccacacccttgtgttcatagtactgaggcacctctcccgcatggccccctaaccccctgctctgttctgtgacagacacccaaggacaatgctgctactctacaaccatctgatgacaccgtgttacctggcggtgtcccttcccctggtgccagtctcactagcatggcggcatctcaggttcgtgcctcctccccctctgcccactgccctcctgtacctattatgcattatcttctcctttcacaggcagcttgttccctagggtcaagggcccttcctggggaccgggccgggggaaggctcagactgggcttttttccttgaggcctggggagattgaagattgttagaatgagtttgggagcttgactcaccccatcctgggtgattcttaccagaaattgaatgaccatctcacacgtttcttcccaaacagaatcatgatgctgacaatgtccctaatctcatggatgaaaccaagtgagtgtctcctgttggggcagcagtctctaggctgagagagtcagggaggccactgcccatgaccttctttcccattgagccacctgcacccctgacccctgtgtctccatccctaggactttctcatcaaccgagagcctgcgacaactctcccaacagctcaatggtcttgtttgtgaggtacctcaggaactgaggccgagagcggggtggggggaagggaactatgatagaaactgaagcagggattcacaagagagagggaagatcctgggaccagccaatgtgctgggcaatgttaaggaagtcgccttttccctgagccttctcccttgaagttgtgcacatgaaggagttggaccccatgactggttgcatcattgtatcctgctgcagaagcactggatgagagctgctcgggaggaaaggatggtggggaaataagaaccatgagagaagttggcacaaaggggttacgggacagagggtccaagttagaaaagaaaatgttgccaattgctggggaagaaacgaagttagagggcttagacactgaggggacagaacatctccatgtgcactctcgtctcttatagtctgcgacatgtgtcaatggggagggccctgcatcgtctgctaacctgaaggatctggaggtaagaggccctgggccgtggcccagtgaccctgcaggccagccctccaacctcctcccacagcgggggctgggtgcccctctgccagctgagacagcccacacaccccccaaccctaatgattgctctctctacctctccccccaatcctcctccaactcctcctctctgcatgcgcctcagagccggtaccaacagctagcggtagccctggactccagctatgtaacaaacaaacaactcaatatcacgatagagaaattggtaagagtccagtggggtcccctgattccatgctgctaatcctgggctccagtttccccttgggaccctgaagaaaggggcagggggcccctggtgccaagggcgaatggggagctggggggcccaggcctcagctggagggaccccagagcacggagcatgcagcatggctcttctgttgctgccctctttgcctactctctcttctctagacacccctgctcgagtccttgccacacacgccctggggttgttgcctcttggggaagcgctagcctgactggttgtcaggagccctgtatttctgccctgactcagtccttaatttgctctttgatttgggacaagccacctctcctccttgggcttgcatttcctgaggaggtagagttagagagtatcaaaggtctcttagctctgagagtccaagatttaaaggcccattagaatgtaaacctcagggccaagggctcctgtctgtctttttctgtctggtatccctgctattaagaaccgtacctggcctgtgtgtgctcagcaaatgtttgttgaatgattacacctttctaaatcacaaactggcagagggtgggcttttctcacactccatctctagaggtttatgttactgtcctttcaagagaatcgagattcagactttcagttctgtggctgtgggcaaaaaccaacaaagacacaaatcccctttccttgagagcctgaggagagtttaccagttcgtgttcccattgggtctgagaactttgcctttaaaatccattcctggcccctgcctacccgttcctggtctggggaatagagttgagggggccaccctcagtcaccttcctttgactcttccccacagaaacaacagaaccaagaaattacggatcagttggaagaagtaacgtgatttctttgtttgctcacaacatgactgctgggtttggggggcattcaaatgtagaggcctcagtctcgtctcacccactcccagcctggggaagaaggctcacccccccagattccaccccatccccacagggtccctgataacctggtcccatgggtgggcctgtcctgggacattggtggcattctgggggcatgtcccttgctgtgccgtctctgcctccccctcgtaagagctctgtcttcctcttcctataggaaaagaaagaatgccaccaaaagcagggagccctaagggagcagttacaggtgagtggagggtgtgaagttccgtcctgtcctctggagaatgtttctttccttctttttcagcacttgcttgggtttcctcccaaaggttcacattcagaccatagggatcctcgtatcagagaaagctgagttacagacagccctggctcacactcagcatgctgccaggcagaaagaaggtgggaatctgggcaccccatcatccttcaacctggcactttgacaggcctttagggggagtcctttgggccccatctcaacctctctcattccaggagagtctgaagatctggccagccgcctgcagtattcccggcggcgtgtgggagagttggagcgggctctctctgctgtctccacgcagcagaagaaggcagacagggtgagtccaactgcctgccccgtcccctggcatactggcttcccagatggaggagtgagcctaaaggtcccttctgcagggttgactgtcctgcctagaaggcagcatgggccatttatcactgcttttgtgtgtggttgctagaggcatcctggggctgagtcagctgctgtgggtgagtttgggggcactgtggggagtgaacactggacgcagagctcggaggccaagtgcccgctgtgccgttacctggctgtggccttggtcaagtcctaggtgggggaatatggtacttgtactgtgaaggtacagaagagtatctttagtatgttaccatttgtgtagagagagggaacgtgtgtgtgtatgtgtacctatgtactatgacaatatacataaaacgtgtctgcatggattcataacaaactcaggagagaggaacagcacggctggaagatatttcccttctgccctttcggagttttggactatctgaatatatcatcctttcaaaaactgaacaaaagataatttcccccttcctatttgtgcccccaccctcggggaacaaatgagcttagagagtcagatatacctgggtgttcaaatccgagctctgtctaagtgatcttaggcaagcacttaacctctaatattccgtgttgtccatctacaaaatagaggtaataatagtaactgtctcatgtggtggttatgaggattaaatgggattgttagcatggtgcctggtgaagcattcaataaaggttcaaacagtggtagtaataatgataataacaatagcaatattatctgatctctctgggcctctgttagccagctgtaaattcgatcttggccaggtgtggtggctcatgcctgtaatcccagcactttgggaggccgaggcaggtgggtcaactgaggtcaggagttcgagaccagcctgaccaacatagcaaaaccctgtgtctactaaaaatgcaaaaaattagccaggtgtggtggcgtgcccctgtaattgcagctacttgggaggctgaggcaggagaattgcttgaacccgggggcggaagttgcggtgagctgagatcgtgccactgccctccagcctgggtgacagagggagactctgtctgaaaataaataaataaataaataaataaataaataataacaaaaattagccaggcatgatggcgcatgcctgtaatcctaggtactcaggagcctgaggcaggagaatcacatgaacccgggaggcagaggttgcagtgagccaagatggcgccactgcactccagcctgggtgacagatggagactccatctcaaataaatacatatatacatacatacgtacatacataaattcgctctctctccctgttccttccacccttaccaagtcctttttttttgagacggagtctcactctgttgcccaggctggagtgcagtggcaccatctcggctcactgcaagctctgtctcccgggttcatgccattctcctgcctcagcctcccgagtagctgggactacaggcacctgccaccacgcctggctaattttttgtattttttttttttttagtagagatggggtttcaccgtgttagccaggatggtctcgatcccctgatctcgtaatccgtccccctcggcctcccaaagtgccaggattacaggcgtgagccaccgcacccggccacccttaccaagtttttttaaaaacaaatgagaccagccgggtgccgtaatcccaacactttgggaagttgaggcgggcggatcacttgaggtcaggagtcaagaccagcctggccaacatgttgaaaccccctctctattaaaaataaaaaaattaggccaggcatggtggctcacgcctgtaatcccagcactttgggaggctgagacgggcggatcacaaggtcaggagatcgagaccatccttgctaacacagtgaaacctcgtctctactaaaaatacaaaaaaattagccgggtgtggtggcgggggcctgtagtcccagctacttaggaggctgaagcaggagaatggcatgaacccgggaggcggagcttgcagtgagccgaaattgcgccactgcactccagcctgggcaacagagactccatctcagaaaaaacaaaacaaaacaaattagccggacatggtggtgcacgcctatagtcccagctactcaggaggctgaggcaggagagtcacttggaccagggaggcagaggttgtgagctgagatctcaccactgcacttcagcctgggtgacagagggagactctgtctcaaaaacaacaacagcaacaacaaaatgagaccatgggcttggaaatgccttgaaaacatgtcaagtgtgattgagagtgaggaagtgttactgtggagtacttactgtagctgttgttactggttggccagctgctcctctgcctgctatatcctgacttaacctttctgtatttacagtacaacaaggagttaaccaaagagagagacgccctcaggctggagttatacaagaacacgtaggatgggggatggtgggatgggaggtctgggggccctcagcatgggtggtgtgctgggaggtggggggtacaggtaagcatgatgaggtagtcatagaggtgtgcatgtgtgcccagcaaagctctagtgccagctgtgccactgactcatggtgtagccttgggtaactcgtatcttttctctggcctgtacatgtgacttttgattcctggggttccttccagtgccacagttctgtggttgtggggcaagggtagagggtggatcaccaaagcagtcctttctgttcttcgttcattcctttctctactgcctctggccatagccaaagcaatgaggacctgaagcaagagaaatcagaattggaagagaagcttcgggtcctagtgactgagaaggctggcatgcagcttaacttggaagaattgcaaaagaagttagagatgacggaactcctgcttcaacaggcaagaggctgcagccccatgggtggtgggagcgccatccagctggggccatggtctagggatcatgcagggcatggggagactccagccaagagctggaaaatttgggtccttgttccggtcctggcataaaatcctctagagagtgctaaaaatctacaaattggggacctggggaatcagaatcttagggttagggcttaagacaatttttgttttgttttgttttgttttgttttaaagcatcatgggtgaaaaccattattttagagattacatttatatggctagctcatgagtctgtttatttccttctgaggttcaagccaacactttcactaataatagagagtagagatctttttttttttttttttagacggggtctcgctctatcacccaggctggagtgatacttactgcaacctctacttcccaggctcaagccatcctcctgcctcagcttctcaagtagttgggactacaggcgcacactaccatgcctggctaatttttgtatttgtagatacggggctttgccatgttgccgaggttggtcttgaactcctgagctcaagcaatccacccacctcagcctcccaaagtgttgagattacaggcatcagccaccatgcctggcctgagatctttttaaaattattttttatttctaaagcaaagaaacttgacagcagagttgtattgactgagttgcacattgagcctagccctagcccttttaaggggcactatttggaacggcctgggctccccagatctaaacttctcgctcttcaccatccagttttcaagccggtgtgaagcccctgatgctaaccagcagttacagcaggccatggaggagcgggcacagctggaagcacacctggggcaggtgaggctttgcaggggagggatgtagaaggaagatgaccccaggtggccaggagtaggtgacaaccagtgacagtccttcctcatttctgtggccattcttgcaggtaatggagtcggttagacaactacaaatggagagagataaatatgcggagaatctcaaaggagagagcgccatgtggcggcagaggatgcagcagatgtcagagcaggtgagacctgacccttcagctccccctcaaccttagataggtcacttgatctttctgggcatctgcgaaatgggaggagcacagccagaggtggtcatgggtctgggctttgtggcggtgggggcagagggagatggtagcctgtccagccaccagcccctctccagggccctttcttgctgtgctttgggcaggtgcacacattgagagaggagaaggaatgtagcatgagtcgggtacaggagctggagacgagcttggctgaactgaggaaccagatgggtaagctggggctggggtgacctgggagcaggaatggtgtcagagggttgtgggggtggtttagaatgccccagggagttgggtggatggaatggctttgaggcagagggaaagaggtctgtgccaggagatggcaagtctcgtcatctccatgagcctcagtgccccatcagcaaagacgaaggagtgcccgttgtcagccacccacagttgtcgctatcggaaagtggtttggaagattggctaacatccgggtgcgaggaatcatcagcagggaggccaagtttggggagcttgagaggaggtatggaccaagaggagggtttttttgagaatccagaggcttttattgtctgcgtcctttctcagctgaacccccgcccccagagcccccagcagggccctccgaggtggagcagcagctacaagcggaggctgagcacctgcggaaggagctggagggtctggcaggacagcttcaagcccaggtgcaagacaatgagggcttgagtcgcctgaaccgggagcaggaggagaggctgctggagctggagcgggcggccgagctctggggggagcaggcggaggcgcgcaggcaaatcctggagaccatgcagaacgaccgcactaccatcagccgcgcactctcccagaaccgggagctcaaggagcagctggctgagctgcagagcggatttgtaaagctggtgcgctgccccacctggagagcccgccctcctccctagccctccagacctttgttttcccacctgtaaagtggggcagtgtagccctcacttgaaatggtacttctggaggcatctgtgagccagagccctgctccgatggctgtgggggagaggggatgatttttctaacctgcctccacccttcccggtgccatgggaggcagacaccaaggcagcaagttctggggtctccagctgcagtgggtggccgctgattgcttctctctgtccagactaatgagaacatggagatcaccagcgcactgcagtcggagcagcacgtcaagagggagctgggaaagaagctgggcgagctgcaggagaagctgagcgagctgaaggaaacggtaaccccgccccatccaagaagggctgggaggcgggcaccagcctctggggaggggtggtgtgaggccagaggcagctccagcctggggcacaggtgaccccagcaccctccagggcagtcctgtgactgtttcttgctccctgccctctgacttttagaggtggatagctttgggctcctctcaggtctggacatcatcgtcccagctagaggcatggatttctcccaatcacaggggaagagacagcggcataagaggctccttagattcaaactggattctggcctttgctccactggtcatcattcaactactttgcatctctaagccccagtttctttaacttaaaaaggaagttagcatcttccttgcagaggtgctgaggattcaatgagataatacgtggaaagcattaggcatgtagcacacttagcagatggtggttggctccctctgcgtttccaccagtctgtggcctacggtttaaatggtgggaagaaggatgtgaaatttgaggctggggaaggaggcacgaggctctagacaagggaggcagtcacttaggcctggagcaaggggccagaggtctgggcaggtgacagagccctcgctaccctatttatgggccctgaatctggaagcaggccaccacctgccctcacgcccagggtcttcctacaggtggagctgaagagccaagaggctcaaagtctgcagcagcagcgagaccagtacctgggacacctgcagcagtatgtggccgcctatcagcagctgacctctgagaaggaggtgctgcataatcagctactgctgcagacccagctcgtggaccagctgcagcagcaggaagctcagggcaaagcggtggccgagatggcccgccaagagttgcaggaaacccaggtgagggagttggtgagggcagggccccgagggggacaacctggcaacctccatgccttctcactctcttttctggccccttaggagcgcctggaagctgccacccagcagaatcagcagctacgggcccagttgagcctcatggctcaccctggggaaggtacgggaacctgctcacaggaagaggagagagccccaggaagaaggggggactgttagcagcgtagaattgaggagttggaagagacctttagaacagctggtcattatgccaactgggtgtccacactaagttcggcatcaatatggtgacttcctgggagcagggcactaccagcttacctaaggatgggtgaactggcccaggtcagaaatgaagcaggtcagaactcccatgctgatcggtagtgggactgcacctgggcagcatagcgagcccttggctcttaaaaaagaataaaataaaaataaagaacagatgcttatttccctctggggaggggctggcccagggttacacagtgagggtgggggcagaggtgggcccactgtacccttgttgggttgtctgatgacccctctggccacccccataggagatggactggaccgggaggaggaggaggatgaggaggaggaggaggaggaggcggtggcagtacctcagcccatgccaagcatcccggaggacctggagagccgggaagccatggtgaggctgactccccctccccaacctttgctgcctccctctgtggtccctcccagacccccttctgctcttggtttcccggccttctgatttcttcggaccctcacccctttcctgggagccagtggtgagacaccatttcacttgggaccaacaagtgcaccctctgaggccccaagggaagggctgctctctacctccctgccctgttcatcctatatatcctcctacaagaatgcacccctcttgcctgcaggtggcatttttcaactcagctgtagccagtgccgaggaggagcaggcaaggctacgtgggcagctgaaggagcaaagggtgcgctgccggcgcctggctcacctgctggcctcggcccagaaggagcctgaggcagcagccccagccccagggaccgggggtgattctgtgtgtggggagacccaccgggccctgcagggggccatggagaagctgcaggtgaatgagtctctcctggcatgggtcaagaagggtgggggcggggcaggtcgctgccgatatatgactccattattttggttccagagccgctttatggagctcatgcaggagaaggcagacctgaaggagagggtagaggaactggaacatcgctgcatccagctttctggagagacagacaccattggtgagtgggaggccagggcacggcaggaggagctgcacagcggtcggagggaacccagcatctgagccctgtcctcccgcaggagagtacattgcactgtaccagagccagagggcagtgctgaaggagcggcaccgggagaaggaggagtacatcagcaggctggcccaagacaaggaggagatgaaggtagggtgtggaacatctctgggggtggaggtgggcacgggcatgggcatggcagcttagcacccctccctccaggtgaagctgctggagctgcaggagctggtcttacggcttgtgggcgaccgcaacgagtggcatggcagattcctggcagctgcccagaaccctgctgatgagcccacttcaggggccccagccccccaggaacttggggctgccaaccagcagggtggtgagtagagccctcgggaggggtgggcaggcaggagtaagggagggctcgcgtggcactcagagccctgcctctctctctccaaagatctttgcgaggtgagcctcgccggcagtgtggagcctgcccaaggagaggccagggagggttctccccgtgacaaccccactgcacagcagatcatgcagctgcttcgtgagatgcagaacccccgggagcgcccaggcttgggcagcaacccctgcattccttttttttaccgggctgacgagaatgatgaggtgaagatcactgtcatctaaaagccggctactgtcagcaaagcctgaagaagtggggctggataccctgcccccaccatatccctaccatcccttctcagtcaaccctttacccttacagtagcaagcatagacccctgtctaacgggggtagacaggtgcagatgaggtgaagatcactgtcatctaaaagctggccactaaattaaaaaaaaattaaaagttatgggattaaaaaaagttatgggataaaaaaggttatgggtaacttatggtataaaagttatgaaaaaaggccaggtgcagtggctcacgcctgtaatcccagcacttttgggaggctgaggttgggagttcaagaccagcctggtcaacatggtgaaactgtgtctctactaaaaatacaaaaattagccaggcatggtggcacgtgcctgtaatcccagctactcgggaggctgaggcaggagaatcgcttgaacctgggaggtggaggttgcagtgggctgagatcacgccattgcactccagcctgggcgacagagtgagactctgtctcaaaaaaaaaaaaaattatgaaaaaagttatgggattaaagaaagtcaggataaaaattttaaaaagcaggccactgtcagcaaagcctggagaagtggggccggaggctccgcccccatcatgtgcctgccaccccttcccagtcatccctttactcttacagtagcaaataagacccctgtctaatggggggagacaaatgtgtagacccttagccaccttggccagggctgactccttaaatttctggatgatgatgattgttatttaatagccagaggctcatataattggcctctttggaagaggcctcatggcctccttactctcaccaaagcaatttttccctcaggggggctcccatcttcttacacagagaggcagctgaggcaggacagtggggctaactgtagaccaggcgagggcacgggctgctggggtggccctgcttccccagtgtacatattgtatctgtgtaacattttgtatattccaggggtagggccgccccctgtatcatacctagcagaggttggagctggcacatggggaggaggttctaataattatttggggctgggaaacttatttattgatagcataggacagaggaaggaggcggggatggggtcgtggcgccctggtgatgcgactcctgtttattttgctttttatttcggaataaatggatttagccat

SEQ ID NO: 765 - DNA, 6316 bp, Homo sapiens
  source 1..6316: mol_type = other DNA
cccacaaccaagatggctgaggagagggcggaagtgtccgcacgtcgggcctccgaggcttctctttctcccctggcggtccggctctcgatggtggcgtgacgggggcgggggtggcggcgcgttctcctcggttgggagggaaccagcccgcgaacccaggccgggaggggggttcggcctgggggggaagggactgacatgtctctcgaagaccccttttttgtagtccgagggtgagtgacaacgacgggggagggcggagggtgctctgtacccaagccagccagtgcccgggtgccggccccagcgtgcccggcgggctgggcaaggccgtcggggtgcagagtgggaggcgcacgcaggggtatataggggtctccggagtcccccatgcgtttgggtttgcagtcgggggcagaggcaggcgggaggaccgcctgcccccagccgcgcccgccgtgcccctgcccgcagcgaggtgcagaaggcggtgaacacggcccgcgggctgtaccagcgctggtgcgagctcctgcaggaaagcgcggcggtcggacgcgaggagctggactggacgaccaatgagctgcggaatggcctgcgcagcatcgagtgggacctcgaggacctggaagagaccatcgatatcctggggctttgtggcagagggtggcatgggagagcccattgcggtggcagcccaccttcgggtagggctggacccctagggacggggatgatatctggctccggccttgacccttgactctcagcccacgtatagtggaagccaacccaggcaagttcaagctcccagccggggacctgcaggagagaaaggtgttcgtggagcggatgcgagaggcagtccaggtcaggaaaggtcctgcaggcggggagtgggggaaggtttgagtgtgtttttttttctttctttctttcttttttttttttttttttgagacagagcctcgctctgtcgcccaggctggagtacagtgttgcaatctcggctcactgcaacctccgcctcccaggctcaagcgattcttgtgtctcagtctcctgagtagctgggactacaggtgcctgccacgatacccggctaagttttgtgtttttagtagagacggggtttcaccatgttgatcaggctggtctcgaactcctgacctcaggtgatccacccggcttggtctctcaaagtgctaggattacaggcgtgagccaccgcgcccagcctgagtgtctttcctccctaatgctgtccttacctccaggaaatgaaggaccatatggtcagcccaacagccgtagcatttttggagaggaataacagagaggtaagccttcctgacccaccctgcccacctgagcccctgggggtaaccaagccagatccctctgtgcgtgttcacctgtcccttttgcgacagtgcccgtcctctctgtgggcagttatcttcttgctgtctacctgcctgcactttctcggtgtgtgcacctgaacctctctatgtgtatatgtccgtgggttcctctctactgtgtcctctgggtctatactggtttcctgttgcaggagagggctgggggcctgtgtacctatctcctttctgcttccatgccatttgtcctgtgtgcacctgtttccaggacgcatgcctgccttttactcttttttttttctttgagacagagtcttgttctgttgcccaggctggagtgcagtggcttgatctcagctcactgcaacctctgcctcctgggttcaagcgattctcctgcctcagcctcccaagtagctgggattacaggtgctcgtcaccatgccagggtaacttctgtatttttttttttttttttttgagatggagtttcactcttgttgcccaggctggagtgcaatggtgcaatctcggctcaccgcaatctccgcctcctgggttcaaacaattctcctgcctcagcctcccgagtagctgggattataggcatacgccaccatgcctggctaattttgtatttttagtagagacggggtttctccatgttggtcaggctgatcttgaactcccaacctcaggtgatccacctgcctcagcctcccaaagtgctggaattacaggcatgagccactgcgcctggcctaatttttgtatttttaatagggttttgtcatgttggtcagtctggtctcaaacccctcacatcaactgatctgcctgcctcagccttccaaagtgctgggattacaggcgtgagccatcgcacataacttccttttttttttttttttttttttttttgagatgcagtctcactctgttgccaggctggagtgcagtggcgcagtctcggctcactgcaacctccgcctcctgggctcaacgattctccagcctcagcctcctgagtagctgtaatacaggcacatgccaccacacccggctaatttttttttttttttttttttttgagacggagtgttgctctgtcgcccaggctggagtgcagtgacgtgatctcggctcactgcagcctccgcctcccgggttcaagcaattctgtctcagcctcccgagtagctgggattacaggcacccaccaccatgcgtggctaaattttgtatttctagtagagacggggcttcaacatcttggccaggctggtcttgaactcttgacctcgtgatccacctgcctcggcctcccaaagtgctgggattacaggtgtgagccaccacgcccggccaatttttgtatttttagtagagacggagtttcatcatgttggccaggatggtcttgatctcctgaccttgtgatccactagcttcagcctcccaaaatgctgagattacaggcgtgagccaccgcgcccggccagcttccttttttttttttgagatggagtcttggcatgttgcccaggctggggtgcagtggtgcaatcttgactcactgaaacctccaccttccgggttcaagcaattctcctgcctcagcctcctgggtagctgggacaacaggagtgtgccaccatgcccagctaatttttgtgtttttagtagagacagggtttccccatgttggccaggctggtctcaaactccctacctcaggtgatccgcccccgccttttcatctgtgcatgcacctaacctatttgggtgcgtgcacttggcctctgagtgtatctgcattttcccccctcatatcctaatatctgctagtttcctctgtaatgtgcctgccgtgtgtgtgtgtgtgtgtgtgtgtgtgtgtgtgtttctgtgtttctcccaaccacctctgtcagtccactttttctcttggtgttctctgttgatatttttcatatgttgagaaccaccagcctttctctctccctcataagcgtacgtggggtcggggagggtgggggactgaggctcctcccagtttgtcatcccatagcagtgcccacgtgccttccagatgtgctgccttgggggaattcaagtccaaactctaaaatacatctgttggagccgggcacggtggctcacacctaaaatctcagcactttgggaggcccaggcaagtggatcacctgaggtcaggcgttcgagaccagcctggccaacatgatgaaaccctgtctctacaaaaaatacaaaaattagccaggcgtggtggtgatcacctgtaatctcagatacttgggaagctgaggcaggagaattgcttgaacccgggaggtggaggttgcagtgaggcgagatcacaccactgcactccagcctaggtgacagagcaagactctgtctcagacaaacaaacaaacatctgttgggccaggcatggtagctcacgcctgtaatcccagcactttgggaggctgaggcaggtggatcacttgaggtcaggagttcgagaccagcctggccaacatggggaaaccctatcactagtaaaaatacaaaaattagctggatgtggtggcaggtgcctgtaatcccagctaaaatccccccaaaaataaacaaatagtaaaatgtgacatttactagcattactatgtgttgggcactgctgtaagtgtcccccatcaattaattctttaaatcctcatttcaacccaggaaacacggattctagctcttcccattttattttattttttttttttttgaggcaaggtcactctgacacccaggctggaaatgcagtggtgcgatctcagctcactgcaaccaccgccccccaggttcaagcgattctgctgccttagcctcacaagtagctgggattacaggcatgcactgccacacccggtaatttttttttttttttttttttttgagagaaggtcttaacctgtcacccaggctggagtgcagtggtgtgatctcggctcactgcaacctcagcctcccaggttcaagtgattctgacctgcctcagcctccctagtagctgggattacaggcacccgccaccaagcctggctaatttttgtatttttagtagagacgggatttcaccatgttggccaggctgctctcaaactcttgacctcgtgatccatctacctcggcctcccaaagtgctgggattacaggtgtgagccactgtgcccggcccaatttttgtatttttagtagagatggggtttcaccatgttggccaggctggtctcgagctcctgacctcaagttatctgcccacctccacctcccagagtgctgggattacaagcatgagctaccatgccccatcctgctctctgcattttacagatgaggaaactgaggcacaaggaagccaaatgatggggtctctgggtcaccttgctagtaagtggtgagtggggaatgcaggctgtcctgccccagagtctgcccccctgacttaccaccgtggggatttgccccacaggccccgctgtgagttggggtctctccctgagcctatgttgtgtgcccctgcagatactcgcaggcaagccagctgcccagaagtcacccagcgacctgctggatgccagcgcagtctcggccacatctcgctacatcgaggagcagcaggccacacagcaggttttggggccagcggggtggatcttgggaggggagagccttgcagactgatctgaggtctggggtccctttttgttgttgttgttgttgatatggagtttcgctttgtcgcccaggctggagtgcagtggcgcgatctcagctcactgcaacctccgcctcccaggttccagtgattctcctgcctcagcctccctagtagctgggattacaggcgcccaccacaatgcctggccaatttttatatttttagtagagatggggtttcaccatgttggccaggctggtctcgaactcctggcctcaagtgatccgcctgtctcggcctcccagagtgctgggattacagtcataagccatagcgcctggccttctggggtcgttttcaacagcatctcccaccccttcgctctgcagctgatcatggatgaacaggatcaacagctggagatggtgtctgggagcatccaggttctgaagcacatgtccggccgcgttggagaagagctggacgagcagggcatgtgaggccaggaccctgggggtgggccaggggctctcggccaccctggtgtgtctgggccatctggggctgatgccatcctgttcttggcagcatgctggatgccttcgcccaagagatggaccacacccagtcccgcatggacggggtcctcaggaagttggccaaagtatcccacatgacgagtggtgagtcccctcaggggaggggtcagtcctggtgggggcaggttgtaggtggtaccctctccccgtgacccctgaccttctcgttcccagaccgccgacagtggtgtgccatcgccgtgctagtgggggtgcttctcctcgttctcatcttactattctctctctgaccccagccctccctggcaggctggtcccttaagcctggggagccaccaagcactttggagctggcctcgccccctaggaggagagggtccctcctgggtagctggagagtagagggtcccgcctggggagctgtccccatggctctcccctagagccagtgggacccttcaggaccctgggctggaaccaccaccactggtcctgtctcaagtgcacttagggggtggtggaggcagggacacctgagacacacctgtctccatttccagttccaggaccccaaagccatttgcccctgtgccttatacacgtgccaacctggaaataaaatgtcagccttttttatacgt

SEQ ID NO: 766 - DNA, 32742 bp, Homo sapiens
  source 1..32742: mol_type = other DNA
acgtgtgtatgtgtgtgtgtgtgtattgggtttctctctcccttgtaagaacacagccagcccgccctctcctgctgttgctgcagctctgacttgctttttcctgcctccttcctctcctctctcttcttgcttagcttcttgccttctggtaagtatgacaaacactcccccaagccctgtgagaaggtatagggtgcggtttgtggtgttcgaaacttgcaactttgagattgccagtgaactgttggagaacttttcattgttgtatttataaataaaatgtgttgcttagggagggatgtgtctgtgatagtcatctggaatagccaacacaagtgaaaagttctctccctggggaggggaaaataaggcaataaagtttatataagataaaagttagaaataatttctttgccacataatataaaatggatgattgaaaagtaacaaagttctctgactttgtttttttccctcttgttaacttgtcttgaggctacttttgggaattgaattgtcctgggctttataatgactgttctgttttaaagtaaatgtggaacaggagtttaaagaatagccatggaattaagaatttaaaaaatcaatgattgtggcatctcatgaagaataaatcaaatacaaacagccacttgcatttagactaaccgaagtaaaactcctatggacagcttatcttaaattaattattttgaagttcattttacttgagattttatttcatcctaagatagtctccccgactttaaaacccatgtatggatttaagccactaaatgtttactgttttcaatttgactgaaaaacgattctcttgattttcaaggatgaagtgctaaacggcatgactcattttagaatagcttaaaataacttctggctggacagcaggtgccgtgtgtctttctccgtgttcaggggaggcctaagttatatatagatgagtgcaatcaacaagtgaggtcaggaaaagaaatcccagtgatgaaaataatgaaactgctgcattatttgataatcaagttggtgaattcaaaccagtgaaagaaaaaaagtacttcctctaagttatgagtgtttggtgagcatcacaagtcagtggcaacatctgtgtgttgaattttctgttcttgttggtgtctgagcattcaattgacatctactgccctgagaacaggaaaaggaagctgtgcagttgtagaacagtatgcttttgttttcactttcatgttaccacaacagcaaaacctgtgaattatgaggatcttgccacatttttatgctgctatttagcagcatcactgttaaatattatttacaaataaaatgcaccataacttaaaggcctaaaccaaatctattgcaactctagaagtggtaatagtcagaaaccctggaatctctgactcagtaccatctctcaccctttcctaagggcccttattattgctgaattatttctcgagttggtctcctccttgtttatgaaacattgctacttcttaaaaatcattaagtttttctagagcttcctgacttagaagagaaagttgtaatctgtttttctcttttaaaaaattggtttatatattggaataaaagagtattatagaaatttaaggaattgttgttataagtatcatcatgcttttgttttgtttagtttttgagacgaagtcttgctctgtcacccaggctggagtgcagtggcacgatcttggctcactacagcctccgcctcccaagttcaagcaattctcatacctcagcctcccaagtagctgggactaccggtgcccgccaccacacctggctaatttttgtatttttagtagagacagggtttcaccatgttggccaggctggtctcctggcctcaaggatccacccgcctcggcttcctaaagtgctgggattacagacatgagccacagcacctggcccgtgtttccatactactttgtctatttatttataccttccctcattccctgtcttaatctaaaaatgatgccagtttaagcctcaaaaaaagcattcgtgttgcttatctgaaaaagaaaatgccagaaaagtgagaaatgtctcctctatccagtgtaataatgcatttacatcaaaatattcacactaagcaaaatattgatttatggatcaaatagagcttagagatgttattcttatgagttatttaaataaattcaatggctcttctattaaatattttaactttgaaagaaaactaataccactttatatttaaacattttaaatatatacagtcatgtacccccagtgattgttaatctacatagaattatacaggaaaatggtaacacaaactgactagtgtaagcaaaatgacaaatatggccacaaagaaaaatagcatgaattactttcttaatgtgaataataaggaatgctactgaaaactgaagatcaaaaccaaaaatatgccagcagtgtgacttgatttggaaaaacaactttccactgtccctactttaataattgtaatgcagcaggacaagccgcagacaaaacccttcagacacccagttaaagaaggaagcagtttaatcggccgggagcgtcagcaagactcctgtctcaagagccgagctccctgagtgagcatttcttgtcccttttaagggctcacaactctaagtgcgtgcacgtgagagggttgtgattgattgagcaagcagggggtacgtgactgggggctgcatgcaccggtaattagatcgaaacaaaacaggatagggattttcacagtgcttttctatacaatgtctgtaatctatagataacataacctattaggtcaggggtcaatttttaactaccaggctcagggcgcggcaccaggctgtctgcctgtggatttcatgtctgcgttttagtttttacttcttctttggaggcagaaattgggcataagacgatatgaggggtggtctcctcccttagtaacatcaatggtttgtgaaaggacattgcctttctctacgttagagactataattagttggtattcacttgggggatatccttaccattgaaatgtagcattgatatgtagcaagtaggttagctacataaagcctaactgtgcttaccactagatactactcccaagatggaggctaatcactctgaacagctctcagcggaacgacagtcaacacctccaggtgacagttcatcattacccagtcacaatggcctggagaaggaagatggccaggattctccaaccccagtccaaccaccagagaaagaggcaagtgtgcaccccgatatctctgaagagctgaatcgacagctggaagacatcattaacacttatgggtctgctgccagcacagcagggaaagagggctctgccagggccagtgagcagcctgagaatgcagaatcacctgacaacgaggatggggactgtgaggaaacaactgaagaggctggaagagaacccgttgcttctggagagccacccactgtcaaagagcccgtcagcaataaggagcaaaaattggaaaagaaaatcctaaaaggattaggcaagtagttatgttcaaatatgtgacttttctgtatggtattcctaaaaaaggggcacttcttccaaacttcactaaaagccacatccaatatttggatgactgtagtagccttctatattttcccttgttgtatttgtccccagcccttacccctcaatggagctcaggtgaacttttcagtgtgttacccattgaccctttgttccgtggcctcctactgctcttaggatgaagaccaaaatctttaacatgttctctaagatcctaatggtctaactccaaccagtcccagttttatctcagattactctaccctacaacatcaccttcctgaacactctgcctctattaccaccaccaccactactgcctaatagctagtcattctgatcttgtctttcaggcctttgaacatgctatgctccatcgcccacaaggcctgtgcacatcctagtttctttacctagaaatctgtacctatcttcaggtgcccaatgagtgtttattaatgcctagtctttgtaaggcactgtgctaggtgcacaaagataaataaatcatggtcttttggtcaaggagctgtaagtatagagaaaacagaagacatgtaaattaattatataggagaagtgcaaaaacgggaaaaggaaaattttttaggagagcatgggagattggtgacaccaacgatggctgggaaaaaagggtgagaacgttaatttttaaaactatgagtgaagcatgttactgtacataggaaagtccctctgcttgtctttcctggtggaaacactcactacgaatactccctcctatgtgatactttccctgacatgcccaggtagagttagcatcaccttccttagttttctattaaattttctgcagcaatcatttgtttatatacccatctctcatgctagatggagaatctatcaagggcagagaccacatatgatttgtttctggaagactatgtggtagagtgaaagatcatgagcattggagtcagaactgggttcaaactccagtaaccagactatctgtaaacccaaatatatcacaaactggagtagaatatttttctgcagtgagcaggtatatacaaacctacccacaaaggccaagggagctgaaggccaaaaacagaggctgacaaatccactttctcagaaagaaatatttaataggggcttacaaacagtagtgctgtcttgggcagcagtgagacagtgaattcctacacccactctccagaaagtgtcctttacatagcaagcttttaggtaaagtcatgtgcagctggtcacatctccaactttcttgccaaaagtcatgaccactgggaacgttagataagcatctttctgagggattgtctatgtcacaggcattgtttaaagaccttgctgcagaacagccgtcaacctttttggcaccagggaagacagtttttccatggactggggagggatagtttcgggatgattcaagtgcattacatttattgtgcaccttatttctattattattacattgtaagatataatgaaatgattatacaactcaccgtaatgtagaatcagtgggagccttgagcttgttttcctgtaactagacggtcccatctgggggtgacaggagacagtgacagatcatcaggcattagattctcacagggagcatgcaacctacatcccttgcatgtgcagttcacaatagggttcacgctcctatgagaatctaatgccaccgttgacctgacaggaggtggagctcaggtggtaatgtgagtgatggggagcagctgcaaatacagatgaagttttgctctgtcgcctgccactcatctcctgccgtgcagcccagttcctaacaggccacggactggtacctcaccctcccaaagtgctgggattgcagacgtgagccactgcgcccggcccctagtcttcctttgaacggtccggtcactctcccagatagtctgtttcatctgttttagcttgatttctagtttctctgagagagtaataaactgcagctttgatattttctgaaggagatggtattttctgaaggagactaaattttctgaaggagatgataagaagaccagagaaattcaagggaaagaggaataagcagagacaaagcttgacaggtagattcatagagaagctagaacctagaccagaccttgacagggaggagagtttacagaagcagatggaaggggagagaaaaaccttgaggaaaattattagtactctcttctgaccaaggtagggagtggatggatgaatattttactgttttttctaatatttttatttttgttattggtaatagtgtatacacatcatcactgttgacctaataagaactccagatccactctcctactgagtgagaggccaaagttcccctacaaatatgacaaggccactgaaagataagaaatagaaaatgtaagccaaagggaacaaaatctgacaagaaaacacaggctaggtggtattttcgaaactgatagaggcctctcgtgggtaaaatctctctcgtgggtaaagtcactttccccttggcatctgaaatgaaagaaatgaaaacagatttcccattatgcagcccacaatgactggtaccagtccgtggcctgagggttggagatatctgctgcagaacaccttggtatggaggagtcaaacattggtcatcatggcaggtttgctttacgatggcatcactcttgccatgcaaggggctattttcctacagatatcgctatgatgctaaaacccattgctacaatgctttcaagaaggcctaaataatacattcaggtagcatacttcacccaactaggataaaattaaaagaactcagataataacttttaagtatcttcaagttccaaagtgcagggttggaatcactctagtgttttggaacatggaaaaacataataaaattgctctgtgttacagagcaattttttcttctctgacaaaacatctcaaatgtgtccctttgcaaagttagtcattattcaagtttccgtaagacaatatacaaaatctcattccagaggtaagcaacttcaagtgttcctaaccagaaaagttatttttcaatcaccctaaaacttttacataagaattggggtgtgtgtgtgtgtgtgtgtgtgtgtgtgtgtgtgtgtgtgtgtgtgttgaggggaaagatatgaagaaaatagggataaagttaaaataaccaatttgggtttctactctcttccatgagttatttcataatctgcattaaccttacaattaccaaatagtcaggatgatgtttttaaaaattccaactccctaattctgccgctatttacgataccaaattccaactgactgtgtttgaccaaaatcaatgcttgtggattagagtacctaggtgtgtccactctaattgagtatgtgtgggctcatgacctttctgtgccttcccactcatcatcattagcatattattttaaacactgtactatttaacagctacattatgcatgaaaacaacatttttaggctaacctcaacttgtaaccaccattttaaactttcagttgtttgcaagtagctttggcagccttcttagctacttttcagttaaatggtactgtgctatcgtctagactaatggttttccaacttaactgtttattagaatcaattgcaaaatttgtgaaaaatgctcctcctgagcccccacacacagatatttggagtttgtaggcctggagtgaagcatgatctagtttctcagttctttgaacatgctatacgccatctcccacaaggcctgtgcacattctagtttctttgcctagaaatttctacctatcctcacgtcctcaatgagtacttatttatttatttttatttatttactttttttctttgagacagagtctcactctgttgccaggctggagtgcagtggcgcgatttcggctcactacaacctccagctccctagttcaagcgattctcctgcctcagcctctcgagtagctgggattacaggcatgtgccaccatgcccagctaatttttgtatttttagtagagacggggtttcattgtgttggccaggatggtctcgatctcctgacctcatgatccacccgcctcggcctcccaaagtgctgggattacagccgtgagccaccgcacccggcccacaatgagtatttattaatgcctagtctttatgatgcactgtgctaggtgcgcaaagataaataagtcatggcctttagtcaaggatctctaggtagagaggaagaagaagacacataagctaattgtcatatagtgtaagtgcaagagcaggaacaggaaaatttttaggcgagcatgggagatgttcaccctgggtaattttgacacagattgtggaagcaatggttctgattcttcagaaagtgttttctctgctcttttggagaaaatataaacatctggctgtggtctccttttataacctatttggacctcttagagaattttaataagtcattcaacccatatctgaagatatattcttagattttgcttatgtacttgatcaaagatgtctttaatcattgtatttattagatgctatttgctttattggcacatttgagatgctaaaatgttttgactctctactacaacattttccaaagtgtgtctactttgggatgcttgagatttcacaaagttaaacagtttctttactgccagaattctctgacctttactgtatacacaatgaagatctaaaatagtgatgggcatagtttccatcatttccaaaacttattgactgattggatctatgagagacattttttttttttttttttgagacggagtttcgctctcattgcccaggctggagtgcaatggtgcgatctcggctcaccacaacctccgccctccgggttcaatcgattctcctgcctcagcctcccaagtagctgggattacaggcatgtgccaccactcccggctaattttgtatttttagtagagacaggatttctccatgttggtcaggctggtcttgaactcccgacctcaggtgatccgcctgcgtcggtctcccaaagtgctgggattacaggcatgaaccaccacgcctggccaaggcttttttttttttttttttacagaacaccttgaatatttgggaaatgtctctacaacctaagctcccaggacttctttttccttttgaggctgcactttctcctacaataaacgcagtacttaccggagcagttgggggaatatttaaaaatctctctcgtgggtaaagtcactttccccttggcatctgaaatgaaagaaatgaaaacagatttcccattatgcggcaccatgccaagttcacatctaaagtatcccctttgttctcctactcgcatcctccaggctcagaggtatctctcatttatcacttctttgacaacattatgtgggctgggagaaaaacaaagctcattcacagggctattctgagctcagaatccatctagtcaacctactaattttatagacagggaaattgaagcctagggagtttcagaatccaccaaaaaatgttactcatctagttgatgtgattgtgagattagtcataaagcaagggatggactttgtgtcactgacatcgcaggaccaaagtggtacagaagcaagcatcatattggttaaggagcatttattacacctcagttaatgaattttgtctttctagttacaagtgagcttcagtggtaccttctgagaggctcctgactaggacatcagtattctgaaatgtcttcagacatccatttacatagtcttcctttattttttgagacaaagtctcactctgttgcccaggctggagtacagtggtgcgatctcagctcactgcaacttccacctcccaggttcaagcgattctactgcctcagtctcccatgtagctaggattacagccacgtgccaccatgcatggccaatttttatatttttagtagagacggggtttcactgtgttggccagactggtctcgaacttgtgacctcaagtgatctgcccacctcaccctcccaaagtgctgggattgcagacgtgagccaccgcgcccggcccctagtcttcctttgaacggtccggtcactctcccagatagtctgtttcatctgttttagcttgatttctagtttctctgagagagtaataaactgcagctttgatattttctgaaggagatggtattttctgaaggagactaaattttctgaaggagatgataagaagaccagagaaattcaagggaaagaggaataagcagagacaaagcttgacaggtagattcatagagaagctagaacctagaccagaccttgacagggaggagagtttacagaagcagatggaaggggagagaaaagccttgaggaaaattattagtactctcttctgaccaaggtagggagtggatggatgaatattttactgttttttctaatatttttatttttgttattggtaatagtgtatacacatcatcactgttgacctaataagaactccagggccgggcgcggtggctcacgcctggaatcccagcactttgggaggccgaggcgggcggatcacgaggtcaggagatcgagaccatcctggctaacacggtgaaaacccgtctctactaaaaatacaaaaaattagccgggcgtggtagcgggcgcctgtagtcccagctactcgggaggctgaggcaggagaatggcgtgaacccgggaggcggagcttgcagtgagccgagatcgcgccactgcactccagcctgggcgacagagcgagactccgtctcaaaaaaaaaaaaaaaaaaaaaaaaaaagaactccagatccactctcctactgagtgagaggccaaagttcccctacaaatatgacaaggccactgaaagataagagatagaaaatgtcagccaaagggaacaaaatctgacaagaaaacacaggctaggtggtattttcgaagctgatacaggccttaaaaccaaacgaaacaagcaaatgaaaaccctgacaatgagtggtgacagtgaggagtaagagaacctttgtaaattaaaaaagtggaccataatagtctaagataacaaatatgccatccaaacaatgttgcttttgttttcattgttatctaaatcaagctaaaaatggtgaaagctattttagttgtgaaatgaccaaatcttaaaggttgaactcagaatccatttagtcaacccactaattttatagacagggaaattaaagccagagagtttgagagtccacacacacacaaaataataaaaataaaaaaataaaaaaataaataaataaatcactcaactagttgatggcagagttggttctggaacccaggtctcctatccttaatccagtgtgaatttaataatactttccttcctatcccctgcatacatgaattttacttcccttaaaagatatctatagatgctcaggaattatttatctcatgcttatttttagaaatcatatcctattagaagaaaaacaaaactaacagtgaaatataaatctaggtctaacatttgaaagagggacattcacagtcttttctggctttaagtttctgccacaattcatggaaatcaggaaggtggttagagaggtacacaagtacgtatttataatgaaatttaaccccaaagttctaaaaaaaaaattttggaagagaaaaggcatacttttgtttttgagagatggagtctcgctctgtcccccaggctggagtggagtggccaatctcagctcactgcaacctctgcctctcaggttcaagcgagtctcctgctcagtttcccaagtagctgggactacaggcgtgcgccaccacgcccagctaatttttgtattttttagtagagacgcggttttactatgtattggccaggctggttctcccgacctctggtgatttgaacacattaaatctgcataagttgtcaccaaacttagtataaacaatcattactatgctaaaagtttcagaaaaatcctggtccacatttctgcagctggcttagttgcctttaatttcaggttttttgtttctttctttctttcttttttttttttttttttttttttagagagagagtcttgctctgttgccaggccggagtgcagtggtacagtctcggctcactgcaatttctgcctccctggttcaagcgattctcctgcctcagcctccagagtagctgggattacaggcatgtgccacgacaccagctaatttttgtatttttagaagaggcagggtttcaccacgttggccaggatggtctcgatctcctgacctcgtgatctgcccgcctcggcaagcatgagccaccacgctcggccagtttttttgtttctttgatgtaaaaataatttctccaccttccaataaaactgtgccagtgaccacagccttatgcaacagcgctgtgtctgctacacaggtggttccactttcatgtagacttcctaccacgctgagcatttcgcagtgtggtggctacatgcccacatgccttcctagctttcatgaggaagaaatgaagcttgctttggaagaacacattagggagaaggcaggtgattccttcctgataaagcgtccctgaataaagtcagtttttcctcttttgtttgacactgtcaccaaatgaccctatttccatggagatgtaatgatagccttttgtagatgatgagcaagtctctgtctactcccctcctccatgattacttcacatagcaccctagtcccacaacaccaatggaagtttaaaaactgaggtcagtgatgttgtaaatttatgaattctgcacatgcccatctccagtttcctggattttttttaattaatctccagttttagtgcttttcctgtgagacttacaaatagaaattctgtttcctggattttttgttgaagggaagaataatttttgaaggcatattgatgcacctggatgttaaccttctatacaaaataacacagtagagcagaaagagacctcagtgagtgtgaagagtaaaaaacaaaacaaacaaaaccaaaaagaaacctcttctcacagtcacagaaaataaaaccaaaggggagaagatacttaatgtgggaagaaagcaagaacctttggactcactcatttctatctctcccaaacaagacaggtaatggtttcacatgtcggtacacacactgagaggtattccaggatacataaaacatcacaggtgagagtaagacctgtttttcctctagttggtcacaaaaaattgttttcatgacagtgtttatttgattcacatgatacgagtttgagctagttggctttgatttttttatttgttcgtttgttttttgcagtggagtgcagtggtgcaatctcagctcactgcaatctctgcctcctgggttcaagtgattcccctgcctcagcctcccgagtagctgggactacaggcatgtaccaccaagcctagctaagtttttgtattttagtagagatggggtttcaccatgttggccaggatggtcttgatctcctgacctcgtgatccgcccgccttagcctcccaaagtgttgggattacaggcgtgagccaccgtgcctggccagctttgttttattctattattatcatcatttactgagcacttgccatgggccaaacactgtgttgcatcctgggccaagaatgatcaagagtagtctcttgactttaatagatgacactctaacttgagattgtagtcttcatgtgggcaccttccctggactgaagacaaaggtgaagggatggcctgaccaatgcaaatccatccctgtcagtagagggataacccaaagcacatgcctggcaggggcgaggcgtcagtgattatcagctgcaaatgccacaggccataattggagagctgggagggaccctactcacacccaccttcccctgttttaggctaatctgaactgactcactaggcaaagatagacaaaactaactgttgggaatgaggtcatttaaaaaaaaagttgccttctatttctctaggtctctctagcatcagaattccacatgagagtggagtgacttagaacaagtaggctagccttggattcaagccttctctctgccagcactaatcatgtaactttggacttttctgggccttaaatactaaaatgcataaaattaaccggttagtctggatgctctttgaaattccttctagacctaaaattccttgattccatgtaaagttgccaggtttagcaaaggaaaatacaggatgtccagaaaaattagaatttcaggtaaacaacgaatcattttttagtacaaatatgccccatgtcctatatttcatctggcaatcctaatttcatgacatatatgcctctccaagatgaaagcaagtactctagccaaggggaaatgtctgttcttgggggaaaggttgtcaattttcttaagcagatttatgtcaggaagtgtgggctttgttgtgtggcttgaccaccctattctgattaaacagagtggttttcatagataggtagggatgggaaaaatgccccaccctttcatgattatttaacagggttaatttttttttagtgtagcataaactccaactggaaacaaaatgaaactgccaacggatattaaggcctaggtgggggaaaggaaggccagagaaggctgtgtccattatcacagagacagaaaaaggcttgtggaaaggctctccatgtctttacttggttttccttctataatgattttattctatttggtaggaaacaggatcagagttattcccactccaacgccagggaatgggtttatgtacaaaaaagagaaacttggttccccctaaaagagggaaaagaagtaccaaaagaacaaaaaacacaggggaaaaaacgggcaggctacttcatcaagcttctctgcttctggctggaatcccagcaactccgtgttgctgtttcatactagtcggaaattttgattggctgttttgcttcctttttgttaattcaagtgggaaaacgggtgacgtattctttcagaaagtatttttgatgtataaaatcttttgattctgaagaatacagggaggagaaataagaacggattcttgtgatgaaaactgggagacttctgttatagcaaacatttattgagagtctgccatgaacctcacaccgtaccacacattcacaaacttcccaactaatgttcactctgtaaggtaggtgtcatcatttctataggaaagaaaattacatctgataagatgaatggcttagccaaggttgggaataattagcaagtggtcaatctgagactccagcccttatcacctgactgtaaattcaacacttatttttttcatgtcttttttttttaaggcaaagaagccaacctgctaatgcaaaatctgaacaagttgcaaacaccggaagaaaagtttgattttttattcaagaagtatgctgaattggtaagatcttggattagcttcttttctcagaacgattagtgagcccagtgcctctagcttcaaggaacaacaaacacctgccaatccgagaatgaattgtaaacagcaacatctgaggtctgtgcgctaaccctgcagattatgagacccacagctaagatgtggcattctctctagtaaagctaggcagtggccttctcctttatttctgcttcttaaaaaattcttttgaaggaatgcccatcagaatctctatctgatccatttggttatctaaatcagggaatgaaaataaaccatatcacccaatcccagtgacataggtacctctacctgaaatgcattgtgaccagaatcactgggttaattctcgcatgttagcacctcactagctccttttgactgtgttggtgtcatgttgagaaaaaggtaaaataaatcttaccatacactaaaaattcatactaatagtagtgaagttagatggaacaaacaattgaatttatttttatagaagttattgagaataatctttcttttgtacatatacgcatttttaggtatattgacatagtttgggaaactttattaaagttagtcagttgcctgagtttttaatattggacttggcatttatatatgtgcatcaactctgttggataccagaatactataggagtggatgaactgttctagcaactttcagcatgtactatatggggcatatttaagttatttataaacaaggaaatctattttatgtcgttgtttagaagaattgcatgaaatcatgtagttgcaaataaaaggtagtttgaggcaaaacaaaaattctttcacttacttcttttggagaaacagtgacaggagaatgcaacttaagagactacatatagcaaaaaatccctccaggcagtaagttgaactgcccccaacagtagatttaccattgcagctgaggaagcttaaacctcaggacatctcacttgcatgggcccctttgaggcccggggcctaattctctttaattttttattttgaagagggcctccaaaactgaataagcttcaggcccacaaactcttcatccctgttgatggagcacactttagtaagtgacttgttttctttgtttttcactctgaatctagtcctgtaatctttctgttcttctacctaatgtgtcctgttatgctgaactattatgcagtagatccagaaaaattctgaaactctgcgtgactggctgtttgcttaaccctgccaacagtatttttaaattattttttagacacacaaactacttcacgaagatatataatgctgaatacacaaaataaacaaaaaatctctaatccctcatgtaaaatacaaactttgttctatgcatattcttttcctgttctactgtgtatgcagatttttattataattacagtcataaggtacatataagttgatatctggttttcttacgtgacaggcatttttccatataatatatagtcttcacaaatatattttgtaaaagttgtgtcatattccattaagtggctgtatctactgattcaataatttgaatatatttaaattcctctcactgttttgctttaccaaatatttctgcattgaacatcatcacgtattagctttgttctttttccttcttttttatgattttaagaaaaatttccagaaataggcttactaaattaaacaagatgagtgctttctggtttttaaactttatggccatattgctttccaaaagagcagtagaaactcacaaagcaagtatcagtgtatcaattttcttgcaacttgtattgcattggctattaacaatttcaataccataaaaataatttaggtgtcaaaaataatattttctccccaaatctggcccccactctcacgtttccatgcgattctcacctatccatccttgctctttttagtattttctgagtcatttttcctttaccccttcgatttaccaactcataccaaggccattcatgtttagtttccagcgccatgttctatacttgaggggactgggcagcattctagactaatacaggaagtgatgtgtggtgttacattcccacgacagtgcactggggaagcatcacttttccagacttaccgatattttctccatgagccagggttgttcatcctggtctcagggaactccctgtacctactcatcctcctagcaaagcagtcacccccaataaacaagagattgtttttccagagaccatattcaattcaagccttacttgctatattttggcatttgtatcatctctcgtaaaaaactttcgaacctgagagatcaccttagaaaaaatgaataggagaagattaacccaaaaaacttatcacatttccttttcagaaaagaaaaattatgaggaatttcaattttttacgtggagactaaagcctatttccttgctcactgatttggatattaatatagaaaatgactgaaatataagtgttcacatagaataaatcatcaaattcaaagctgtgaatcaaactgccactctagctcactcatccttgcagagtctaaatcctgtaatattatctgacattgtattcattaataaataaagataagctcattaataagtaaggacatttcatgactaaattaggaaatggcctgggagaaatatttttcacatttaatttcctcaattcttatgtagttaagacaacatcagtaataggattttaatttagtacttagcattaattttactttttaacttagtaaaaaaagagaaagaaaacaagagaaattacagacagaaattctatatgcctattacagttgtacagaagaactatgcctaagttaaatcacaaagccagcatttgattgaagctaggcagtaagaacctagagggcagggaatgtgtatttttcattgtcttcaatgccaagaatcacttgaatattggctgaattactttgttaataatttaaatttttttaaatataaaggaaagttctggagtattatctggcttaatattagaaacaaaataggccaagcacagtggcccatgcctgtaatcccagcactctgggaggccaaggcaggcagattgcttgagctcaggagttcaagactagcctggacaatatggcaagaacccatctctacaaaaaaattagctgggcatggtggcacacaactgttgtcccagctactcaggaggctgaggcaggaggatggctggagctaggcgtttgaggcttcagtgaactatgaatgattgtgccactgcactccagcctggatgactgagcaagacgctgtctctaaaaaattaaaattaaaaataaaaataaaacattaaatggaaaatgagcaagcacaaatcatttctctttccaatttatgaaacacctgtagggtgtcttcctcctgacactcagataaagccacatagtgcagagttccctaaacagggacagttttgttcaccaggcgacaataggcatgtctgtctggagatattttggggtgtcgcaattgggcagtgctactggcatatagcaggtaggggctagggatggtgttgagcaacttacaaggcataggacagccccaacaacaaaaaattatctggcccagtatgttacttgtgctggggttcagaagccctgacatatggtttaatcttcagaaggtaaagtctacgccagaatggcaataataataacaatatataaatttcttttctttttcttttttctttttttttgagatggagtcttgctcttgtcacccaggctggagtgcaatggcacgatctcaactcactgcaacctccgcctcccaggctcaagtgattctcctgcctcagcctcccaagtagctggaattacaggcacccgcccctaggctcagctaatttttgtatttttagtagagatgaggtttcaccatgttggccaggctggtctccatctcctgacttcaggtgatccgcctgcctcagcctcccagagtgctgggattacaggcatgagccaccgtgcctggcctacaatatataaatttcaagaaaggacaatagtcattttaaatccaaatatatgtacaagaaatttcacgcctatctaataactatggtgcaaaattaaaggctcacatctatactatgagcagcttagcatgagaaatatttaataacagattatttattttccaaggaggatatctatttcaatcaatatttttagtaatatgggttttgtttttacaatgctaatttccactagtagctagaaattgcacataagtatgaagatagaatatcatatatacatatccttagctttatctggcaagggtttaaaatgcttattttagggtggcaggagggagagaggaaagaaataaaatgtgaaccgaagaaagtgtgacaggtgttcatcttgctcagaaagaacaactgcttttctatttattttttatttattattttttgagatggagtcttgctctgttgcccaggctggagcgcagtggcacaatcatgactcactgcaacctccatctccctggttcaagcaattctcctgcctcagcctcccaagtagctgggattacaggtgcataccaccacgcccggctaatttatgtatttttagtagagatggggtttcaccacgttggccaggatggtcttgatctcctgacctcatgatctgcctgcctcagcatccaaaagtgcagggattacaggcatgagccaccacgcccagccccaatggcttttttaaaatggggaaactgaggcacgtgtcaggactcatgtggcatctgtatccatttgcattaggctctgtgaggcaccagaacacctgaggtccagaagaaccagggcttttcctttccgttcaccaacaaagtcgttattaggactagtacttacctgacttcagcaccatctgggccctacagaaactgaggccagtggaggaaatggctctggacaaagggctgctgcttggatgtggccccagcgatggtcagtctgagatcgacactcctagagtccaccaatctctctctggaggcttctgaggttgatccccatactccccacaccaggtctacaactccataataatgctgccagatgtaacaaataaaaatacaaagtttacgtttcagacaaacaacaaataactttttggcaaaaatatgtctcatgcaatatttggaatatattaatacttacgctaaaaattatttcttatttatttgaaatttaaatttaactgggtgtcctgcattttactgacaaccctaccctagaacttcagcatccaagatggaaagtacagcggtaagttggtttcatgttccaaggcagtcctgatacagtactttagttgtggctgctggaggaacatgagaagagttcaactgggctcagcagaaaccagcagaatgatttatttgttataagcacagagcgggtgcgggtggggagcaacaaggcgtgttacagatatttgctattcatgctgttgaatcatgcagaagctatttctgatgctttggtgaaaacccgtcaatgcttaggtagtggaagggtactttctcttctcctttcccacacataaacaatccacactcagagcccaacattataaagaagagaacttcatcttctgtttaccaggaggctgcatttctctttcctatttttaaaaatagcgctagaagcttgtttcaaggaagaattaggaaaactcaatgcaacccaagcagacagactttagatcattgcctcaatgcaaggcatcgtcatgaactctggcagtttacagattctgagacatgcctttctattttgtctggctattcaatattggttagatagactcaggaaaaatatttctagaccatccaaaaatagatcaaagtaaaaagagactaataataatgaaaaacctatcaatgctgtgttctaaaaactatataccttcaagtactacaaaggtgacgtttgtgaatttcatttacttccagaggaagagataatagcaaaaaatgtttccaaacaaccacagagtaatctttaggtttgctttttttctatccactccaaggagatccctgccattttctttcatgtttgtatctccatgtgtacagctggatgaacatcgtactgagcaaaagaagttaaagctcctccaaaagaaacaggtacaaattcaaaaagaaaaggaccagttacaaggtgaacacagcagagctatcctcgctcgaagcaaattggagagtctgtgccgggagctgcagagacacaacaagactctgaaggtatgtccccatgcctcagaataacataatttcttgaatggggcacagagacaggcctctgctactcatggaaagagtgtgaattttagaatcagagaggcttgggttcaaatactgcctctgccccttgcttgcttgtaaccttaaataattttacctccttgagctactttcttcatccgtaaaatggagattagaccagcttcactgtgtggctgggaaaaaattagatgaagttgaataggtaaggtacccgcacagtacctgacacagtgcaggcccttgataaaatgcataccattccccttacctttctattatgttgagtttgtttctaaggtgggccttagttcttttaaaaaaatacatttgtaaagattcagcatttttggtgttataatgaattctgcatgacatgagacaaatggacacacaccgaattgacacagtgaagtgagattgagaaccaaaatgtcaatagtcatctgaaaaaaaggaagctattggaaaaagcactgaagctcttcaggtttaattattcaatctaaaaataatagactgatcacttcatttggtctgcacgggtttcattaattacagcgtaagccctagcagtgtggttaatttgattacacagagacactagctccattcaatatagcaagatgcagagctctccaagatgatactgtgtgcatccccaatcccctttccagctgaagatcctaaatcttttgacaaataataattaatcagacaccagtgttcctgtaaggtagttattattataagcgtttaaaaggagatacttcaagaaacagagtacatgaaaatcactgctgaatttgtacaattgagttaggaagaaaaatagaagagaatcatggttcctcattttcccaaattgttttttgatatttgggaaatggagaaccagtgtgatgaagtcaaagtctcaaatggcaggttttagatgtgctactggcgtcttgtcaacaatagtactgaagacagactcccaggccgaatgggggcctgaggatggaagcatcgtcctcaactcaaggtttggattcaaaggatgcataaatctcttgtgtgcctgcgtaaatccactgtctgtcagtaatgttacacagtaaggagataaaattaaatcagatagggtgggatcatttatcaacaaagagatataaagagtagaatgatacagcgtggtcttcttgggtagtattgaaagacagaatgttcagctggtcacagtgggtcacatctgtaatcctagcattttggaagcccaaggccggaggatcacttcagcttgggaattcgagaccagcctgggcaacatttatgagagcaagacattgtctctaccaaaaatcaggaaaattagctgagtgtggcacgttcctgcagtgccagctacttgggaggctgaagcaggaggatcatttgagcccagaagttcgagcctgcagtaagttatgattgcgccactacactccaacctgagtgacagagagcaatgtctcagaaaataaagagagagagagagagatcttattaataccatccaactggctagagattctcccccaccaaaaaaacaaagacagaatgatcaaagtagcaggagaccctgtaagtgtgcccatatgccctcagtaatggcttctcattatgaacaatgacattaagtattattattatgccagaagttatgctaagtgctttatatacattatttcatttaatcttcatgataacccagtgaaggttaatatctccactttattggtgaagaaactgacactcagcaatccaaattggttgtccaagatcaagcatatttaaatgtcaaaatcaatatttgaaatttgaattcaaattcaaaatattttcaaattttctttctaattttttctttgacccagggattatttagaagtgttatttaatttttatagccgatcatacatggtcttatcttgataccatatgtacttcaaaacaatgtttttcagatgttgggtgtagtgttctataagtaacaattagctttaaatcatttatgccttttttgaatttttttatcaattgctgagaaatgagagttaaaaatctcttcatataattgtggaattgtccgcttattttaattatgtcaatttctgctttatgtactttgaagcattaatattaggtgtatatacatttatgattattatgtcctcttgatgaattggtgattttacctttatgaaatgtcccttagtaatctttttttttttttttttttttgtgagatggagtctcgctctgtcgtccaggctggagtgcggtggtgcaatctcggctcactgcaacctccgcctcccgggttcaagcaattctctgccttagcctcctgagtagctgaaattacaggcacccgccaccatgcctggctaatttttgtatttttagtagagacggggtttcaccatcttggccaggttggccttgaactcctgagcttgtgatctacccgcctcggcctcccaaagtgttgggattacaggtgtgagccaccacgcccgaccagtaataatctttgtctggatgtctacattatctgatatcaatttagccactctagttttcttactcttattgtttgcctggtgtatctcttttcatccattcattttcagcctgggtctttatatttaaagtgcattctttcaagatagcatatagctggatcttacttcttttcattcctacagtatctgccctttaattgcagtactagtccattaacatataatgtacttactgatgtggtttgatatatgtctaccattttattatttattatttgtcacctctgctttgtttatcttgttcttttcctgccttcctttggattatttgaatatttaaaaattacatttcatctcttgtattttgaaattataacactacacattatctttagtagttgctctgtgattacaatatacattcttaatttttcatagtcttcctggagttaatgttgtattacttcacataacatgtagaaacactgcaactaaatagatcaatttactccctcagcctttaagctatcatcattatatgtattatatttatatacttttgtaaagccgatgagacattgttataatttttactttaaacaataatatgtatttcttcttaaattaaaggcaaaactatatcccttttatctacccagatgtttaccattcctgatacttcttattcattctgtagcttcacatttctgtctgatgtcatttccctcagcctgaagtacttcttttagtatttcttatagtacaaatctgctggtaatcaattctcttagttgccttttatctttaaaacatctttattttttttttaattgaaggctaaattcattggatatagaattctgcattgagagaacctattcgtgggttttttttttttttttccttttagccttaaataaatgtgccactatactggcttttaaaatttctcatgaaaatcaacaatcatttgaattattgttcccccatatgtgatatgtcctttttctctgcccttttcaaggtctttgtattgatctttcgttttcagaacttttactgctttaaggccaggagtggtttttttcacatgtaccctacttggtatttgctaagcttttttgtatctgtaattatatgtcttttaccaaatttgaatttctttcagccattatttcttcaaatagtttttctgctccactttctctccatcttcttcccttctaagattctaactctgtgtgtgtagaccttttgatattgtcccacaggtcttcgagtcagtcttcacattcttcaccaatactttttctcttttatttttagattatcttattttgattggtctatcttcacattcagtgattcttttctctctcattttcattctgctctaaatccatccagtgatggttgtgtttcagattttgcgatttttaatttcagaatttccatttggttctttttttgtatgtaacctctcacctgagattttctaccttctcattcattgagataatattttcctttacatcattgaccatagttataatacctgttttaaaatacttgtctgctaattccacatttgcagcattgtagaaaaagccttctctaattgtcttttcttttgagaataggccatattttcttggttcttcatatgtcaagccattgtctattggatcctggatattgtgactattatgttctggagaatctggattctactatatgatgaatagtttttatttttttaagcagacaattaatttggttagattcaaaccataaactttgtctcttgagcagcagctgaaatctcagttcagttcttttctacttagctagactgctttgcacatgtgtggctcaaggccaatcagatttgtgtaaagttcattcacaggatctgggctctatttctctgactctctctttttttgggtgatcttcccctcactgttgagggactatagttgtccagaactctgtattcttattcttctaatatgaaagatggtatgttttatatgagaattttgcccacctcatactcctgccaactgcagatttccctcaagctaaaagctataaagaataggaaactcatgtacaagtgccaacttccctctagagtctgtctgattttgtttactctctagtgtcatcattgtttcttgcatttcatccagagtttacagttgttatttgcaaaagggtcaacttgatatgagcttccttggccacactagtgaaacaccttaagtgtacctaaatctaaaatccatgcgctgggagcttgggaagatatagaaagacaatgtataactaggtatttccgccatcacaaattttagcttttacttttctttattaaaaccgcttctttaatgagtcaaacgcacacacacacacacagacacacacacacacacacatacaacctcacaatttaggataacttaagaaaggattgataaaagtctgagacatgggtttgtttcaacaaaatcatacatatattcaaagtgataaatctgagcctcaaactatgctgaaaaagaactgcctagtaagagaggggtaagtgtctcagggagcatgattttcctaaagaaatgagaagcatttgttgtcagaatatcacagaattttaatgtggaaaggactgtaggaatgatctagtccaagctactcatatgtctgtacataaattaataattcactgattcattaaataaacatttactgaatacctttggattatgtgccaggcacagcaccagttgtaagatgcacaatgatgcttgcaaggtttttttgttatctcagacttcatccctcaattttattgacattattttgactttgaataatgtatttgataaagaaaagataattttatctcagacactgtccaaatgattgaaaatccttctaacaatggactcaaattttataagattttgctagatttcttttggtctcattgaaaaacaatataggccgggggcagtggctcaacccccataatcccagcactttgggcggccaaggtgggcagatcatctgaggtctggagtttgagaccagcctcgccaacatggtgaaaccccgtctctactaaaaataaaaaaattagctgagcttggtgatgcgtgcctgtaatcccagctactcagggggctgaggcaggagaatcacttgaactcgggtgttggaggttgcagtgagccgagatcatgccactgcactccagcctgggcgacagagtgagacttcatctcaaaacaaaacaaaacaaaacaaaacaaaacaaaaaatatatatatatgcaagattacatcttttgggccaggattggcggttatgattgtttgtttgacatttatttagtgccatcctatcatctgtaccttctttctatagccagttcccaattaaaaaaaaaacaacaactcagacttgcatggggtgtttcatttattcattcatggaatatttataaatacaaacggtattcaaatcatggtctgtagttctgattccaaacttgctgacttctaagctaatcaggaccagtgaggaaacaatcataatcacacatatatttagttgctcctaactggtaaccataattatttttagcgaaacacatatagtaagtgttagtatacaaagttcagggaaataacatctcggatagtttatttcttcagtttaagaagtacagatatcttcaatacccctgagaagttgttgcttaataaaggtttataacatgaataaattatgattctgacatcaggagtcacattagagttgggaaatgtgttgttattatagaggaaagaagaaacctaatgataaaatattttcagagcatatattctcagcatcagtttttatttggatcacattattctgttatgataaaggtctgtacaattacttctgttaaaaattattatttcttttaaaaaatcctgttacataatttgaacttggtaggcaatcaaattcagtataattttacttgccaacaacgaagcaagctttcatattaacaattaatcagaactgaaaggaatcctaaaatgtctgtatcatttgtcagccacgtaaatgtctctatctttggtaggatgtagcaaaattaaacccttttattcaaaaagaataacaatcgcaaagcaattctcaatatagatatggaggaaattggagctcattgttagtggctagcaatgaatggagagttttgatttaggagaaaagagaacagaaatgatataaaagttaatttgcaattcttcaatgttaacaaagcggaagaaggaaaattagatgtttcactttagagttaaagaagatttgaaacttaatattgctttcagattcaaaatttacattgaacattttaattaccctatgtgacacatttaatgattgttctttcaaaaacaaaataatatccagcatgtttggaaagattcccttttatattcttgaatggctgtaattgagctatgctgtcttagtttccttttttaaagctttttgatgaaagttttttctcacaaatagaaaatttttattgtgatcacttatatttacaaaacttggtaatataattatgtggttaatatgccatggtttttacagggaaatataagatctattgttctccctttaccaaaccagagaaacacatgatctgtctcatccatcagtaaactcaagtggcctttttttcaggccacagccaagagatcaaaatcgtgtgactgtgtgtttgttagaaatcgctgcagttcattcactcagcaagagacgcatcatctttaaaacaagtctattcatcactgactacaaattcaaggccttcacagcacctgttctgagtaactatgtactcacagctgaaacctttactcatacatttattttggggctgagcagctttagctctagagaactgagaaaaaacatcccacctactctgcacacttatctcctttaggtgacctaatgctgagttctataaacccggggtgcatttaaacaaaatgttttgctttttatccgcaggaagaggcgcttcagcgggcacgtgaggaagaagagaaaaggaaggaaatcacaagccatttccagagtaccctcacggacatccagggccagatcgagcagcagagtgagcgaaatatgaagctctgtcaggagaacacagagcttgcagaaaagctgaaaagcatcatcgatcagtatgagctcagagaggaggtgagaaccacatcaaacaacttagaacagtacatagatccggatctgggagctaaaggtgggaacttggttaataagacagttacagccagccctctcaactgattaatatttaggattggatttccttgacgagccaaaatgaagacagatggtcttacaaaatacctgactgaaagtcatatgggatttcttcaaaactggcatcactacaaagtaaaggcaataaatagaaagtgataggctgtgggcacagttttccttgaaaataatatttctcagccttttaaaaatcctctctctatagccaaaaataactcacgcactccctcttaagaattgccatgtcatctaaattaagagtctgtattctggccaggcgcggtggctcacgcctgtaatcccagcactttgggaggccaaggcaggtggattaagaggtcaggagttcgagagcagcctggccaacatagtgaaatcccgtctctactacaaatacaaaaaaaaattagccaggcgtggtggtgggcgcctgtaatcccagctactcgagaggctgaggcaggagaatctcttgaacccaggaggtggaggttgcagtgagctgagatcacgccactgcactccagcccaggcgacagtgtgagactccgtctcaaaaaaaaaaaaaaaaaaaagagtctgtattctatgtaccctaccaggccaataatagtattaataatgtaatcattgtaataataatgatatcatttattcagtggttagtttgtatcaggcaatgtgctaagtgctgtactttacataccatatggcatttaattgtctcaacaatcttatgcattagataataatatattatccatatcttatagatgagaagcagaagctaagagattaaaccacttacccacagtcacaagaggcaaaagccttttactttgaataggttatattagggggatgatcaaggtcttttgttatacccaaattatattttaatatttaatatatttttaagattccagataccctctcaggattttgacacatcatattcctttccctatcccacccaaattttaaatctctgctttaaaatgtaacataacatagtcaaagcggctctgttggtaacatgctaagattttatcaagcacaaaactgagccaacagcatatggtcgcggtggttaggtaaatcaagaaactcctaatagtaagccaaaatgccatgctaccattttatcttgtcataaggatcaatcccgctccagaatggaggttcagactaaagaagataggaaggagtgaaaggaaaatgtccatattcttcagagagatctcagatgggaatgggctgctatgctagttgtatattcctgggactggttctaagtaaagcccaaggggagaattccatgtcctgtttctgattggacctcccagtgaccaggaatttatccatcctgaggtagagttggaagtttctcttgaccaaactagtccagaggtcaaaaggtgtggcgagctctgcacatttgcgactcaatttctctatgacccttggccttgtcatctccaccagagcaacagagtagaattcaggggggctcaggcctcactcccagacctcggaccacatgctggcaccccaaggctttctcacaacgccagaggcaagaatgcagagaattcatcatgataaattgcacaagtgttgcaattaaaagtggttttatattcacagaaagagccaaaataccaaatgatacaactgtagcccctgtatattgtatactgatacatcattgtctgtgctgtctagcataataaatagcatcatatctaatagttaccaaacgtagaaaaatattgtatggatcttttggcattgacactgctgaactctggtgcctctaccttttatagctagctttgtgtgtgtggtgcaaagtcagggggaggggttcaccaatttacagctttattataaagctgtaagtgatgccaatgcatttatccctctcttcttttaaatcttaaaacctggggaatgtgtattaatgtgaattattttactttgcatttttaagcaccaataataaaccaagctttctatgtacactttatttttcttagcatctggacaaaatatttaaacacagagaactgcagcagaagctggtggatgcaaagcttgagcaggcccaagaaatgatgaaggaagcggaggagcgacacaaacgagaaaaggaatatgtatttatcattttagtcgttgtgcatatctggtctacctcagtgtcagagacactctgagcaagttgttttgtatttatttatttatttatttatttgagacagagtctcgttctgtcattcaggctgaaatgcagtggcgtgatctcagctcactgcaacctcagcctccaggattccagcgattctcctgcctccccaagtagctgggattacaggtgcccactaccacaacaggctacttgttttgtatttttagtagagacagggtttcaccatgttggccaggctggtcttgaactcctgacctcaggtgatccgccttcctcggcctcccaaagtgctgggattacaggtgtgaaccatcgcgcctggacgcaagttgtttttataatggtcaaagagcactagactgatggagaaagagccccagcttctatggagaactaaattagccagcccagtctgaggcactatgtctacactactttctacataaaatagtcattcatctattccacacatatttttcaagtgcctgttatctactaagcaccgtgttaggtgcggggacatagccgtgaacaagacagagaaggggcatctcccactatggagattagagtctaactggaaagagacaagcaatagacaagcaaacagggaagggtcatttcagacaataatcaccactactaaggaagtaaggagaaactgagaaggggccaaagaaggggacgtactttagattgagtgaccaggaaggcctcctggaggggcgaatgcttgagctaagccctgccagatgaggagctgctacttggagcatcgtctccagcatctgcagcagcaacaaacgccctaatgctggaaccaatttggtgtgctccagaaacaggaaaaggtcagggaagcaagagcatgggggagaggttcaaaatgaagttggagaggtaagcaggtgccaaactgtgtagctttgtagggc

SEQ ID NO: 767 - DNA, 32742 bp, Homo sapiens; identical to SEQ ID NO: 30
  source 1..32742: mol_type = other DNA

SEQ ID NO: 768 - DNA, 32744 bp, Homo sapiens
  source 1..32744: mol_type = other DNA
taatttgtttacatatctatatcttagtctagacatattgaaaggcgatgaagagcagggaaagcactgtattcgctttcttttcttcagcgttcatccagcacagtgcctggcatacggtttgccctcagtaaatgtttattgcatgaacacctcccagcttcgggcaggactgaaatctatccggttaactagtgaattcccagactctccgtctgcgtggcagggacatttaaacccccagcaccgtgattggctccagctgcaggggtgtgtctgtgtccgcggcgaacgggaagtgagcaggcgcgcgggctcggcgcgcgcaggcgcgactagggtgcagcgccaggtccggtgttggggtgtccgagttgccgccggagaggagtggcctcgcccgcttggtgagtctccaggagtgggacggagggagctggccgggatgaagtctgagactatgtcctgagaagaaagagtgtatcgtattggttgaaaagttggtggggtcgggcttaagcggaggagggggctctctggcccttactcggcagatgggcccggagagaggacgggaggtgccgggagaacatcgagggaccagtggaggaagggtagctggatggtaattctctggacccttcctcgaaattaaacagagatcactttccgcccctcacccttactgtgttgctgtagttgacattaatagactgcctgtatggtgaccacagtgatcagatagctctgagataatggcttgaggaaggactctgaggttcctggtattggatagcccttgctctctagaaaggttcagccttacctcgcggcattactgcacaaattagaggatcaggaaaagaatgaatttcacaattcgggattggagtggtggggggaaaaagtactgtaaagtgtagtttcatctcgtcctttttttcttctttaatcagtcaccacaatgttaggaaaggcagttgatggtaggaggaaacgtaaagacataaaagtgggagaggaaaaaaaagtcaagaagggagtatcattttgccttttgctatttgtcatctcctggaatggggtctgtattagtgcgttctcacactgctataaagaagtacccaaggccgggcttggtggctaacgcctgtaatcccagcactttgggaggtcgaggagagaggatcatatgagatcaggagttcgagaccagcctggccaacatgatgaaatcccatctctactaaaaatacaaaaattagccaggcgtggtggtatatgcttgtaatcccagctactccggaggctgaggcaggagaatcacttgaacctgggaaacagaggttgcagtgaaccgagatcgtgccactgagcttcagcctgggagacagagtcaggctccaactcaaaaaaaaacaaaaagcaaaagaaatactcgagactgggtaatttataaaggaaggaagtttaattgactctcagttctgcatggctggggaggcctcaggaaacttataatcatggtggaaagcaaaggagaagccaagcaccttcttcacaggatggcaggagagagacagtgaaggggaaaaagccccttataaaaccagtatcatgagaacagcatgggggaaaccacccccataatccaatcacctctcaccagattcgagatgagattatgaatagccaaactgtatcattctgcccctggcccctttctttctttctttctttttttttttttttgagatggagtctcacactctgtcacccaggctggagtgcagtggcgcgatcttggcttactacaacctccaacacttcaagcgattctcctccctcacactcctgagtagctgagactacaaatgtgtgccaccaaacctggctaattttttttttttttttttttttgagatggggtcttgctctgtcgctcaggctggagtgcagtggcgcgatcttggctcactgcgacctccgcctcccagggtcaagcaattcttctgcctcaacgtcccaagtagctgggattacaggcacctgccaccaggcctggctaatttttgtatttttagtagagatggggttttgccatgttggccaggctggtctcaaactcctgacctcaggttatccaccggcctccgcctcccaaagtgctgggattacaggcgtgagccaccgcgcctggctaatttttgcattttttagtagagacggggtttcactctattggccaggctggtctcaaacgcctgacctcatgatccacccacctcatcttcccaaggtgctgggattacaggcatgagccaccacgcccagattccctggcccctttcaaatctcatgtcctcacagttcaaaacacaatcatgccttcccaacaggcctccaaaatcttaactcattccagtattaacccaaaagtccaagtccaaagtctcatctgagacaaggcaagtcccttttgcctaggagcctgtaaaatcaaaagcaagttagttacttctaaagatgctatgggggaataggcattggtaaatgctcccattccaaatgggagaaattggccaaaacaaaggggctaccggccctatgcaagtccaaaatccagtgggacagccattacgtcttaaaacttattttaatctccttagactccatgtctcacatctagggcacgctgatgccaagggtgggctcccaaggccttgagcagttctgaccctgtggctttgcagggttcaggcccagaggctgctctgctgggctggcattgagtgcctgaggcttttccaggttcatagtgcaagctgtttgtagacctgccattctggagtctggagaatggtggccctcttctcacagctccactaggcagtgccccagtggggattctggggggtgggcggtgtccaatcccacgtttcctttctgcagtgccctagcagaggttctccatgaggtctcttccactgcagcagactttggcctggacatccaggcatttccgtacatcctctgaaatctagacagaggttcccaaacctcaattcttgacttctgtgcacctgcaggcccagctaccacgtggaagctaccaaggtttggggcttgcaccctctgaagcaacagcccaagctgtaccttgaccccttttagccaggagctggagcagctgggactcagggccccaagttctgaggctgcccacgaaaccattttttcttcctaggcctcaggtcttgtgatgggaggggctgccatgaagatctctgatatgccctggagacatttttcccattgttttggtgattaacattcagctccttgttacttaacgcaaatttctacagctggcttaaatttcttctctttgctttataaattacttggtggtctcagctcagtgatccagtgatctgagtgatctcaggaaaagaaagaaatattagcaaataagagaaacaccttacattgccatactcctttgacaggtcatgtgaaagtaatttaagtgatcatatcacttagcctgcagcttgaatatttgtctcaggctaggttttactttaggtgcttgtagtatgtgtttatgcactagaaagttagtgttatcatagttccagcataaggatgtcttactgtgccaaataaacagtggaattcctatatgtatcttgatatttgtttcttgtacactgaatgaacttaggtacaatacacacaagcccacttaactaaaggtcacatctttttttttttttttgacagagtttcactcttgttgcccaggctggagtacaatatcttgatctagggtcacctcaatctccacctcccgggttcaagcgattctcctgcctcagcctcccgagtagctgggattacaggcaggcgccaccatacctggctaattttatatttttagtagagacggacggggtttctccatgttagtgaggctggtctcgagctcccgacctcaggtgatccgctcgcctcagcctcccaaagtgttgggattacaggcgtgagccaccgcgcccggtctaaggtcacatcttttctaatcatttagaacacaacctagaaccagaaagaaagtaaacaaaaacaggcctgtactcatgggacagctgtggagtcttcacctatgagtcataccaccatcataatttttgccatttagagtactgttgttattttacttcatgtttaatgggttttttaaaaaaacattgcccacttccaaagtgataatctgtgaaatcatggtttttatgtattttatagcttttttagcatccattataataaatacataactattaaatatataactctttcatatgtaacagttaaaatcatattcttgctcagcactttggaagatactgctttgggcctaatcagctcatttttaaaatgaagattgaactaaagcttatgggcttgaaaattctgtgatctctatgatgatgttcattatcataacacaattctagcaaagtttactggttccaccagatgaaagtagattagggccgggcggtggttcatgcctgtaattccagcactttgagagtctgaggcaggaggatcgcttgagcccaggagtttgagaccagcctgggcaacatgccaagactgtctctacaaaaattttttaaaaaactagctggacctggtgcccagtgcctgtggtcccagctactcagaaggctgaggtggaggatcgcttgagcctgggaggtcaaggctcctgtagattaaaataacaaaaaggaaaaagaggatgtttgctctttgatatcagctgcctttttttttccctgaattcaggctttcccccgcccccgccccaatttggttcctttatctgcaacactctggacatctgtttttgagctatgtttgtactccacattgtgtatatattagcatgtataatattataatgttgcttatctccaagagtgctgaactttttattccattactatattttgtttccagatctgtaggttgacagacgggcagatgacaaggactgctcttttcttttcccttttttttttttttttgagacagagtattactcttgttgcccaagctggagtgcaatggtgtgatctcggctcaccgcaacctctgcctcctgggttcaagtgattctcctgcctcagcctcctgagtagctgggattacaggcatgcgccaccacgcctggctaattttttgtgtttttaggagaaacgaggtttcaccatgttagccaggctggtctcaaactcctgacctcagatgatctgcctgcgttgacctcccaaagtgctgggattacaggcatgagccacctcacccggccaggactgctctttttctttgctgtgataggtagaaacttgaaacagaaggatccagtgcctctaacaattagaggaagtggattatggagccaggaaacaaaatgtactgtgtttttttaaatagtaagagtagaagaagcccatttgtattcatttagattcactgacattttggtttgggtttcaatttaggttgtattgctactaaagtatttaaatcactgattcctatgtttttccagaattctctcttcttgttgctttctgtaagttctgtaacttagatgtaaagtttgtttaaatttattttgacagtgttttggaaattgaaattactttcgatggcctttcaatacttataaaactcaagccaggtgtggtggtgtgtctgtagtcccagctacctgggaggctgaagtaggagcatcagttgaggtcaggagttcaagaccaacctaggcagcatagcaaaataaatttcaaacttcttggtatagtatacaaagctcttcacaatatgtgttctgtcttgaaagccatcccctgccctccatacatacacacacacattatattcctgcctcaccactgaagccttacattgtggctttttcttcctttttgataatttaatttaaaatcataattttttggacttgatcatacttggattttgacccacacaaatgagaatcagggtgtttgtgtttttttgtttgtttgttttttaagacagtcttgctgtgtcaccaaggctggggtgcaatggcatgatcatagctcgctgcagcctcaaactgctgagctcaagtgatccccctgcttcagcctcctgagtagctgggactacaggtgcacgccaccaggcctggctgattttttttttgttgtttaattttgtgtagagatgggggacttgctttactacccaggctggtctcaaactcctggctttaagcaatccttttgctttggcctcctaatgtgctgagattgtaagcatgagccatcatgcctggccaaaatcacgagagatatttcataattattatgaaaagttataatagttttattgagcactgtgtgccaggcactgctctaaatactgtgcttgaattagctcaatccatgtaacaacacttaaagtaagcattattctcatttaatgaggaaactgaagcacagaaaagttaacagtaatcaggatttgaaaccattatgccttcagatattgggcacataactactatactatgttgtcttttgtataagcaagaatgccactcttttctgttgggggtatcctttccagggacgtgagtgcttatattctctctttttttttttttttttttgagacggagtctcgctctgtcgcctaggctggagtgcagtggcgcgatcttggctgactgcaagctctgcctcccaggttcacgccattctcctgcctcagcctcctgagtagctgggactacaggcgcccactaccacgcccggctaattttctgttttttagtagagacggtttcaccttgttagccaggatggtctcgatctcctgacctcgtgatccgcctgcctcagcctcccaaagtgctgggattacaggcatgagccactgcgcccggcagagtgcttatattcgctgtctgtagcttctgactcttaatatcggaatatttgaaaaactaaccagaaagcatcaaagtggctgggtgtggtgtctcacgccttctggcattttgggagtccaagacagaaggattgcttgaggccaggagttcaagaccagcctgggcaacatagtgagccaccctatatctacctaaataaataaataaataaataaagcatctaagtgaacttaatcagagctaaactatgtggatggtttcggtgaatatttcattcaggcagggtgaatccttgccaattaatctcaccccgtacttggtatctccctggcagataccacacttatgcctgccacattgtctcttcctgggtagattgccagcttctggctcttgagccccgttcttatctttcacatagaacgtcccctttctgttcacataaccattctcattgatagggttaataaaattgattacaatcaaacctacatctacctccccagtattactcctgggtcacttagagtagaattgtggaagttcctaatttgacagggacttgaagaccaggcgttggacatcaagcaattaagttaccataggtgcttctgtaaaactgaagtttaattttttttgtaattagagtcagggtcttgctatgttgcccaggttacatttaaactcctgggctcaggtgatcctcctgcctcagcttcctgagtagctgggactataggcctgaaaatgtaattttggttttctttttggttcctgatttttagtgggactttcccatttgttaatatgatttctgtcttgaatcttgtgcttcagtgtactttgaaaccaagctgatttttgtttgttttgttttttcgtgttgttttttaagatggagtctcgctctgtcgctgaggctggagtgcagcggtgcgatctcggctaactgcaacctccgcctcccgggttcaagtgattctcctgccttagcctcctgagtagctgggattacaggtgcccgccaccacgcctggctaatttttttttttttttttttgagatggtgtctcactccgttgcccaggctggagtacagtggcacaatctcgactcactgcaacctctgcctcctgggttcaagtgattttcctgcctcagcctcccaagtagctaggattacaggcacatgccaccacgcccagctaatttttgtatttttagtagagacggggttttgccgtgttggccaggctggtctcgaacccatgacctcaagtgatctgccctcctcagcctcccaaagtgctaggattacaggcgtgagccaccatacccggcctttggtattttttagtagagacggggtttttccatgttggccagtctggtctcaaactcctgacctcaggtgatccacccaccttggcctcccaaagtgctgggattacaaatgtgagccactgcgcctggcctgaaaccaagctgtttagtagatacgattctgtgatgtacttagtatatttgcatttgagttatagactttgtatggtaaaaagaaaagagtttttaaaaagagaaaaaaatatgtatgtatatttgcatagttttggggcctatatataaaaatggttaaagttgtttgtgtagaaggagatagaaaggaaagcccagagaggaagtaaaaggaggaagccatccttaacataaaggagacccttgccaggcaaagtggctcatacatgtaatcccagcactttgggaggctgagccaggagcatcacttgaggccaggagtttgagaccagcctgggcaacatagtgagaccctgcctctacaaaaaaaaaaataataatataataaaagggccaggtgtagtggtgggcacctgtaatcccagctactcgggagactggggaaggagaatcacttgaaccctggggcagaggttgcagtgacctaagattgcaccactgcactccagcctgggcaacagagcgagactccgtctcaaataaaataaagtaaaataaaataaaataaaaagtgagactctgtctcaaaaaaaaagttgtatatagcctatactttatatcatcaactttaatattcaaatttagccttgcagatggaactattaatatttagtagctattactttcagctacatttacataaatgtgactcatattcaacattgttactttccttttgttttgcctactatttatttccacttcagtaaaaatattaatataatggctaacattgaacaccggccatgtgcaaggcattgtactaagtactttgtgtagatcatctctttttaatcttcacaaaaaaaacaaaactataaaatagaatgttatccttgttttacaaatacagaaaccgagttttagtggtgttaggtaattaacttggggtcacacaacaaatacattgtgaggctggaatttatatgctggaattcccactcacccactatgctatcctgctataaacagaagtttcctcttgctgcggatgcattggttaccatggacgtagacttctatcaagccaaagagaatgctgaacttaaaagtacagtaataaaccctttgagtgtaactcattgaggagctttattgtgattaattttcagagaaggaataaggcaggaaactaatttggtagaatattttagctgcaaaatccttgtttaccagtataaaaagaattatcttataaaatcattctttgcaagaccctgtgaaattgatggtgattttttttttctttttttttcagacagtcttgctctgttgcccaggctggagtgcagtgagtcttggctcactgcagcctctgcctcccaggctcaagccacagacgtgcactactgcactcggctaatttttgtgttttctttttagtagagctggggtttcaccgtattgggcagtctggtcttgaactactggcctcaagtgatccgcccacctctgcctcccacagtgctgggattacaggcatgagccaccacgcctggcctgatggtgatttaaagtgctctttcttcattacttcttgagtagctcaccagttttacaaatgaagccacatggatcttccaaggccttatttaaattccagggccttttttctgtgtatttctttccaagaagctcatttacttttcctttcttcttttcttctcttttcttttacttcctttctgcttgcattttttttttttttttttgagacggagtcttgctgttgcccaggctgaagtacagtggcatgatctcggctcactgcgacctttgcctctcgggttcaatcaactctcctgtctcagcctcctgagtagctgggattataggtgtgcatcaccacgcctggctaatttttgtatttttagtagagacggggtttcaccatgttggccaggctggtcttgaactcctgaccttaggtgatctgcccaccttggccttccagagtgctgggattacaggcgtgagccaccgcacctggcctcttgcttgcttgttttcttatctcctcccttcctccctccctcccttccatttcttttccttctttcttttcttttctttttttttctttcttttttattttttttgagacagagtcttgctcttgtcactcaggctggagtgtagtggcatgatctcgactaactgcaaccactccctcccgggttcaaacgattctcctgcctcagcctcccgagtagctgggactacaggcgcccaccaccacacctggctaatttttgtatttttagtagagatggggtttcaccattttggcaatggctggtcttgaactcctgagcttgtgatccgccaacctcggcctcccaaagtgctgggattataggcgtgagccactgtgaccggcccatttcttttctttctttggggtcttgctctgtcaggcaggctggagtgtagtggggatcatggctcactgcagccctgaactcccaggctcaagtgaacctcctaactcagtctcccaagtagctgggactacaggcactggtcaccacacctggctatttttgttgttactttttgtggagacagagtcttgttgtgttgcctaggctggtctcaaactagcctcaagccgttttcctacctcagccctcaaaagtgccagagttacaggcatgagccgctgtgcctagccaatagacttcttttcattttctaaattaatgtagattattttcagcttctgaaataatagaagacagttgaaaaccatgattactgtggtctatttctccttcaatttaactgtcttctttgagtctgtagaagagataaaatttcatggtcttatagaaagcatctgaaattttgaaatgagccatcatataggattgcttgacctattttccaatattcagcagctctcatatgatctattgtttgttaagggggcggtggatacagtcaacagaaaaaactttttttttttttttggaaacagggtcttggtctgttgcccaggctagagcacagtgatgccatctcggctcactgtaccctctgcctcccaggttcaagtgattcttgtgcctcagcctcctgagtagctgggactacaggcatgcgccccatgcccagctaattttttgattatttgtagagaacgggtctcactatgttgcccaggctggtcttgaattcctggcctcaagcagtcctcctgccttggcctcctaaagtactgggattacagacgtgtgccaccactcccagctccagaaagactctttatcagaccatgaattatacttaatttgcgagtagatcccgacttgaataatcaatctgctctttactgacacagccgccttgggtaagttacctaaactgagccttagtttctccatctgtaaaatagtataatgaagataatgatgtagataaatacttagtagggtatctggtgcctaagaggtactcagtgaacttttctttccctgcctaggtttaaattagaaaagaaaaaggtcaaattaggagtcttttagtaagcccaagtgaaccatagcatgagaaatagggtgtaaaagcactgagaaaaatcttgcattttcctctgaaaggcacactattagcatagtataagttcccagcagcactggaaaaatgacacaagtatttaatagattagattaaatctgagaaaagtacgtttaatggcatctttgtatcaactgatgttttatttttcatcccaccccaccagttctcttttctgtaatattctgggtaaccttttcctgattccgtaaggaaaatgtctgcagagaataataaatatgagtaaggctatgtagctaattataggttacattctctctgactcgtctcagcaaacttacaaagaccaataagaacttgaggagtattattccttgtctgtctttgtccttccccttacaattctactttgactctgttactttcatatacagttgacccttgaacaacatgggcttgaactgcgtgggtccacttataggtaaatttttttttcagtaaatacaatcagccctccgtatcagcaggttccacatctataaccaaatgcagatagaaaatatggtattcagccaggtacggtagctcatccctgtaattccagaactttgggaggctgaggtgggaggattgcttgaccccaaaagtttcagaagtttgagaccagcctggataacatagtgagaccctgtctctataaaacagcttaaaaattagccgggcatgatgcatgcacctgtagtcccagctattcagggggctaaatgggaggattgcttgagcctgggagggcaaggctgtagtgaacctgattgcaccaccgctctccaacctggatgacagagtgaagccttgcctcaaaaaaaaaaaaaaagaaagaaagaaagaaaagaaaatacggtattcatacatgcaaaactcccgtctacagagggcggacttttatatctgcaggttcctcagggccaattggtatccacaggcagtactgaatccaaccctctgagcgacagccacactaaacttgtgctcaaaaccctcaagaacacagagtaatcttaggcagctgcatcctggcgttagcatgccaaacttgggagtagatatctgttacttgtcttgcgtgttgtctggtcagggaagaaaaaaatattaagcagaacttcgagttcacatggaaaggatgtgtccttcagaatgacctcattgcgatgtcaggggtgattcctcacgttatccatctcccagttatatctgctttcttttttcttttaaagaaggcagcacagaggtcaggagtgcattcactcctaactctggagttttgctttttttttcctaggaagctagcaaagactgacttgtaattggcaataatcacctctaggaatagaattacaaaattacataatttgtgatatttgggcttccttaccccagaatgtctcccgacccacaggatactatatctgaaaacctcactaagggtgccttttccaggcactaatggattagtgtatattatttttcatattttcttctctgtcgggcattgaggagttacacatgacaggaatagataacttcagagcattactgcctggggagggcaggctttggagaggtatctcggttggggctttaggaagtgatggaaaagcatgaggctacctgggcagatgtggggtattatagaaaggaaaggtgtgcaaaagtgtggaggtgagagggtacaaaaaataatctccatttactttttgtagttgcaaataggaaagagtgacaaaagaggaacagtagcatggacatgtgtatgtatgataaagcttaagactcaaacaattagcaaattaataaaatacctggttccttttatgcttgtatctaatgaatgatatctttatatcttgattatatcttagtgtggaaactttttgcctgaagcacagtctatggcaagcaagatagaaacttaaatttggaacttaaaatgctttttttcatgagcactaatggctttaatcaaggctcaaaatctttttttttttttttttgagatggagtctcgctctgtcacccaggctggagtgcagtggcacagtcttggctcactgcaacctctgcctcccaggttcaagcaattctcctgcctcagcctcccgagtagctgggattacaggcgctcaccaccactcccggctaatttttgtatttttagtagaaacggggtttcaccatgtcgatcaagctggcctcgatctcctaaccccgtgatccatccgcctcggcctcccaaagtattgggattacaggcgtgagccactgcgcctggccctcaaaatcttaaaccataaaacagctatgacagtagaattataaacaaggccaggcacggtggctcaggcctgcaatctgggcactttgggaggctgaggtggatagatcacctgaggtctggagttcgagatcagcctggccaacatggtgaaaccccatctctactaaaaatacagaaattagtggggcgtggtggtgcatgcctgtaatcccagctccttgggaggctgaggcaggagaattgcttgaacccaggaggcagaaggtgcagtgagtcagggttacaccactgcactccagcctgggcaacagagtgagactccatctcaaaaaaataaaaaaaataacatgatagtagtggttcaattaaaaacaactgaaaagatttaaatttttttgtttgtttgttttttgagatagggtcttgctctgtcacccaggctggagtgcagtgccatgatcttgacttacttcagcctcaacctcctggactcaagcaatccgcccaccccaacctccccggtagctgggactacaggtgtgcgccaccatgcctggctaatttttgtatatttggtagagatggggttttgccatgttgcccaggctgaactccaactcctgagctcaagccatccactcacctcagcctcccaaagtgctaggattccagtcatgagctaccacacccagccaaaaatgactgaaaagatttatatgtgatcatatcatacacttgcaatagcagtttttggtttgtggctctagtgattctttgcgagctttgtgctactgttacatgcagctttgtttctaagagccatgtaaatactttgagagtacaccctgtttttctacttatttgttcattcagctatttttggagtatctaccatcagatcctattaggtgttagagatacaaagataaaatctctgccttccaagaattcagtccagtacattcttggggaattaagttttctgcttatcaaagagtatatccatggcaaggtttctcacctcaaattgacattttgggtcagattattctttgctggagggctttcctgaagagtgttgtaggatgttaagcagtttccctgcctctacctactagatgccattaaccagccccatcacctggcccaagttgtgacaatcaagcaactccagacattgccagattcctggggtcaaatctgtaataagaaccagagtttatctgtgtcattgaccgtgagttttgataaatgagttttgagaaaattcatacaaagctagcaaatgtaacaaagaacctagatccgttgcacaatgcttgttattactccacatgacttctcaaagaggaattagataacagccgtgctgagtaacacctacgaaatgttttattttttagcttggatgtctatgagatctccttctgagttactgtgtataggagaataattgtttggtttcttagggactccagtaaaacaacaaaacaatataagccactggaggggaagagtctaatgcataataaaaaccttagtcttttccgagctgtttgtaccagcatttcccttttcttgttaagagtgaaagtattttctccagtgagtgtcctggacaactggcatatttagaaatgtttcctgtgttcttcaggcacataacttcaaattttgttactttactaaattggacttttcttcacctactgcttttccatgttcagacaacacatgaagaacattgaacaaccaaaaattcactttaatagtcttttaatgcttgtcttccagtaatgccttgcttctctaagtagaggatccactttcctgttggaaagagtacttccctagaagtcctaaaacctgtattttaggttcacccttggcactcttattaaacattcatttagcctctctcggtcttgatttctttacttgtggtagactaatagatatagaaagaggttcttttatcctgttttcctgataagttcctaaattccataaatctacactttttgctcacacaaacttttatatatccttattcttatacaatatccacatttccatttctgtgcctaatagagttttgattcatcatggataatctgtcatcagaagaaattcaacagagagctcaccagattactgatgaggtaaatgttttacctaaaataagtaaataattctatttcagttttcatattggaggagtgagagagccttcttagggacattttggcctcttcctagtccattaatatcaaagaacacatttgctccttagtgccattgctggtttttattttctttttaactcaccagaaaactaaagtgaaaacaatttgtatgatttttattttttaggtaattattaatattacttaagtgtaacaaagatactctactatgtatttgagaaatgctagacttctatttaacaatttcctaatatctgtaatttacttagatttctacctacattaaatttttattcccatgaacttcaccatccaaatattctcttttttaaaaaaactttttctttcaacatcacactggaagtccttacacattttctcttaaggagcgcctgaaaataactaaaaatgtagtgatcaacttacttttttttttttttttttttttgagacggagtctcactctattgcccaggctggagtatagtgatgcgatctcggcttattgcaacctctgcctcctgtgttcaagcgattctcctgcctcagcctcctgagtagctgggattataggtgtgtgccaccacgcccagctaatttttgtatttttagtagagatggggtttcaccttgttgggcaggctggtctcaaacttctgacctcgtgatccgcccacctcagcctcccaaagtgctgggattataggcttgaaccaccacacccggccattgttttgttttaaagggaaggataggctggcaattctttttgttttttcctttaatggaaacagtctcactatgttgtctgggctggtcttgagctccggtactcaagaaatcctcctgcctcggcctcccaaagtgctgggattataggcatgagccactgtgcccggcctgagctggcaatttttaaagatagaatagcatcatgaatttggcctgtgatcagatttttttttctacatattttggaatgctaaaattctgtgttctttcctagtctctggaaagtacgaggagaatcctgggtttagccattgaggtaagaaaatgttagtcatcaacttaagtatagaaatttataggagcgatcctaatacttctggctggaattagtattaaagggtaatgtatcaatatgctttattatttgaaattaacagttgctgaaatgtcaaaccatgcactaatgggaattttctgtttttccctttaacagtattggaatatgacagggaagatgaattcactatgagtttgtgacttaattattttgggggctgctatgttaaagtgtgttagtttaagaatactagttctgtctgtagctctaatcctctgagagcttgggtttctaaattattctgtgttgctcttgtaggttttgtttctgttgtttttggtttgttttgttgtactatcagcttttccccccttgtcttagtctcaggatgcaggaatcaagaccatcactatgctggatgaacaaaagggtaagttaaattattagcagaaattcttaatttgactgtgatgccaaaaagccctatcaaattagccacatacaaatttcagcctttgggagagccttccctttgtaaaataagaatgttatgtttacttcttgtcttctgatttgaattatatatcatgttcactgtctatttgggatggcaggcaacaatgcccaattgtatataccaagtatgtgttaggccagcatggcttattttgtgtattggttatatgtgccttagacattatgatagtaacatagctgggattacaggcacctgccaccacacccaactatgtttttctttttttttggggtgggggacggagtttcgctatttttgtctagttttgggggtgggggatgaagtttcgctcttcttgcccaggctggagtgcaatggcgtgatcttggctcactgcaacctcctcctcctgggttcaagtgattctcctgcctcagcttcctgagtagctgagattactggtgcccaccaccacacccggctaagtttttgtatttttagtagagacggggttttaccatgttggccaggctggtctcgaactcctaacctcaggtgatccacccgccttgacctcccaaagtgctgggattacaggtgtgagccaccgtgccgggccttttgttttgttttgttttgtttttttaatttttattttttgagtcggagtcttactctgtcacccaggctcgagtgcagtggtgcaatcgtggcttactccaggatcctctacctcccacgttcaagtgattctcctggctcagcctcctgagttgctgggattacaggtgtccaccaccacacccagctaattttttgtgtttttagtagagatagggtttcaccatgttggccaggttgatgtcgaactcttgacttcaagagtcacttgatccgcccacgtcggcctcccgaagtgctgggattataggcgtgagccaccgtgtctggccagacattgtgatattcttacatcatcctcagaaatcaagttctaaaacagatctagattcaggtatgcttggaaacacttgagttgagttggccctgagtaatcaggtctagtttttattactcttataatagccctcaggttttgaacctattatagaaatgatggggatttgacctcgtcaaagtacccttaacttggttgtaaggatgatctctaaataaccgtcccttggtcctactatacaagattctttttttttttttttttttcgagcgggagtcccactctgtcatccaggctggagttcagtggtgcaatcgcagctcactgcaacctccaactgccgggttcaagcaattctcctgcctcagcctcccaggtagctaggattacggcacccatcaccacacccagctaatttttgtatttttagtagagatggggtttcaccatgttggccaggctggtcttgaattcctgacctcaggtcatcgcccacctcggcctcccaaagtgctgggatcacaggcgtgagccaccatacccagccatatacaagctttttagaacaaatttttccacagcaagaggctaggtgcctccggatcagtacgtgaaagattgttatcatgttgaatcgcttctaataccttttgacactgacatactcactgtggggagttattggtagattcaaggttgaagtttgctgttccataataatagcattttctggttgacactgtgaatggaacacaaagtgttaacttcacaacttattcttagaacaactaaaccgcatagaagaaggcttggaccaaataaataaggacatgagagagacagagaagactttaacagaactcaacaaatgctgtggcctttgtgtctgcccatgtaataggtgagttgataaattaagatggtttcaaaataagtaatgagagtaccccaccttctcccaccagctaaggtcagaagtatgactgggcttaatgaggaactctattagataaatctaagttgtctctccttcaggcagattaagctttttgtgtaaatactgcgtgttcactgaaaactgtgacttacatttgaccaatcctgggatcaagtccaatttcaatttgtagtaatacatgaaaaggttaggaagtatagggaaatgtatatctggatgatggaaagcaggatggagttattttcttttcctttcaaaggaggagtattaacaaaatatatattttgtggtaggcacatgagggatggccaaaagagtagaagagttgggaaagaatggcaaaacataaaaaatacataaatctaatgttagattatatgatagtgagcaaggctaaatctaatgttagattatatgatagtgaccaaggctaggtatacagaactgataaaggttgggttggagagcatcttatagaagaggtaggatgtggattgggctttgagtgataagaaggatttggatgaacagggaggaacagtgagggcatttcctatgaaaggttcaaaataaagattaacaaggagcttgacttaactgagctgtgtgactcatgtagatgagaagtggaaagtaagatataagtaggtagtagaggaacttgaatgccaaactaaggagttgacagattggagtggagtataaaaagaaacgacagtatctggagattgaatgactgtactcactgctgaaagttttgttttgttttttttctgagacagggtctctgttactgaggctggaatgcagtggcgtgatcacagctcactgcagcctctctttcctgggcacaagagatcctcccaccttggcctcccaaagtgctaggattacaggcatgagccactgcacacagccaaagtatccttttttttttgagacggagtctcactctgttaccaggctggaatgcagtggcgcagtctcagctcactgcaacctccgtctcctgggttcaagtgatttctcctgcctcagcctcccgagtagctgggactacaggcgcatgccaccacacccagctaatttttgtatttttagtagagacggggtttcactatgttggccaggatggtcttgatctcttgacctcatgatccgcccgccttaacctcctcaagtgctgggattacaggtgtgagccaccacacccggcctcaatgtattcatttttaaagaggttcttagacattaatatttcatccagttctcagctggtcttgtaaaccaacagcggttatatttttatattttcagtaagtgtttttatgaaacaacatttttatgccatttctgttatagaaagtagagattaattgcttgtcagtcaactttagtgtttgttttggccatgaggaaaggtttgacagtgttcttcctagtcttatccattggcttcctattctaacacaagtctgttgacctgtttacaccttggttgaccaactgaaagttctgtattttttgagacggagtctcgctctgtcacccaggctggagtgcagtggtgtgatctcggctcactgcaacttccacctcacgggttcaagtgattctcctgcctcagcctcccaagtagctgggattacaaatatgtgccaccatactcagctaatttttatatttttagtagagacagggtttcgccgtgttggccaggctggtctcaaactcctaacctcaggtgatctgcccgcctctgcctcccaaagtgcggggattacatgcgtgagccactgctcccggccaaaagttcatattttaataactatgacttgtcaatcagagtttagcagattactttaagcaaacaagttaaaatgtacagattatttgatacaaactcttagctatgttttacaaacataattgtacctttctcttgtgttccatgtaccttcttggaagagtacagaagagaggaagtagatgaattttcttgagatcagatgttaggagaacaaggagaaagaagtctcccctaaaatcttagaggaagatcagctctaagtcacgtgttgataaataggaagagcactgaattagacctaagatggtctaatatcatagaaagtgggaaatgcagctacagagtattaattttatgtctctttgtgtatcccagccaagcataggcaagcttttcttgaagactggtgggaaacaaggtagggtatggtcctgaatcagcattcttcagcctctaacctcagtagaaccctttctcagtggatcaagagaaggcattacttttttagagatggcctctccctctgtctcccgggcttgaatgcagtggtgccaccatagctcactgtagcctcaaacatctgggctcaagcaatccacccacatcagcctcccaagtagctaggattacaggtgtgtgccaccatgcccagctaatttttgaaattttttgtagagacaggggtcttgctatgttgcccaggcttgtatcaaactcctggcctcaagaaatcctcccacttcagcctcccaaagcactgggattacaggcttaagccactgcacccaactggcacttctttctttttttttttctggcacttcttgagagatggaatcaaggggctgctgtaacaaaacagttcccttaagagaagaaagtattatctcagttaaagatgtctgattgtaattgtctttcttccacctatttctttcttacaccattgagaccttggccagtatgatatctcttatcctcagctctgttcctatcattcttgcctgtgtcttgatctttctaatctgctagtctgtgtttcagttaggctcgtcacatgaataaccataacatgagcttcttaaaggtagacatgagatcttagtcctatgtgtaaggcctagtcttcataccagcagtagcagtaacaacccaggtcaggtccagagttccttatttgccatttggaaatactttttcttttctttctcttttttttttttttttttctcgagacagggtctcgctctgttacccaggctggagtgcagtggcagtcatggctcactgcagcctcaacctatcctccagcgtcagcctcctgagtagctgggattacaggcacatgccaccacacccagctaattttgtatcttttgtagagacaaggtttcaccatgttggccaggctggtcttgaacccttgggctcaggcagtctacccaccttggcctccagaagtgctgggattgcaggcatgagccattaagccctgctggccattcagaaatctaaaaaactcctaaagttttgttttatttttgctgtaatggtgccacaactcattagggtataaaatgtaacctgaactgaagctatgtttagtctttattacttgctgtagatattaattggtttcactacagaaatactctttttgagtcagggtctcactctgtcacccaggttggagtacagtggtatgatcttggctcactgcagcctcgacctcctaggttcaagtgatccccccacctcagcctcatgagtagctgggactacaggtgcatgtcaccatgcctggtttgtttttaaaaacttttgtttcttcttctttttttttttttttttgagacggagtctcactctgttgcccaggctagagtgcagtgatgcagtctcagttcactgcaacctctgcctcctaggttcaaccgattctcctgcctcagcctcccaaatagctgggattactggtgcctgccaccacgcccagctaatttttgtatttttagtagagatgggggttcaccatgttggccaggctggtcttgaactcctgacctcaggtgatccgcctgcctcggcctcccaaagtgctgggattacaagcatgagccaccatgcctgaccctgtttcttttcttttctttttcttttttttttttgagacagagttttacgttgtcacccagactggagtgcagtggtacaatctcggctcactgcaaccttcgcttcctgggttcaatcgattctcatgcctcaaccacccaagtagctgggattagaggcatgcaccaacaccttgctaactaatgtatttttagtagagacggggttttgccatgttggccaggatggtcttgaactcctgacctcaagtgatccacccacctcggcctcccaacgtgctggggttacaggcatgagccaccgtacctggactttaaaaagtttttgtagagatgagttctcactatgttgctcaggctggtctcaaactcctaagctcaagcaatcctcccacattggcctcccaaagtgctggtattacagaaatgagccaccacacgcaacgtcactacagaaatattaatgtatttaattatgtggtactgtccaaaacatcttgcccccaatggattggggtaacagttgtgggcctgtgcattaatttaaggtactattctgaacatgttaatttaatccttaaacagtagccttaatatgagatagatgttttttattattatcattttacatccaggctacactatgtagtggaagagctgggattcaaaaccaggcagaacccccttgcttttttttttttttttttttttttgagacagagtcttgctgtatcaccaggctggagtacagtggtgtgatctcagctcactgcaacccctgcctcccaggttcaagtgattctgctgcctcagcctcccgagtagctgggattacaggcgtgcaccaccacgcctggctaatttttgtatttttagtagagatgaggtttcaccatgttggtcaggctggtctcgaactcctgaccacgtgatccatccacctcggcctcccaaagtgctgggattacaggcgtgagccaccgcgcacagcccacaaatccttttttaaaatcacatatcttaggcagtaattgataaattgtaattctaattaacaagaatttgaaagcagacagatttaaaatgggaagtctcagaatagtaaactgcttgatgtcccagtttaaacattctttttttttatttttatttttttgagatggtgtctcgctctgttgcccaggctggagtgcagtggcacgatctcggctcactgcaagctccgcctcccgggttcacgccattctcctgcctcagcctctcgggtagctgggactacaggcgcccgccaccacacctggctaattttttgtatttttagtagagacggggtttcaccgtgttagccaggatggtctcgatctcctgacctcgtgatccgcccgccttggcctcccaaagtgttgggattacaggcgtgagccaccacacccggccttaaacattcttagataaggtattcttctgtcttaacttgcctgttttataaagtctaacaatggcacatagtttgaagacaaattggcatttctggaccacttactagagaagttccaaattggcactacaggtttactgctattccgatcttaagtcataccaaggtgtaaaaattcagctccgactaattaaaatgaatattgaattatatttcattcagtggtttagtgcttcttccatcctgctcactggagacacaaatatgagtaaggcatacctctggccctgcctgttttatttatcatgacatgattttttatacctcacatagtattggatatacagtagttactcaataaacacttgttgatttgagtgtccttgagaaacttgttggctggtgggagagtttgacgtgtaaaaagattttttaaaattacaatgaaaaaatatataagaaaataaaatacataatagaagtcattaagagaaatcttaatcactaagaggaaggagtctcaaagcactccattggtttttgccttctctcatattgtctaattttaggaaagaatatcatcacccaaaattctgaggaaaaatgaaatgtgctctggtttaaatagttttcttatttttctttttatctagattctcagatgttggttgtttctatgaaaccaggcaggaaattgaatgcattatgtttttaaaactttaaacctgcttctgttctgtttgactggcatttactattttctgcatttcattctctcacctaatctcttcctttctaatctgcttactaaaaatgaagatttaacatcagaagccgggctcagtaactgatcaaagggaactttaagatgcagtcttgtggcgcagtttgggctgctaacctgctatctaaaggtgatgcttcaaatggcttttctgtgcatgtgcatggattttgtgaatggtgaaaactgtctctaaactgtgtggtggtgtgtagtgtaaagtgaatttgttcttgatgggtgctatctcacaaaagatggacttgacaaaaggaccttaatttataataccatcctttgacaaatgtctctgataactaagtttttgctaaataacatttaagattaccaaaataacaatactcctggagtttcttaagaaatttaaaataggttgatctttgagacagctgctgcagtctagttctgataaaaggtaagggaagtcatgctaaatgcttctctgtcttcatagactttgattttagcatcctgtcttccattaagtttccctacttttttctggttcttgagtcaagatttcctctattaaagttttgcttctaatgattaggattacccatgatttaggccactaccaaattaaggaatcaattgccagtctagtcgtctcaaatcctatttggaacaaggtgggatataaaattttaaatgctaccatatctggtatcttctttccttaaataagggtttcccctctacatatgttataaactattctataattcctgttacatcatgtgttaacttgctgtgatttcatgttgaattaatacaaaactaactaatattaatttttcatgggaggtaagttttgtcagcttactgtttattattgtgtctgactcttaagtttagatctttatgagaattatgaacatgattaaatgttaaaaaattaagtatttgatttctaccctttgtttcctgccctccttttttcttcttttcttagtttgactatccaaagcatacacacactcacattcactctttattattagttaatagttatttggtcccttttctccttgatgtgaaatagtcacagctaatatttagttttatttttgctatttttaattcagttaaaactaatattgatgcaaccaaaactaaaaaaaaaaaaaaaaaaaagaaattatcgtttttgtgctcataccttgatatttacagttttatgcttgataccagcttcctgaattgactaagggatatttcagattcttacttaaaacttgcctttttttttttttttttttttgagacagagtctcgttctgtcccccaggctagagtatagtggctcagtctcagctcactgcaacctctgctcccaggttcaagcgattctcctgcctcagcctcacgagtaactgggattacaagcgtgcgccaccacacccggctaattttttgtatttttagtacagaataggtttcaccatgttggtcaggctggtcttgaactcctgacctcaagtaattcacccgccttggcctcccaaaatgctgaaattacaggcgtgagccacacacccgaaaacttgccatttttgaatgagacgtttaagtgggaaaaaaaaaaaaaaggttccagttaaagactattagaccactcagaactaacagtcagttgtaaatctaagtttctagatggagttctgaacttcattaaaatttatcacaaatttacttaggcattttatcatgaagactaatttcttcccagaggggctgtacattttattttcaagagtcctgtcacagattagaactattctttcttactgtagactaaaacaacctggtcctagtaatctttcatgtcacgatattccaactacattcatgtacctgtagatctcaaagccaagaaatggtaatggaccaaaaagtaaacatgccagttggtaacccatgcacttacaggcatgaactgttgactaaaggtcaggttgaagttgaagccaatgaatgaaaatatttatccagtgatttacaaagcagttttatgtctgttatcaacagaacattttacagccctgctaaacattaagtattgttattatcctagttttacgtacaaagaaagggatgctctgacactgaagtttgctcaagattctgtagcttctgaatgacatgcctaggattgggatttagttattttactccaaatgctgttacttttttgttttttgttttttgtttgtttgtttgtttgtttatttttagatggagtctcactctgtccctcaggctggagtacagtggcatgatctcagctcactgcaacctccgccttccgagttcaagtgattctcctgcctcagcctcccaagtagctgggattacaggcacctgccactgcgcctggctaattttttgtatttttagtagagacggggtttcaccatcttggccaggctggtcttgaactcctgacctcacgatccacccacctcggcctcccaaagtgctgggattacaggtgtgagccaccgcgcctggcttttttttgttttgttttaatcctgacatgtccctttgcttcttctagattaattatttagtgctccaatatatagactactagagtctataatagactaccagagtaatctaaagtactcctcctggatcgctaaatgtcccactgaccttatataaaacaacaacaaacgattcccaggctatactccatgtgtattggagtagaatcttcagagtgcagcctactatctatgtgttctacagcaggggccctcaacccccccagccatggaccactattggtccacggcctgttaacagaaactggtcctcatagcaggaggtgagcattattgcctgagctctgcctcctctcagatcagcagtggcattacattctcataggagcaagaaccctattgtgaactgtgcatgtgcgagatctagttgtacgctccttatgagaatctaactaatgcctgatgatctgaggtggaacaatttcatccccaaagcatcccctggtccccattcgtggaaaaatagtcttccatgaaactggttccccagtgccaaaaaggttggggactgctgaggtcactctgatactcagtcaagtttggaaggtattacctttaaagcatctaagaccctttggaaggaaagtaaattagtttaaaaacatatttatatttgtgaacattttttattttattaacttagataagcagctatctgacaatgccttaaaaacaggttccaacttggtggaggaaactccagggtgatggccagtaacagggtcttgagcaaccaaaaggcattacctagagtggacatgctgaatgagacgcactgaactgtcccaccaccccttcataaacacgcagaacatactataactgcaagaaaaacaagtagtttttttccccatcccatttgaaggtaaacatgccaacacaatgcaaagctgtaaaaaaattcaaagtcagctgggcgcggtagctcacttctgtaatcccagcactttgggaggccgaggcaggcggatcacgaggtcaggagatcgagaccatccctggctaacacggtgaaaccctgtctctactaaaaatacaaaaaattagccgggcgtggtggcaggcgcctgtagtcccagctattcgggaggctgaggcaggagaagggtgtgaacccgggaggcggagcttgcagtgagctgagatcgtgccactgcactccagcctgggcgatacagcgagactccgtctcaaaaaaaaaaaaaaaaattcaaagtcagctttttgtgtcttttccccttgttacagaaagaacatcttcaaagatccagtcttcttttttttttttttttttttttttttttttgagacggagtctcactctgtcaccaaggctgcagtgcagtggcacgatctgggctcactgcaacctctgcctcccaggttcaagtgattcttctgcctctgcctcctgagttgcggggactgcattcgagcgccaccacacccagctaagttttgtatttttagtagagacagggtttcaccatgttggccaggctggtctcgaactcctgacttcgtgatctgcctgcctcggcctcccaaagtgctggtattacaggtgtgaatcaccgcacccggccaagatccagtcattttaaagacagcagagtttgataaccaatctgattctttgtttatagactatgtttcaattaaaaatcattcacatgatcatttttaaacaattcatttgcattttatgcccttatatctaattgtggaaagaagaattctcataagtgtaaagaattttttcaaatattgcctcttaatgttgggaaggaggttggaatgcatatatattccttaatagaccagaacccaaggtcatgtcccagtccactcctctttttgtgctgtcagaaacataatatctcattagttactttggaatttcaaccttctctcttgcacctgttccacaatccgaaattctaataaaagccccacttctgttacttctgttaatatttgtggttattaactttctgataaactaatatattgcttttgttttatttactagcacttactctgctctagaattttgcctgggacctttcttattattaacaaagaatacatgtgaatatttattttaaaaatatatatcctaccttgttccaagaaaaatttaacatggcttcttaataaataaatgggttaattaataaaaacagcatagaaacataattatgataacttaaagtggtaccatgaaacacacttggagaactagctcttcagtgttcataaatttgcctttgcaatgcctctcacaaaaaaaaattagtagtatcctttctgtaatgttaatgataaagtctaagattcaattctaggtttgccgaaaatgaatcctcacatgcctattaaggaagaagtcacttttttcataaaatctcttccctacctttttaatttttgcaattttaaaacttccttattaatgtaaaatgtagaataaatcagagatcaatatttgagcaacatactatttcgtttttgtttatagaaaagtgaaaactaaaattgaatgaaagcttgactttagccaaataatcaagaaaagttttgtgtcacttttccgtaacagccatttttttttccctgtaatagccactttttctttctttttaagacacttagacttatgatttttttttttttttgagatggagtgtctcgctctgttgcccaggctggagtgcagtggtgtgatcttggctccttgcaacctccgcctcctgggttcaagcgattctcctgcctcagcctccccagtagctgggattataggcacgtggtgccacacccagctaatttttgtatttttagtagagatggggtttcaccatgttgcccaggctggtcttgaactcctgacctcaggtgatccacccaccttggcctcccaaagtgctgggattaccggtgtgagctactgtgcccggccttgatcgtttttttaaagaggaaactcttaaatgaaaaactcctacactacaggatttatgaatgaccgcttgtgtggtcaaggtacttatttgtccgctgattgtccaatttggaaattattcatgcctttctttcctgatggctggtttgtttgtaagaaaccattgtttaaaatttcatggaaaattctaataaaaactgatcagctggaactacgctggttcaaattcagtcttcttattttaaaattttatttatttatttaagattaggtctcactctgtcacccaggctggagtgcagtggcactatcatggctcactgcagcctcgaccttctgggctcaagcagtcctcccacctcagcctctcgagtagctgggaccacaggcgtgtgccaccacacccagctaatgtttgtatttttttatagagatggcattttgaggcagggagcagtggctcacgagcctgtagtcccagcactttgggaggccgaggtggatggatcacttgaggtcaggagtttgagagatgggtttttgctgtgttgccctggctgatcttaaactcctgagctcaagcgatccacccgccttggcctcccaaagtgctgggagtacaggcgtgagccactgcacccagcatcagccttcttattctgtcatcccttgtcaacctctgagatgccttcaaggaacctcttaaggtatcccagaacaccttttctaagggacctttttttaagtaatgtgcattaacctcttttctagatagtgctggatacactaggaagagaaaagcaaaacgatagtgccagaggctaagggaacctgaaaaatcaaatagttgccttttgctacttgctaacagcctagtgaagatttggtagaagtagtatttggacctttt

SEQ ID NO: 769 - DNA, 32746 bp, Homo sapiens
  source 1..32746: mol_type = other DNA
ggagggaccgggcgggagagagagaaagcctgaccgaccggctggcgaagagctgcatgcaaccggtgggaggccgggccggctgggtctggggctcgggctcaggctcgcaccgtttctcggcaggtccctggcggtgagcgcggacggcccggaggcggcggctctgagctggcaggcggagggctgtctcctgcgcccgcctgcccggcgcggtccgaggatgcgggggggcgatgcccggggccagggacgcgctctgtcaccaggcgctgcagctgctggccgagctctgtgcccgtggggccctggagcacgacagctgccaggatttcatttaccacctgcgggaccgtgccagaccccggctccgcgacccaggtgagtgccgccaccgccgcctggagggacctaagggccctgggctgggacttggggccgcaccggggcctgaggcagaacagcgacgcggactgggagagggcggggggcggccaccgagccaggagagtgatcaagaaccagcgcactgtggcctgatgctgtaaccaggcggggacccgggcggtggctactgcacggaggccgactccgggtcggctagggcagggttggagggaccacgcccgccacctgcgctcccatcgccaaggctcctgggggcggctccctagctccgagctacgctctccacttcccgggctatctgcactcagagcgaggggaggccgcggcggcctcggagccgtgggaagggggacgaggccgaaggaaactctgggaagttgggagttggggacggccccgggttggggccgaatcccaccgggtgctgctcatcctttctcccaagcgtctagttcctttccttggtatggggtgagaagggcgggacgcgatccggcgttgggccggggacagggtgcttctggccttgggcagacgggcctgaacccgttcccggcgggtcgcacggcatggaggtggcctgggcctgggcgctaggctcgaccagcgactaccgccggccacgatggggttcgtagactcgtcggtcctggcttgtgcacctgtagttactcctagtgaaagttgcaaagctcttaactttggaaagttcatttattttggcatttgaccaattaaggttggaggagggagttttagtggagccatttgcttttcctgaggtccctgggtctcccaggtcgtctcatccgttactggctactggaaaatgcattccttccaatgtttgcttgagatgtttctcacctggagaaatagttttctcgaatattctcccaacctaagtacttaccaaaacagcatattgtggttggattgttaaaaatgggatgagaaaatggcctttctcttgatattgctatgtataaatattggaaatgagctattgccttgcaaattatgatgtacgaattgaaaacaatttattatataaaaatccatttatccaaaagataaattaaagaattatttgatttataaagagtgtcacactgagccagacttaaatagcatatccttgatatattcaagatggtcgtgtggggtgaagtcatctgctaaaattttaaagtttatatcagattttccctaccagaggcttttttttcctattgaaaaagaaaaaaatattgttttccattgccggtggttatattaactaagtttattgaatgatcattgatatattacttcaaagtggataattgggtagagaaatactgatcccagtggtttccagggaggtttaatgtccagcctatgtgcatctcattgctggatgtgatgtgctgaataaaccacagtcccttatctcacaagctggagtcccaggaagatgtcttaagtcggggaagttcgtccttaagcagcagaagcaagacaattattttgcatgctttgcccaaagcaagtattagtattgaaacatctcacttccttgcctgtgaccagaccacgagttctccttgttatcccacataagcagttgtctttggctttacaagagaagatggatgaggcctatctctgaatcacatctttttggccagttttctgcttctactccttttaatccgggagctggatcctgtgttctcagattctcttcagcccctacaccaggcaacccctgagaaagagtcactaagtaggcttcttacaagaggaaatctgattccttggcggaggaatagctagagataggagtcgaccttgctgctctgagttcctgatagcagtgctctgctttcttaaactaggacacaagggttttgaagtagccccatgcccctgtggctctttggtttttgttggaaagtagccagctcatgaggacaggggtgggggttttcgagtgcaaggtgagaggaaatgaggccaaagattacatccaaagtgcaccctctccttcaggacacttctcccttcatttccaaatctcccttcatttccctccttccttgccttgccgacattaattcttacatcagatgcatttgtcttcatccctctgaagcaagagtgtctttaatctcggaaccctaaaagctgagtagtagaaaagctgcaccacacaacgccgtgtgaataatgtccctgctgttgatagtgtgaaccagaacaaccatgcacagcagccctgagacatgggttcctagagagagtcatctcggtaaatggatgacttctttttctggaaaggaatccacctgaatgccatgtcccagctttctctgttattgtccattcacggccaccctgtgatagctaggttttctcaagctgaactaaggactttggttataaaaggagaaaaaagatataatttcctgtggacagcaaagtgaccctgcatctaggaaatttactcattttttcagaggtgtggaaagactagggcacagaccagcgggcctgagccatcagaaaggttcttttttgtccaggtagttatagtgccctgttgggggagtaccgcacccagatttccctgacttggtgttcacagaggacttgatgcaattgtggtttaaaaaaataagcctaagtcacagttggaactgaagtgcctcacccagtctgtcatctgtaccaacttgtggaaaggaaagtgctgagtgtgagcacttttgtccatagaaagcaattagaatgctctgttggttgcctttatggtgttttatatgttaatgatgtgggacataaacttgcaggcctcagagactagcctttaaggcagagggaacagcaagcgcaaaggccctgaagtggtagcattattgatatgattctagaaatggtgacttcagaggtggctggagaggtgtgaaacagatggagagtgataagacgtgtatggtcaagagttagagagggtggatcatgcagagtcttgtaaaccattataaagactttggtttttactctgaatgagataggaagccattagaaggtgctgagcagagaagtgacaacactttgactgctatgttgaagagcaaaggtgaagtcagagaaaccacttaggaagctatttcagaaatccagacagaggtgatagtgacttcaacagggatagtggtaatggaggtgatgagaagtaattggattatgaatgcaatttgcaggtacagccgcaagtatttattgaaggaagagatgtgaaaggtgagagaagggcaattaaggatgcttcaaaggctttttgacctaaaaaattccatgtacaagtagaagtcttcaggaagaaggtaggggtgaggagggaaatcatgaggtttattttttattttattttaactttttgtaacacattaagtgtgtgatgcctctttagatagccaagctgttttacagttgaacagtgacctgaggtatgactatcctctttaatgtcaattgctctatgctcgtattttttaactggagacttcgctgtcaagaagattaattggttatagaacagtatgtattgttagaaggttttccttgtagggaattaaaaggtctcttaaatttctacccatggatcttgattatactttttttggtcaaaaagcattagtcttatctctcttctccatcatacacctttggctattaggaggtaaactagcctaacttatctagatccactctttccaaggaacagaaaggaggattggatcatgtaatgactaggtcttaaacatgtttttatcattttctttttaagtcttttcttctgtagggtgccaaccatgtctgtgccaagcactttatgtaggtcatttcactagtcctcacaagtcttttaagcacttatctgtgttccagcagcagcagcagctgctgggagcttgttagaattggagatctcagttatgtcccagacccactgaatatgaatctgtatattaacaggatcctcaggtgagagttgtaggcacattaaagttcaagaaccatggctaaaagtgattgatatatatgagtaaactgaagtccagagaagtaaactagcccagggccatggagtccatttaaaagaagaattgggtctaagtgaaagtagcttcttaggtagtcacatcacatgtactgaaaactgaggagttattgtcaatgaaaattttctaggtgtttttcataagagccacccttagacctactttctctcttctgtacttgtatgatggatttaatccctaagtgtaggtcacattctatgtagttgtaaagattcagcttagtatttttgattatgaattctgttatccaggatactggttttccattcatgttccaactccatattctggagatttttctgcatgttctctgtgtctgtacccaatgtttagaaaaggttcagcaggtcagagtatgaagcagagccttaagactcatgattagtgattcttctctccatgtaaatattactctattcaagaaaagctttttctaggtcatggttttcaactttggctgcacattaggaatacttagggagctggaacaaacaaacaaagaaaaaacaaacaacagcaacaacaaaaactaccaatgactgggctgcaccctagaccagttttaaatcacagtctctgggaaatgggcctggtatcagtatttttaaagttcatctattgattctaatgtgcagccaagtagagaacaacctttgagaccattgggcaaagaatgcatccgcctaacccttctcagctcagctcacatttgtttcttgcaaaattaggaaagatagtatcaaaaactaggaaccttgactgttaccctgtacagctagtgcccatatcaactgattcttaactttcttttcccaacgttatcctacatttttcttttaagggctcattgaacatatcataaggctctattatgtccaccaatctgagaggggaaaaaacaaacaaatcaagaaaaatcttgtctaaatagtgtgtcattaaaaggtcagaatatagaaccttcacaaatgtcaccctatgttaaattataatgaagtcacttattagaaaatgtacatgtaaaataataattaaatatagtttctatgaaaaaaatctccaaaataatcatcaagattaaatattagccttgattcaaatttttctaaggtagtcaaaagagaatcagtcttgaaacactggatgtttatgaatagaccttggtgtgattatgcacaatgggattaatttttttaaattaatgttaattgcaatcaggaaaaagagtcttctaaggaatgagtggcatattggatgcacaatatgtgaagatctaatttgcatttacttcggtgacatttcagggctccttcataaatattttatttaaacaagtgtgttttcatctctgcgggactcctctacatggaccagtgagtggtttagtcatgaggtaattatcaagaggggaaaacaaaagcaaattgtagtaaaggcatcacaggcagccctatggccagctgcctctttcaaaataaacaatcaaaagcacaaactttttgatgtgggataaactctcaaggaaaaattaaactgacacctaaaggaaatcatcctcaaattttctattatgtatagagcatagatgttgctttcactgaagtagcattgaggcacttttatgtttgtgctgcaagtgcaatttcccatatggttggcttaaaaacattcataatctcttcctaacaggttgacttgagggaactaacaagttcacactccaaagtgtatagagaaagtggaggagcttagtgagaggcataaatgggggagcaatctcacttttaaaaggacaagtatggagtatgtatttctattttctgaatgaagtttgaataaaatcaccatttgtggagaagttttcagttttcactgcaatcttggagcaataaatgtgcatcacgacttccttttctttcaaatgtttatttggtgggctctaggaagggctttagaccacatcaaatcctgaggaccaggctttgcagatctctttgaaatcttcatatggccttgcacatgtattttatcacacaaaaactttaaatcaacattgatagaactgcacttgaaagaaaaaaaaatcttctaggacatcaagatgacaaagtggaataagcaaggactttggagttagaatctgactgcacttactaccttagtgaccttgagtaaaatatttaactcttcattttattcatctataaaatgggagtggaagattgctgtaacattgtgcccagagtaaatgctcaaataaatgatcaataaattgatgttgttggtagtatcacctgcccatgtttcctttcagccgtggtccacaaacatgtatatgttttaccatttgtaattatttgtaggctaaatttactttctacttttttgtaaacttagcattttattacctcttattagctgtgtgttcctggacaagttatttaacctctgtgtcctcattttctcatcagtaaaatgtattactagtatctgggttactagttacccagataaaatacaggctgccagttcaatttgaatttcagataaacgacagggaatattgcatggcacataattatacaaaacaatcatctgttgtttatctgaaattgaagtagaactgggcatcctatatttttatttgtgatgctgacaaccctatactagtacctatctcgcaatgcatgcgaaataccatagtacctggtatatgctcatagtaattacacgtagtaaatgctcaataaatactagccattatttctattattataattttcccattgttaacacttattagtacgtaattattattgttgtgatgactatgtatattccaagaatgggtataccttttttatttaaccattcttttgaggctattctagcttgtaatttttttttagtgtgaataatgtcttgtatttatagtcccctgtttccttttgggaaaattttttcatgataaattataaacagtgagccctaattgctttctggtagatctatgttagttagtcctgctacatgtcaacagtaaatccgctagcattaggtgtataatgtgaacaaaaggttgctaatttaacatggtttaaacagctgcttagttgtttcaatttgtgttttttttgttggtaagactgaatattttttgttttgaaccttcttatatttactcttaagtgaattttttgtgttctctaccacattctctatcatgtaccagtttattttttgagaatcttaatgtttttttctaccaatttccattaattagaatgtaaatattctgtcaaattagctcacagaaggaatattgtatagtgaatgagctcaggttgtctgactataatcaacccattatattaaagtgtcttttgaaatttcaggggtggttcaataaatagggattcgttgtaacactcttttccaatgcaaaatgctgcatttatttatatgaaatatgaaaaagttgttataatttgaatctctttttctttatgttttctttcccactccaacctaccccaccctacccttgtgcagctgttacttaaccacgttgaattgatcaatcttttctagttataattaagttaaattccaaaaacatttattgagggccccttaagtgctatgtacaaggttgggcatctgtcattcaaagatacattagacatgcttactgcctctatggaattgacataaaacaataatggcaattaataaaatcaagaagggagatatctactggatacagtacagaaaaaagaggagagaagtaattagctgacttgagtggatctgcagaggcttcctacagaagtctattcttgggcagaagagtttgtctggaactagttggtgggaagagcattctaggaatttacaaaggtcctaacacagaagaggatggatcctgggtaacagtaagttgagtgtgtgttggcaatgttgagagatggatctgctctagtaaacaatggtcaaatcagatcacgaaagcccctgtatgccattgccaaaaacccactgaggactaactggagcactctgacacagaaatcttgaaagaagtacaatttatatcataagcccaaagcaaagcacaccaggagatttcagttccatgaatgcagcttctgaagtcttcctggttccttatggaaaatatactcaggttactggcaaatatgttctttctgtccaaggtaaggtcctaacagattggaatcaatgaatggaagtttacccattttagatccccaacatatcaccctgaaacccaactgtaattaccttgaatagttgtaaatactgcctttagcaagtttagtcatctggttcaaacatctggattccagatataattcctgactatgccaacagtgacatcttgcttccttgcctggttatttagtaatgaaaaagcagtgtgttcagctgcattgtaactatccagtctgtggatgtgcacagtctgttttctctgaagttatagggcccaagagggaatacgcatggcaggcctgcctagtgcccaccaagccacgctgtagagatagttctttattgtgtgtacagggtctgccaattaacaggcataattttaaaaaataattgaattgaatgcccttaagtgggtcacaggctgtccatttctaatatctgcctcctcgtccccaccacatacatgtacactttgcttatcacatttttgggacatgcctgcctattgaagacatcttagtttgtatcagctgtagcactgcagaaccattaaaagagtttacgctgaaaattcaggtgagttttatcccttaattaggtattctggagacaggataaacattgattggagaggttatagtaggggatgccagttatttgctcaccatatatttattgagcatctactaagtaccaggctctatcctaggtatgtacaaatgtagatacctagacacagtattgtacatacagtagggaatgaaacagaaaattaaaagtttgccctcatgaaacttacattttgggaaaatgataataggtacataaattatattgtatgttagatagtagtaagtgctaagggaaaaaacaaggcatggaaagagatcaagacataaagactaaactggcaccactgagaagttgacaaatgagtaaaggtcagaaggaaatgtgggagcaagatacacacgtagcagggggaagagcgttccaggcaggagagcggcgggtacaaaggtctcaaggcaggagcatgcttgacgtgttcagatattagccaagggttagtatgactgtagtgaggttggcaaaaagagagtagtagtagatgaggtcagagaggtgatggcagactgattgtaggcctctataagccattttaaaaaagtgacttttacttgcagtaagataggaagccattagcaagttttaacagaagagagataacatctgacttaggaagagaaaggatcactctgaccagcacatagaaaacagactataggaggggaaggttgaagttagggagaggagttataaagctgttgtaatcatgtaggtgaaagatggtggtggcttggaccagagtgatagcagtggagatagtaggaggtggtcagattctgggtagctggaaggtggagatgacaacatttactaatagatggatattgagtgtgaaagacagagaggagtcaagactaagactgtggcctgagcagctaggagaatagagttgtaggagaagtaattttgaggggaatgaccagcagctcagttcttgatgtgggatattggaaatgcttattagtgagcccagtggggatacagactagccgtctggatatatgagcctggagtttgggaaagatggctaggctgaaggtataaacatgggagtcatcagcatgtatgtgatatgggtctggctgaaattatctaggaaggcacagtgaatgggagagtgaaggggacccgcactaagttctggaactgtccaacggtaagaggctagagagaacttgaggaactacaaaggaagattaatgaagagagactagaaatgaaagagaaaatccaagcaagagtgttgacctggaacccaggatgaagaagaaggtgatcaaataagaaggaataagcagctgtgtcaagtgctactgttaggtcaagcagaatgaagactgggcactcaccattgcaggtagtgatgcaggggtcattggaagtaatgttgacaagcatttttgatagagaggtgggaacaagagcctgattggcatggctgtaaaagagattgaagggagaggaattggggcagtaaagacagaatagtcttttaagtttttctgctgacaagagcaaataaatggcatagtagttgctagtgagggaagtgagatcaagggttgtatttatttatttattcgtaagttaggagacttaacagcaccaaggtgaagggaatgactagtacagaacaaaaaatcatgatataggataaagaggggaggattgctagaatgatatccttggttgagaagttgggtacatttcccgaaagttcagtgtaggcatttaggcaccaaaggcacatagatgatatttaaaaccaaaaaatctagatgagcttactgtcttagtccatttgcactgccctagcaaaactaccataagctgggtagcttatgaacaacagacatttatttctcacagttctggaggctagaaagtccaagagcaaggagctggcagatgctgtgtcaggtgagggcgtgttcctcatagacagcaccttctctctgtgtcctcacatggtggaaggggtttctttcataagggcattaatcccattcatgggggctctgctctcatagtctagtcacttccccaaaggccccaactcttagcattatcatactagggattaggtttcaacatacaaatttggggaggacacaaacattcagatcttcacacttaccaaggggtgaataaaaatagaaaagaagtcaaacaactggttagaagtcagagaaatgtgcaggaaccaataaggagactgagagggaccagaaagtaacgtggagaaaaatcaagaacatgatggcttggaaattaagaaagtattcctaggtggaaggaaggatcccctgagttaaatgcccctgataggtcaagtaagatgacaaccaagaactgaccattgcatttaataacatgaaggctaattggtgaccttgaactgaatgattttgggagtggtgcctcagtggaactggtgaaagtctaactagagtctttctaaaagagaatgagaggagagaaattgagagaaaagagtataagccattttttggaattattttgtgaagggagaggagaggagaaactgattcaaaggatggcttttaaaggaaagacaaaataactgtatgtttgtatgctggagagagggaaaaatgatgtagaggattaaactgctggagtgatgtgctgagtaggttgagtaggtgggtttttcaacaacagtttgtttattgtcatgaagtcagggcagaatatatgggcacaggtgggcagatgtggtttgggaatcttgcagaagtttgccttctgattgctcttgtattcttggtgaaataggaagcagcaaggttataagctgagagtgaggatggttaggaagtaatggcaatttgaaaataagagagttataaatgtttaggagagtggaagagcaaatggattagggaaggaagtgtaattgccaggcaatactaagcacctgcttgaagttggcgatcatgaatttaaagtaatttccatcagcataggtgtgtgtgtttcttccatgttcagctcttttttttgcaggcatggaagagagggaagtttgtgtttaagccggggttgtgtgtatgagaacaaggaaagagtagcaaaagagttgagggtatgtagaatagattggaatgattgattctgaaatttcattggagtaaggagagaaaagcggatatgtaaaaggattagggatagtgaagacgtggtaggattaatggattgtaggtcctggaggggtggaatgcttgttgagaatgcagtgaggagaagggggccagagaatgagatgtttgaaatcaagattctggaggagctgcaactgttgacatgaccacgtccaggacatgatcatgagaggcatgatggggagagggggacaaatgattgaagacaggagctcaaagaactacaggcccagggttttggaagtgttatcgacatggatattggctttgctgagaattatgacaaaagtagttttggagagagtgacagtaagcgagcaactgggctctcccaggaatgtgggggaagcgacctgaggaatgatagatgtctgcaacaaggatgggcagttgtggtgtagtggtgtgttcagacaatatgagatttaaagctgggtgttttttaaagaaaacagcagcaggcagtaaactattaatttttacttaagcagaagtgttgaaggaatattttaagtcagtagagatgccttaagagatatttaagagataaaataattagtacaatgatatgaaatagagagagatcctgattcccaattttttttgcatatgtgcctggaaagatgtgcttataacttattaggtttaccacaggaagtcaagcacattttgtgggaaaataatgagattgattttaaacacattaagtttgggatgtgtatgacatctcatgcagatgtccagggcagttgactggtggaaaactgggaagaagttactggaaataaggagggtgaaaagcgattgaatgtcaaggccccttgcaactcaaagatttttgtaaagtggttcccagttccaggtatgcatcaaaatcagttaaggaacttttgaagacacaactgccctgtcccaagattgactaagtcagccttcaggggtgacacctaaaatacctctacacagctagggttgcaaatgacatgcacttacggccttcgtggtttacaattactttttacagccccttggtcaaaataaatgctcaaactgtctatgtaaaacttttataaaatattaggcaaggaaacccaaactcgaaaatgtgtttactatctatcatggattctttttttttttttttgtagccacagtgaattatctcaaattatttgtaagtacagctactattggcacaattactaataaattctgtagaaaatttagctgtaggatgtaactgtagtgtcctagccctaagtaaaatcatggtcttctttatcgctaggcaagtaatatgattatcatttgttcttattttaggataaccatacggtacataaaccctgtgaaaactctaactaggccatgaggttagagaataacatggttgcttgattcctgtaggctataaatcatcctagccaatatgctcacttcttgtcagaaaaacctgtgaaacagagaaagaagctggacaagaatgaggaggccacattagaatcacttttaacttgggattcagaggatcccaagttaaacatatttccattcttatttttttagataatatggatgtcaattgttggcatagctgagctagctctgaaggcttcccaaattatttcagagggaatgagaaaacagtgctgcttgctcttctttaatctgttccaccgtgactgctactttagatttaatataactgtaatatcccgaatttataggtcatccttcttctggggcttttaaagtactttgtgtgtattactttaattttgagggaactcagattcatcatcttatggaatctatttcagagggaatctacaaagagaactagaaagtcccccaaagtgtttcttttttttcttccagatgcctttggtaggaacattcattgattctaactccacactgctttagaggccatttatgtgtggattactgtaggctgctctgggggaaaatctaatccccacaggttcagttagagaggatccactctgcacgctgataaagattaaaactgcagctcttttcgattgcattgtcttctttttttatcttttaatttttgtattatcttatgcttcagtaattcaatcacatctgccttcccagtgcctcagtatgtggaaactgggaagttaaattgggcagagtaacaaaacaggagctctacttcatatgcctttgttgtaaaatgtgatgtcttagggtttgcagtggtgtcccatagtgctacagacaatcatcagatttgacccagggaaactcctggagaaaagtgagtagtaaatagtggccttaatgatgcaatcagaacatgggggattgtcagaagaggatcagagttagctttgtagtacttgattccttaaatgtttaggaagtagtttcattaaatatagtaaaacatttgtctactgatttatatagtttttaatcttctctttttccaaaacctcatgctaattaaattaacattcctataaaaaacatactgaatacaatatatatcattaagtgagacttattttaggttcataaatagtacaataaactgtaaagacttagaagtcataaacttttacttttcattaatgaagcaatatgtgaatatataaaaccaagtttgttataactttataaattagaaaaattagaattatgttggagactacaatacttcactgatagaatacatcaactagactaaatacatagaggatagaagttatagagttaaaataataaagaaaaatcatgttcacgaaacatttaaaaaattaatcagcacatgattaattttttagacatgacaataaaaaggaaaagttaaatccaacaggtaaaaatcgcatgggccacatttactgaccataaaataatcagtgagagattaagaagtaacaataacaatgccaaaactctaaacacttaaaaattgaactctttcagagatctcttgagttaaaaaaaatcagaaatggacactgaaattatagacattgagaatacaatggagtataaccaaagctatatctagatgacaatttctaattctcagttgttaatagcaaataaatacagcaatagaaaaaaaaatgcattgaagttaagagcctaaaaatagaaaggtaaagcaaatcaaaagagaaaaaaaaataagagcaaagcatcaataaaaccaaaagaagaaattactgaattagaaagtgaaaaatcccaaagaagcagtgttaataaataaaacccaggtgtgtctttctgaaataaaaaataaataaatattgtgctattctgatcaaggaaaaaatgagaaaacacaaatataaagcaaaaagaataagaaagaggatttaataacagatacagaagacaatagaaagcacaagaaaatggcatacatgccaatgatgtagaaatacaaattgagtggaagtcataaacatctcagagtgagtataaaaatatttagaagaaattgaaaggtagtcaaagaactttctgtgtaaaaaggtataggcctaaatatttttataggttaagtttaacaaaatattaagtactacatcagccctcttatttgtcggaaccacaaatagtcattacaaatttgttttaagttgtcattgcaacaaaagttttcagtgagcacaagaattaaaggtcatcagcacttccattaacaattactgttaatacttttaccagaagtggaattgctaggcttatgcacgttaaatattttgatataaaattatcaaattgtcctctagaaaggtttaacaattcatatactgtaaaaactatactgtggcatagaaaaaatatggaaggcatcctaatttactttgtgaggctagtatcacactaatatcaaatctgacaaagacaatagtaaaaaaatcttgataccaatctcagttaagcatataaatatattgtaaataatagaaaacaaatacagctttgtattaaaaatactgatgtactgtaacctggtaggggtttaagactacaggaatggtaaagcactaggaagcctagtattacagtaataggttttttggttgttgttttatatatataattattttaacttttgacgatgtatgcaacataagtcacaaacttgacacatttttctctatctccagtcattctctggttttaaaaatataactttatcgagacgtgttttacatattgtagagttcactctgaaagtgtacaatggaattattttttagtaaatgtatgaagttgtgcaagcatcactataaatcagttttagaaccttttcaacattccaggaagtttcctcatatccattctctgttaatccctgcctcaggagactactaatctactttctgtctctattaatgtgtctgttctagacatttcatataaatggaatcatacaatatgtgatgtcttctgtgactgggttccttcacttagcataatgtttttgaggcctggctatatcatagcacgtgtcattagttctttcctttttattactgattagtattccattagatggatgtatttcattttatttattcatttaccagctgatggacatttggcttttttccaattttgtgctattgtgacatggcaatatagtatctggtaaagacagcatttcaaatcagttgggggggtgggaaatgggctattcagcaaatggggttgagataattgagtaactatttgggaaaaaacattatatgcctgctcctgaaatttttcatgtggtttaaattttacaaatataactgctaaaattccaaaggaaattatgtgataatcattttatcatcagaatactgtatagatgacagcaaaacaataacagcaggttagacacagaggtaaatttttaaaattctttcatgtaaagagacctaggagtagtctgcccaggtctgagagtctctaggtagtcttaagattcaggttctttctgtctttctatgtttgccttctttagtgcattacttcaaattcaaagtcacatcatgggctaatatggctgctggaattccagcacttacatttacatccctgagagagacaaaaacctcactttcgacctgagtctactcttctagagtaacctttctcgaagtcccactctatacttgtgctttcatctcattgatcagaatttagtcatattgccatccctagctacaagaaggttgagaaatgtagtcttttagcttgataaattgtcacttcaaatgcaatttaagttgttattttggaaaaggggaaaaacagatatggggtggcaactaccagtgtctgtgatctttgtagtaggtgaagccttccttagcgtgaccctaaagccaaaaaccataaaagacaaggttgacagattctgagaagcacaacagcaggaacatttttattttgcaaagttcattatcagcaagacaaaccaaaaatgggacaaaataataacaatgaatgatagagaattaacattcttaaagtgtactgctgaaatacattaattagtaagacatttgactgtctgtgccttttggagagagtgtatcaattctttggtaactccttaaatgtacaataataccatattgacaatgtttattcttattatataaatatatattttaaaccatgttgaccttttagcaagaaggtacatttttttgtatggggcattattattttaattctctcccctcaagggcacattttaggctcatctgttaaatgcagctcataaacgctgttataggctgtttgatttaggacagattcagctagattacctgaatactcaattaactgccacagtgagaatcgtttgctttcagatcgataagaagatcaaatcagtagccattctcagttcagtgcttcatcaggaagtgaattaaagcaaacccattagtggtcatttttctaaatgctaatcagtgaatttcaaattctagaaaaaaaattgcatgtttttagtggttattatagatgagtatcttgaactgagttcaggacttcaggacattgaaagggggcctggtttctagccatattacttagacaacaataattcttcacagctttctgttaatatcttctgatttaacaggcaagttggagccaagtggcctttggctatttggtatccttggtaaccactgttagatgatgaattgaattagttaaaattaatttcttgtgaaaagctgcttccatgagaggatactgactttgatgtttagatgcacaagacacagacacacacacacacacacacacacacacacacacacacacataatgtggagagagtgtcatcaggtgtggagagtttttgcaggtaactgcaaagcctaataaatgtaaaagtgagaaagacgaaggaagactgcaaagggctctgcctctaagaactgtgcttctgcttggagagggaagacttatataaataaaggaatctgaagcataatagtcactattatttggctggtgaagtagcctttcttttctcacatctgcgaatgttaactgtcatgacaaagctattttattgttatagaagtttgggaaaagatggagaacacattttttcaatataaaataatataatatatattttggctccaagcccacttttgatgtcaatttaggtagcatttttctttcatcctgataggtgcctaacctgaggaccatatctgctacaaactctgcactcccagaagttaacatttttagggttattgctagaacatgcacagcccagtgctggactgtgtacaatggattgctatttgcttcaaaagcaacactcctatatcctgttgggtctgtagcaagagcaatccattgtaccaagatgtgtcccaggtccctggcccaggcccgccagtcatgcatttccctggaggggcaagggagaaatggatgcccctgatttcagtcctacatagaattttaactactgctgacttcagaatattctgcttgtttttttgttttgttttgttttgttttttgagatggagtcttgctctgtcacccaggttggagtgcagtggcactatctccgctcactgcaagctccacctcctgggttcatgccattctcctgcctcagcctcccaagtagctgggactacaggcacgtgccaccatacctgactaattttttgtatttttagtagaggtggggtttcgccgtgttagccaggagggtctcaatctcctgacctcatgatctgcccgcctcggcctcccaaagtgctgggattataggcatgagccaccgcacctggcctgtgcttggtcttggatgaactataaggtatagatatttagagaaaaaatgcagaagctgagctgtaagaaggtaaatcagagcttcatgtataaattggactcttagagtcttttaccattgaatctgcttttgttctacatttaaatacttcctaaataaacaagagcagcacatatcctgggcagtccatgtaaactgaattcaaagactgcctcaccacttaatagttgtataatctggggagaattacctaacttcttggtgtcttaattttcttatctgcaaaatgaggataataatgcttataggggaactgagggcgtgagtaaggtcatgactttgggacacagcatgccgtttagagatcaattagtgttagttctattattaatcccctcagtggaagcctttttaatgtttcacaaaaatcggcataactgacttctgtcccattctttatttttgctttcttttacttcctccattaatctcttttcttttcctccacccaccttctagtgcccttatccattattgttttctctcctcttttttcatcttatcccctcttacttcattttatcctccagactttttattggtgtttttttttccttctgcataccttaagtgacaatgtaatgcaatctagctattcactcatcacgtttaacaggaacttaccatggactggtcactgtccttggtgctggggttgtgaaaaagaaagacatgatccttgtcctcaaggagattaccttttcgtggaggatacagacaagtaaacaggcaattgaaactcagtgcaataagggaaagtgtggtttgatctgggagcacataggaggggcacctatcccaaacttggaggaagtggtgtcaagaaaggcttctccagagaagaaataaataagctctgaagtgtcatgggaatgagtgttccagtaaagcatttggaggaagagtttctagtaaacaacatgtgcaaaggtttaaatgcttgaagtggcatgtgaccttagggaccctcaatgagttaggattggtggagttgaatttggaagttagagtggggggttgttgatgtaatgacagttaaagtcagagaggtaaataagggtcttgtgggtcatgttaagaatttacattttatcctaatcttaatagttatctatcttatgatagaatctatagaacatgaaatgcagtaggagagtggtataaaggaaatctaaggtttctgatttaggcagctgggtcatataaaatgcagaagtaagagcaggtagagggaatgagaaagagagactgaattgggttttagaaatgtgtatttaaggtatgtagtacctgtagttgtaaatatgggcctgaaatgaaaaaaagagtttcaaatcttattttgaaatttgatagtgattgcattcattattctatactgaggtttttttcttttgttagtgtttttgttttttgtttgtttgttttttgactggttcttctgaatgtccttacattttgatgggcatagttaaggaattatggcccaactatatgtagccaagagagcaaagtttaagaagaacatagttaaagtgcgagagagaacccagtatttatttcttctgaaggcaattaggaaaaaatcaggagtgtttaccctctgatatcacaagagttgcttaaaagaacttgaagattgctgctaagtgagtcccatggccaggacatggcctaatggtagtctgagggaagtgtatgaatgaggttttggggtgagtgataagtaagagcttgtcctacataaactcaatctccagtattagagaggtctccaaagcacctaatttcattgaataaaataaaattattactggatttattttaaaatctttggagtttacagcaaactaacacaggaacagaaaaccaaacactgcatgttctcactcataagtgggagttgaacaatgagaacacatggacacagggaggggagcatcacacaccagggcctgtcagggggtgggggacaaggggagggagagcattaggacaaatacctaatgtatgtagggcttaaaacctagatgacaggttgataggtgcagcaaaccaccatggcacatgtatacctatgtaacaaatctgcacgttctgcacatgtatcccagaacttaaagtaaaacaaacaaaaaatgtttagagtttatatttatttctggcttgtatgctgtttgagataaagtcttgtgacaagtttattacctgctgtgctatgtagaactgcctttgattagtcagagcctgacttttcttttccttccagtggagccccctcattaaggcatttcaagcttagttgactaaattcatgtttctgtaatacacatcagtcatgattctacactctttccttatatctgtgtgaagttcatcttttttttttttttttttttgacagagtcttactctgttgcctaggctgcagtgcagtggcacgatcttggctcactgcaacctctgcctccgggttcaagcgattctcctgcctcagcctcccgagtagctgggattacaggtgtgcaccaccatgcccagctaattttttgtattttcagtagagatggggtttcgccatgttggccaggctggtctcaaactcctgacctcacgtgatccacccacctcagcctcaggaagtgttgggattataggcatgagccactgtgcctggccaagttcatgttttaatgatgttagtttatttagttagtttcttcctatacagctgggcccttctcttcatcactatgcaggtcttccttttcttcacttctcacccaacctgatgcatagaaatggacctcagcttgaacttttggaactgatgctgtatagtatagatggaagaatgaggagttttcccttacaggatgcagcagccacacataaggccatctgctcagaaaacctagcagtgggtccccaacctcttcctcatggccacgttcctcagtcaacaagcattatttgaagttttggttacaatgttttccatcacacctgattcttcacacagattttgggagagcttcctggaagccacaacccactggagtgaggaatgctaggtgatctagtatctccatcctggccttgtaaagtttgggttgttggttggaattagttcttgcacaccaagactgcacagagccagctagcagagtgtgcagggcctctgagccagttctgggtgtgctccttgtccaccagccctgctccagcagattctccctgactagccagctatgaactttgccagtgtagttattctctctactacctctcccctctccaaatggtgtcttcctcttcacagccacactgctcataaaatagatttcctcccccaccttctccaaaccaccttagtccaattcccacacccaccacttctctgaggctgctgtaactacagccatcaatgacctgctaattgctaatcccagtggacacatttcagtggttggaatcctgctgtgtttgaaacagtgattactgcttcctgttctcttgaatttgcaacaccaaatcccattctattttctttcatgggtttcttttcttctacttgccccttaaatgttggcattttttatattactgtgacccatttcttctgtcacttatgcatttttcccaagttgtcctctccaatcctagaacataccagccttcaatatactgataattcaagattcatattccagcccagactgctgaagttcagacctgtatatctagccacctcctggacatctccatttgcatagatgaaggagcctctaaatcaatgtgtccacaacccaagttcattctggcctttccacttgctgctgttcctccacctgaaatgtttttctcacaggccccgcgtggctcactgctcacttcatttatcctctctgttcagtcagcaccttccccaaaagtccccatatgtgccttttccttccctggctttatttctcttcagatcatatgtgtctgaatctatataatatttgttacttgtttattgtttgcgcctcacccccaactagaatgtaagctctatttatctgtcttgttcactattatgtttgagccaatttctggtgtccaaatattaagtgagtgaatacaccatcccccacccccagactgatttctgtatgttttatcttcatgggtgacaccagtcccaccctcagtcactcaggttggaaatttggagttatactagaaacttcttttaccatcaccacatcctcactttcccatatccaacagtcaccagttcccgccagttttatctcgtaataatttctcagatctgtcttctatctctgtccctatgatcaccttatttccagccatcagacctctcttctgtcttattgcacctcttaatgtgcttcctgcctcagtttttaaccacccaaatccagcctcaatggaagccagagtggtctttctaaaaagcagatgtgaccctgctgttttcctatgtgaaactcttcagtgggcccattcaactatgggatcaagtctaagctctttagcatgacacgtgagaatatggtggaataaggtggaatgaatctggtggaataaggtgcaccccttgcgttagactaactgcagggtgtgccccacagtttcctgcctccattcttaagctgtcccctcagcctaaaatgattgtctttcccctctgccttccccctcctggtggattctccctcatcattcttttaagcatcagttttggggtcacctaaactccctgtgctcttttgcattttccttagcactgtacctatacttaaaacattatctgccagccaggcacagtggcacatgcctataatcccagcaatttgggaagccaaggcgggtggatcacgaggtcaggtgttcgagaccagcctggccaacatagcgaaacctcatctctactaaaaatacgaaaaaaaaaaaaatagctgggtgtggtggcaggcgcctgtaatcccagctactcgggaggctgaggaaggagaattgcttgaacctgggaagtggaggttgcagtgagccgagatcgcgccactgcactccagcccaggtgacagtacgagactctatctcaaaaaacaaaaaacaaacaaacaaacaaacaaacattatctgccatgtgtctgcctccttcattagatcagattggaactcactgagggaaaggactgtgtattatttatctttttattctcttcatctaactccatgactgaaacatagtgaggatttgataaacgtttgaataaatgaaagaataatgaatgacccatcgagatagatttctggctgaattctggtcattgtcatcaagttatggcataaaattacatttccaaaatctgaaaaatattagtgtaatctgcaaaatgtgaattcattatgtgctgtgtgttactgaacattgcattgttgcttttcagcaagtgctcatgtcttactttccctgttgtcctattaagttcaaaagtcgacttaacaaaatctaaacagaaaaaagagaatgggggaataggaacaagagaagattacatccatttttttttgtcttatgaatttgaagcattttctcaaatgtgaagaaaagggcactttttcagcagtaaagtaattgtgtttttattataaagtgtattatgttaggcatgtgggcaatatgactcaatgaatagttcttcaggattagtgtatgcctagttgaaacttaatgctctttccctcagcatgcatgtaggatctgaattttcactgtgaaagcaaatgctcctgttggagacctttatcatcaacttgttggaattcatgcctagaatattttaagttgaacaattctatcacagtggcatgcatagattgctgagaaaggcacagtgctaatgatgctgtagacatcttaaaagctaggaatgctccatgtaatgtagatggcagagaaaatgaagtgtgccagtctgttttctgttgcttataacaaaatatctgaaactgagtaatttctaaagaaaaggaatttattttttacagttatagaggctggaaagtccaaggttgagaggtcacatatgatgagaatcttcttgccagtgggaactttctgaagagtcccaaggtggtgtaaggacccagaaatttctgatcttcttctacatctaattgccctgggtcgaggcagggtatcacagggcaagggggctgagcatgctaatgtgttagctcaggcctctcttcttcttataaagcaatcacttcccctcccatgataacctattaatccattagcccattaatccataaataacaaattcattcatgaagacagagcccatatcatccaatcacctcttttaaaggcccccacctctcaatactaccagattggtgattaagtttcaacatgagttttggaggagacattcaaaccatagcaaccaatcccaaactgaggtaagtgaagctgcacagtggttttaaaactgttttactgagccctaagattctgcaacattgtcttggggccacctacaggtggacttaagaagtgaaactgaagctgcccctcattcccactgcaaagagcagtaactctggtacctggtttaaagagggtggttctttattacattttacttgatatttgacttgatttagttgaatataactgttgttgtgttctataatacggagaaaattttgaatgaataaaactaggtatagttttaagtagcaagattccgagtagcttaagaggattaaaaaacaaggaagatattttagattctcacattctaattcttacaagtggagaagaaggggagactgcgttaacttggaaactaatactgatgagcacaaatgtaaagggttatgagcacacaaatgaagggtccatgcactacacctaggaactttaaggaggcatattctgtgaagatattttcaggagtgctgatacccagaaagaattggtgttttggaaacatctagagaatagtcaaaaatgtatgttaatttatgtttgaatcaggaaggaagatatctctctgcctagggagagggagtaatgataacagatgccagaaaacatccaacagaggcaggagcaatgccagcagataaagttggggagctggcccagttctcaacagtggagggtatgtggaccctagaaactcaaggcttgtgagcttggtgtccatctctggcaaagtcctaagccaatttagcagatggtttgagagcactaaggaaagatgctggagagttagcttagtaaaacaaagtcttggtaaacttccatgcttctcttattgatagagtctgtcttgacttcagcaatatttttattgggcagtttatgataaccaatatgtctttttttccgttgagaacaaaaaaactgactcaaggaaagaataggaggggtgaagctcatgccagagaagcaggaagatacttccttatgggcagcttgatggagccacatagaatctgcttaaggcagcgggaagcttagataatctaccagctctaggtgcagagtgtcccctaatactgcatttccccaactgagaaccatgaccacctcccgccttcagagatactttggggtatttatttaaaatgccccatccagaatcatgatctctggaggcatagcccaggaatctatacttttaacaagcttcccaaatacttaccaagcacatataaattttagaaccgttgcttcaaagataagattatttgctgtgaggaaagctacccagttagagaaacagagaaagtctttagttgtttcataagcaggttcattttttatatatgattgtgacccagaaatttctgatcttcctctacatctaattgccctgggtcaagcccaacccaaatgccatctggtgacagccacttatgctgcaaaagcagagctgatgaggcaaatcttttgagcagtaaaatgggattttgcatcaggtaaagaccttaggtgaagagcaatgaggcatactgaaagaaacttagttctacacaattccttgagaaactcagtctccatgctgcctggattgggggcagggatgtatcagtacatctgtaaacaactaattctccagaatagaaaaggtatgcataaatatacacgcatacgtttattttaagtgttactcatataaatgctgtgcggtgcacaattcataataaaatacacattgcattttattgattacattacaattgattctcacagaatgcttttcttgatttttgtcaaactcctgtatccatagcaaccttaggttgcagctgacaaatgagtgtaggcccaacaagcctgttggttgatagcttcatttatatgaacaagtaagaggaaagtaaaacaatgacacatgtcagaacttcacttattcatcaataatctgagcaacttcttgaatcagataatagttttttaatattggaagaatatgtcctcaatattttgtgctgtttacaaagtaatgtctacagacaagacacacttttcatctgttatttacattttctccagcactatcgtaagactttcataaaacgtcactttcagaagaccttaacaaaataataaataaaaccttggtttgtggtgtttgcaagttttgtggtataagtgctcccagcctggctgttttcaagctaccaataagatattgctgaccgtggagctgggaagagatgtgcagtagtgcatcaatatctggtatttccaggtggagaagaagggatactatagatgtaagtactatagatgtaagtaagatactatagacgtaagtggagaagaagaagatactagagatgtaagtaacactgagagcatagacaataaattgtagttaaatgagtaggaaatgataacttttgagaatcatctttgaatatcacctttgacttttgaatattacctttgttttcagcatagtttattgaattttacatttatataatttagtttttcatggtggctgtgtttaataatcagctctcaaaattcctgaaaatttaagttgattcttatgagcttctgtgagctgagtctaattcactactgaatgggcagattttctgaactcacagatatgtgacggggttatatccctgcttttatgcaggagcatatgtatgatactcaggcacatttctatatttgcatacaaatgcagctcctctaaaccagagcataacagtatcatgtctgacaaatgtgtcctgcccctgggcatcacaatgagaggaattcctaaacagatgagatcagatccaatagaacaggtttcctctgtcatgtctgggaaactatttatgactcatactctttgccagctctgtgttttgcatcagtagatattctgacatgtaaaggtacccctctcatgttgcatcctactgatttcagcaaaactgtttttgataccttgacactttctacaagcccttcagaatacagtgatgttatgatattactgctttttacatttccacttcctttcttctacacctgttctgtaaaagggtattcagtttgcaattaaaattcgatggcagcctagctgtggccatgagagtagatttttggagccatttacacaaagccagatatagaatttatttgatgtgtaaaaatttttggagctgaaagtttgagactatctgccacatagaaagatatgaggatttgagccaccacttttgtgtaaattcttattaaaaacagacagtgctgtgcaaggttgtttcttggatagaatttttggatggtaatagaataagctatatacttctagtgcacaattattttctctcttcctgttttctcgctgttatgcttgtaagcaaattgttaaataagttcattctgctccccaagagcatttccagaagtgtcttggaacttcccactgtaggtacctgggctctatcagtattttctgtactgacctttgtaattatgacacaggggatacttaaacaggactttgcttgccaaacaaatataaacacaaaattgctttaagttgctaactgttcttcctgctgtggacattggccatgacccagcaacttggctgctatttcagccataagagattttctgtaggtcctcaaatactatctcaagtaaaaattcttatggagtccactcattccaggttagggtaagaaaacttttctcctaataatgtaataaaattttactttataaaatgaaaataagcaacattctttcatattataaagaacataacataaaaccaaataatcttttggctgagaggaaatgccaaacccatttcagaacatttatgttatttttccatgctctcttcaagccaagttgattgcatacaaatctcctaaggggatgtgcaactgattccatggtcctggctcagggcaaaaaaaatggaaccatgactgaggggttttataaaatatcctttgcccaggtaaatatggaggtgtgagttcacagagacagtcaggtagacagatgtcaggttaggaactccaggctccaaggtgctgatgaccagcagtacctaattacagctcctctagtgtgcacctctctgagtactgtgtgcacgcttgccagcctagaggtgtcttcagtggccatcggggtcctccaacctggagtagcctgtaggcagcatggtgggaagtccctgagaggagaaacattcttaggtgctgtcctgtgctttctggcagttgtttcccttgagacacagccccttttgatccctttatggatccctgtgagtcagaatttggaatgtttcagcctcctaatttaaagcatgttttctttaaattacatttaacttctctacattttataatttttaataataattatccaagtaatatatgcaccgtgttaaaacacacacacacacacgcacacacacacacacacattaccaaaggagagagagaaacagagattgagagagagagagagaaagctttaatttagaatggacctgtgggtccactcccagaggcaaccatttttatttacccttttctagttttaggtttctgataattcccactattctgtaaataatgtactttaatttttggtttaccaactttagattatatatgtatgtgtgtgtatatatatatatatatacacacacacacacacacagcctaacatatatatttatatatatgttatatatgttaagctgaatacttactaagaagcagctatttttgctcccaaactgaatcaaatgctttgtaagactcagtgaagttatttttaaaaatgctggtaaattaggatggagaaaaactgtgaaagattgaagacagtggtaaaaacctagaaggattttcttctcagattgctccacaaatatttttaatttcttattctactttaaggaaatgcaagttgaacacacagacaaaactgcattatgggtatttttttatgtaaaaagccaacacaaaaatataatcagaggacccatattcaaagaaaagaacattaccctttgtcaaaagctcagttaatgttttcagtaaaaataaaatatttacattaaaataaaataaggtttaagcggaggcagtttttggtttaactgactttttcaattaactgatcccaatcgcattagccaagaagactttttaatattagagtacagtggttaagagtagccttcagcaaattatttcacctttctgtgcctagattctttatctgttaatttgtagtaatcatgggttttcatgataatcaatgaattgccttatcacatcattgacacttgttaggaactcgaatgtggagctattgttattgctattacaatattgtaattttgtaaaaaaattagtaactacccagccttgaagtgtgattggaccctccaaaaaggcaacacagttttatgctaatctcttgccacttgaagatttctgttccttgcatctaaagtcttcacttatctccatcaattattcaaaatcttgtcatgttctaattgacttggtatttggctattaactttcctttatggtattatgtgtttcttaggctattttataagattttgtatcataaaatacttaggatatttcataaacaaggaaagcatcttttaaataaaagcgtatttcttcactatattgttaagtatatccagcctcttgatcatacattttgcattgagaagccaactttcttatttttgacagtattcttctagaaagatactctttaaacctgcacagagctgagcctcaagttactgccacttgaaggttaggtacattagtttccctactttctctttcttgaattcctttttccttaattagttggagtacattctcaagtaaatttttcaaaagagaaacatggtatgtaaatgttgagccctttacatttctaaaaatgctcttattttgtcctgatattaaatagtgatttggctaagcatacattctacaatgaaaatcatgttctcttagtatattaaagggattgtttcataggcttctagcattctagattccttaagagaagtctgaaggcagtctgcttctagatctctttatagtcttctctctcaccttgaagttctgatatttcatagcagtgtgtctgggtgtgctctctttttcattcatctttctcagcattt

SEQ ID NO: 770 - DNA, 17858 bp, Homo sapiens
  source 1..17858: mol_type = other DNA
gctgcggcggcggcggcggcggcagcggcggcagcggcggctccgggtgagtccgctcctccccctcctcctgccacagccccagccccagtcaaatccctggggtcggccccggcgcatgggggcggggtagatgcagaggcgcgtggatctcgggccggggagtgggagcgctgcagcgctctctggccaccccgggggaggggcacgtggccctggaagggggtcccgaaacacctgggtgtatcccacccctcgcccaccgatccccagcgcggggggatcgtttcctcattccgtggcccctaaggacttagggctccgtggcttttcgaagtcccggacatcgttcccctcccctgaagcgtcttgggaccccagcatcttaaccccccaaaaccttaaaaaaaaaaaaaaaatcccatcctctctgcagcccggaggcattaaggacttcaactcccagcagatcctgcagcgccgggtctatgaagccgcagcagcgcgagcgcgagacctgccgggaattgtagtctctaagccctcaacgggagctgggggcccggaggtgggagggggtggccgggctcccagtgggtcgcctggggtcgggcagctggctcgagtagggcaagatgtgactgttaagctgagctttttctcccggcctcagcccctagatcagacattctctctcattacccggcgcgtgggaacgggtccacagccccttgtccgccctagaacccccatgggctgccgcccgccgccgcctcggctgccacccaggacacggcagagataagcgcaggtgagtgtggccatgcctgtcttggagtcctggccttctgcagcacccccacgacacctgtccatctgtgagccctggtctgtctgttcctaattcccctgcatccccttcaacccatcttgatgcctggctccgagccatgtgtcactaattccccctctccccacatccacctctccttcctagcctcctctcatttatgtgctcattgaaccttcccttatgaacccatgtctgtctgcccagccctcctgtctccttttgtctatctgcgatctctagccatcatctgctgtccttgcccacccatccatcctcccgttcgaccgtttctctttcaaagatatttctgcccacactcctgcctgcccctcttcaccgtctctcgtcctctcgtctctcaagcccccgtgaattaattacatctcggttcattccttgtcactgtccatcccaagtctcaatccttgactttccttctgcctgcctgttcacctctccatctcttcggagcctcagtctgcccttcacattatctctgtctcccctccctgtatctctccctccctcaacttggtccccatctctgcatctccacctctccacccccagctcccaccatacctatccacctccaatctctctacccacatccatccttctctcctggccctccccgcgtctaccccagtctggcctccttggtccctggaccctccaactgctttcctaccctaagcccctgtcatcctgctcctactgtctaaaatgcttttctttaaaatgcttttcccatcctggcgccactgccccccgcctgtggctggctccatgtcatccttcaggtttgggagagccctccctgaccgcccccctctgagttcctttgtgacacattctccagctgtgtcctgtggagcgcttctcacagacagtctgacagtgaccggtttgtgtatgtgtttttgtttgcttgtttactctatgtctcctctcgttggattgtgacaccgggaggtcagggaactccaggaccttgttctctgctggattcgcagcaaccagcacagcacgtagggcgtagttggtgctggatggatgtttgttgaatgaatgaatgatgaatggctggcaccttgtctgctcatccctaactcctgttccttcatctgtgcagccctaatctttgtttcctcatctgtccatccctttatttgtgcatcctcattcttagccccttcactgcccttctccatctcttcctccttgttcatttgtccctgttctctgtcctctactccactcatgcccatctctgtccccttgacttacccagtccctgctactatctccatccctaatttctgccctcttgtctgtctactcctaattccttttccttgtccatccctaatacctgtcaccttgtccttcttcctcgaatctccatccctaatccatctgcccctaatctctgtcccctttgcccatccttccttttctcggtgtctctttccacccttatctccacacctgcccaccctgcactcccattctgtttcccatctgcacccttgccccatccctcccacacacaggaccagacggccaccatgtcaggagactacgaggatgacctctgccggcgggcactcatcctggtctcggacctctgtgcgcgggtccgagatgctgacaccaacgacaggtgccaggagttcaatgaccgaatccgaggctatccccggggtccagatgcaggtcagcacccctgcctgtcttggccagccccctgcttgcactatggccaggagactcggagcagaactgctcagctttccattgcttgtggggtcagtccctcgtagcgtcttgcccccattctgcctgctgctgcccttctcccaaatctctgatccaaggggaaggagctgtgtggtctgctttttgagttttgccctgtgggcctccctccgactaccaccaccaaatgcccccttcagatatctctctgcatcttgtgcaaatgtcaggctcttgagtcagactgacttgtttgggttcaagtcccatctccctcactttattaataactgcatggctgtaggtaagtgactcttcttctgggactcagtctcctcatctggaaaatggggataataaaagggatgcttcatagagcagatgaaagacttaaatgatataacacctacgaagaacttagaacaatgctgggattcacttactgagcaccaactgtggtccaggcagcatgcgaggtcctctgcacatctcaatgattactcacagtgaccctttgtggaacatataatccccattttcaacagaggaaactgaggctgagaagggtgaagtgacctgtccaaggtcacacagctagaaagcagcagggttctgggaatgaggaaacattatgagtgccattgtccagatgaggaaacggtgaccagaggaagcatgtgctgagtgattacaaccacagtcacacttgctgagcaccagggcagggtctggcacctcatgtgcaggatgtccaggtgacagtcatgagggataaggccgagagagcagcagtcacttgcccagaggctcaatggtagcagaggcagaactgaatcctgcatagtctagtacagcactgtagtctggaggtgcccatgaccaccctcaggttcaatgatttgctagaatcattgactcacagaactcaggaaactgtttttgtttgtctgtctgtttgtttttgagatggagtttcactcttgttgcccaggctggagtgtaattaatggtgggatctcggctcactgcatcctccacctcccaggttcaagtgattctcctgcctcagcctccagagtagctaggattacaggcgtctgccaccacgcccagttaattttttgtattttcagtagagacagggtttcatcctgttcgccaggctggtctcgaactcctgacctcaagtgatccacccgccccagcctcccaaagtgctgggattacaggcatgagccaccacgcctggctggaaactgttatactcatggttatggtttatgacagtgaaaggatacagactgaagtcagcaaagggaagaggcacccagggcagagtccaggacagaccaggtgtgagcttccagtcatcctctcccagtggagtcacatggacagtgcttaattttcccagcaacgacatgtgacagcatgcacagtctattacgaaccaggaaagctcacctgagccttggtgggcagggtttttattgggggtcggcctcatatacgtgactgattgctggtgtggctgactttagtctccagctcctccagaggctgagctggaggcctccagcatatatcacagtgttaacatagactatgccacatgatccaaggccccaggtaaacaaagacactctaatcaggcaggacattccatgggcttagaggttccctcccgggagctgatcaagggccaaacctttctctgggcaaggtgaatcttctactgcgcaactacaccacctctccacgcccaaataactccccagtctgtgcagacaggaatggggaatctgtcagggtttgtgggattcatgttttgagttggacagggtctgaatcaggctggcggtaggggaaagcatctgtttaatttttctccacaatgaccctgttttctcaactcaacctgtgttcaggaggctcataaagtccttgcctctggtttctaacaggccacccagaatgctcagtgagtgttggtcacttaaaaaggagcactctgggccaggtgtggtggctcacacctgtaatcccagcactttgggaggctgaggtgggcggatcacaaggtcaggagatcaagaccatccatggtaaaaccctatctctactaaaaatacaaaaacaaaaaattagctgggcatggtggcaggcgcctgtagtcccagctacttgggaggctgaggcaggagaacggcatcaacccaggaggtggagcttgcagtgagccaagatcacaccactgcactccgcagagatcacatcactgcactccagcctgggtgacacagcgagactctgtctcaaaaaaaaagagaaggagcactctggccaggcatggtggtgcatgcctgtaatcccagtactttgggaagccgaggtggatggatctgaggccaggagttcaagaccagcctggccaacataacaaaactccgtctattccaaaaatacaaaaattagccaggcatgctggtgcccacttgttgttccagctactcaggaggctcaggcacaggaagtgcttgaacctgggaggtggaggcttcagtgaaccgagatcatgccactgcactccagcctggatgatagagcaagactctgcctcaaaaaaaaaaaaaaaaaaaaaaaaaaaaagcaccccaagagggaggggggaaggaaacccagagttcttctgccagtgcctggtatatgtccctgcagggccacttcctctctctcagagcctgttttctcatctgtaaaatgggataagtcattccaaagttatataatgtcataaggattaatgtcacacaccactgtagcttcactaagcagtacaggaccagaaggcaaccccttcctgctgtgtgtcccctaatataactggacacagccattccactcagctgtccttgccggcaatggcctagctacctgcttccccaccataacccactgtctgtcaggagtagggattttccctgtctttcactttgtcaacacccagaagtccatttcaaaacaaattcccattccttgaaggtcatttctgaaaaaccccactcctggtaccaattactgaagaagcctaaaacctttgattgtaagaacaattctgtacttgggtttctctgcaaggcatatcagcacatatgtggcattcagaatgtgttagctatcttgttgatggtgttggacgcacatagtggcagcaataggatttattattctaataaaaattcacatttgaactaccatttattgggaagcgttgaggtgtgatagcatcatagtaaagaccatgggctctgaagccaggcttcccagacttaaatcctgactctaccacctaccagctatggactttgagcaggtaactatgggtatacagacctcagttttcttttgtggaaaacagggataaatatgttgccaacctcatgtagtgcctggcaggcttaaataacctgatctctataaagtactgagctatttggtatgtaatcacccctcaagatatgtttgttattatcttccacatgtgatttaccttctgcattccttcaaactactgtaagagggaagaactgatttttcctacttggaaaatgggaaatgtaaggttcagagtggtcaagatatgttcccaaggccacacagcaagcgtgatttaaaccctgccctgcctaactgtgtcgtgcagggtccatgcttccttgaccatctctgagcattttggaggaccttggtgctacctcacatgttgtgttctattatagagaggcagcaaagtctagtgattaagagaataaaatctggagagagactgctggattcaaatctcagaactgtcatttattacttgtaaaaccttaaacaaatcactgaatctctctgtgtctcagtttcctcatctttaaaatggtcatatagaactactgggctgggcacagtggccacatctgtaatcacagcactttgggaggccaaggtgggaagattgcttgaggccaggagttcgagccagcctgggcaacatagcaagacctcatctctacagaaaaatttaaaagttagccaggtgtgatagcacatacctgtagttccagcttcttgggaggctgaggtaagaggattgcttgagcccaagagttcgagggtgcagtgagctgtgattatgccactgcactccagcctgagtaacagagattccatctctttaaaaaaatacaatacttaaccttgtagagttgtagaacataaattaagtaatacatgtaaagtgcctggcacttgcaattgcatggacaattgcatggcaaatatgaagggttaactctttggggacagcagagggaggatgtactgtgaccccatcctgacccctacctctgtcctcgttctctccagacatctccgtgagcctgctgtcggtcatcgtgacattctgtggcattgtccttctgggtgtctctctcttcgtgtcctggaagttgtgctgggtgccctggcgggacaagggaggctcggcagtgggcggtggccccctgcgcaaagacctaggccctggtgtcgggctggcaggcctggtaggcggaggcgggcaccacctggcggctggcctgggtggccatcctctgctgggcggcccacaccaccatgcccatgccgcccaccatccaccctttgctgagctgctggagccaggcagcctggggggttctgacacccctgagccctcctacttggacatggactcgtatccagaggctgcagcagcagcagtggccgctggggtcaaaccgagccaaacatcccctgagctgccctctgaggggggagcaggctctgggttgctcctgctgccccccagtggtgggggcttgcccagtgcccagtcacatcagcaggtcacaagcctggcacccactaccaggtgagagaggatactgggttgggggtccactctgaacttctgctcctcctctgtgtctctttcctatctatagctcttatgagttcgggatttggaggggaatcggggtattgactcctggatcttagggaaagaggaggctggggccctagactcctggatctgagggaggttggggctgtggggtctagaccccttggaccagaagaagtaggggactgggggcctgaattcctgggtccagagggaggagactgggggcaggacttaggacaggaaagtagaggagaataaggttggatccccaagtcccctgtggcacaaggcagttcaccccctttcaccctaagccaggattggtagtgggacctggagttccttcattcattatttctcaatatacatgtaaatgtatattgagcactgatataaactaggcctgagaggggtgttaggaaaacaccagactctgccctcctgtcactcacagcgcaggggaggcgacccccagactggctgtcctggtgtagccaggttggtgagacaggaaagcgactcagggaaccgcaactgggagaaggctgggagcttcctggaggtggagatgtctcagctgagacctgcaggctgagggagagttgggaaggcaaagaggcagggctgtgacctgggcattccaggtgaaaggagaggcccaggcaaagacaagaggagaacgagatcctagtgcattgtgaggacagcccacaccaaggggacagccagggcaccaagccttagtcaccaaggcatgagaataagtttgaaaaacggaaaacttcaggctgggcgcagtggctcatgcctgtaatcccagcactttgggaggccgaagtgggcagatcacttgaggtcaggagttcgagaccagcctggccaatatggtgaaaccccatctctactaaaaatacaaaaacaaacaaacaaaaatagccgggcatggttgtgtgtgtctgtaatcccagctactcgggaggctgagacgggagaatctcttgaacctgggagccaagattgcaccactgtactccagcctgggcagcagagtgagactccatctcaaaaaaaaaaaaaaaaaagaaagaaagaaaaaagaaaaagaaaacttcagagatgtgactacagacaccagaccacatggggctttgagtgcccgcctgagggtctgggactttgtcctgagggcactgaggagccatgggagggctgtgagcaggggaggggcaggctcagctctgggtgtagaaggaaccctctggggccatatgggagtgggctggagggagacactggaggctgagagtccaggagaggacaaggcctgagctgtgaccaggacagtggggatagagaggagagacagccggggagattaagagaagggcagaagagcgttcaaagaaggtctgccaggggtccatggagaagcatcctgggtcaccagcttgaggtccaaaagaggttactggaagctggtttatgcacaggtctgggctggagctagctttgaaatggggagaatgaggctgggtgtggtggctcacacctgtaatcccagcactttgggaggccgaggcgggcagatcatctgaggtcaggagtttaagaccagcctgaccaacatggtgaaaccccatctctgctaaaaatataaaaattagccggatatggtggtgcatgcctgtaatcccagttactcgggaggctgaggcaggataatcacttgaacctgggaggcagagtttgcagtgggccgagatcgcgcctttgcactccagcctgggtgacaagagcaaaacttcgtctcaaaagaaaaggaaagaaggaaggaaggaaagaagggagggagggagggagggagggagagaaggaatgccccccagataccaatggggaatctgaggctcagagagcacagtggcttcctcaagctcacacagtgagcaaaggaggggacttgtggccacctggctgggggatggggggaaaggcagggaggagtctcccaggtctctgcatgcagtcgaagatcagagccactgacctcaccttggtctccccccaaccccctacaggtacccagccctgccccgacccctcacccagcagactctgacctcccagccggaccccagcagtgaggagcggccacctgccctgcccttacccctgcctggaggcgaggaaaaagccaaactcattgggcagattaagccagagctgtaccaggggactggccctggtggccggcggagcggtgggggcccaggctctggagaggcaggcacaggggcaccctgtggccgtatcagcttcgccctgcggtacctctatggctcggaccagctggtggtgaggatcctgcaggccctggacctccctgccaaggactccaacggcttctcagacccctacgtcaagatctacctgctgcctgaccgcaagaaaaagtttcagaccaaggtccggagcagcgggctggacaccgggttcccacagagagggagctagggctctggactcccgggtctgagggaggaggggctgggggcctggactcccgggtctgagggaggaggggctgggggcctggactcccgggtctgagggaggaggggctgggggcctggactcctgggtctgagggaggaggggctgggggctggactcctggatcctgtggaggaggggcttatgggcacggtgtctgtctcctgtcgcccaccaccaccaggtgcacaggaagaccctgaaccccgtcttcaatgagacgtttcaattctcggtgcccctggccgagctggcccaacgcaaactgcacttcagcgtctatgactttgaccgcttctcgcggcacgacctcatcggccaggtggtgctggacaacctcctggagctggccgagcagccccctgaccgcccgctctggagggacatcgtggagggcggctcggtcagtggccctctcccctgaccttccccttcccagggccctgagaccccccgggttgcaagccccctgccctcagagttcataacttcctcacttcttgtccccacatttttctgttaaaatgtatcacactggggaagactgcaaacttacaggcaagaatagagaatgagccgggcgcggtagctcatgcctataatcccagcactttgggaggccaggtgggcagatcacttgaggttgggagttcgagaccagcctggccaacatggagaaaccccatctctactaaaaatacaaaaattagccgggcatggtggcacatgcctgtaatcccagctacttaggaggatgaggcaggagaatcgcttgcaccaggaagtggaggttgtggtgagcagagatcatgccattgcactccagcgtaggcaacaagagcgaaactccgtctcaaaaaaaaaaaaaaaagaacagataatgatacagtggacaccattcctctcctcaacatcgccaaatgttagcatcaggtctggatccgattttccaacctctcacccgctttgccataggatgccttcctgcctcaaccccatgacttctcccctctcaccccagacttcttaccttcctaacttcctgactttccaatgactggacttctggaagccccagtccctctctaatctctgaacttctgaaagccccaatccctctctaatctctgaacttctgaattttcccaacccctgacattggaactctttcatattctgaccctctgttttttcatggtccctgcccgaatgctgatagcttgatcccccaggcctcagccatcctgggatccccaatatgcagacactcctcagttctcccagcatccagattatagggcccaatggcttcttccttattccttgcgacccctgccctctggtatctcattctccctgtacctccaatccctccccagccccattcttaggtacttcttgtgtgtgtgtcctgagctcttctgccccaccaaatctcagatcctcaactctacagcgcccccgctccaacctaatttgtggattatccaacattccagttctctgccaatctggggtagctgtgtgtgtgttgtggggagggcggccttcatatcaggagaggactagacctcctcaaggttctttccttttctgagcctcagtttccccatctgttcaatgacagatgtccagttgagctgggtgccaggtaggctttttgggtagctctttgggtaggcttcttcatggggccctccccagcctgcctgcttggcccccaagcccagcctttgagattgaagtgcccagttccaaggtcccagggcccctgtgtattccaccagctcctactcccagtcatcacccatggcagccccatgccagggccttctctctgtatccatgctggcctaattcttgtgctcacccttctcattttctctctccatcatcatcacttgaggttttcctcactcattccattgattcatacattctctctctctcatttttttttttttttttttgagacagagtctctctctgtcacccaggctggagtacagtggcgcaatctcagctcactgcaacctccacctcccgggttcaagtgattgtgattctcatgcttcagtcacccaagtagctgggattacaggcacctgccaccatgcccggctaatttttgtatttttagtagagacagggtttcgccatgctggccaggctggtctcgaactcctgagctcaggttaaccgcccacctcagcctcccaaagtgctgggattacaggcatcagccactgcacccagccttcattcatttcttcaaccactgtttttttcaggagcagggcctggggaccccaggcagccctcggcagctccaggtctagatggtcgggccttgtgtcaggggccagggttatggggaggcacaggaggagcctctgcagggctgtgggggatctgggagcttgtggaacgaggggaggctcaaaggccaaggagagatagagggaagagtgttctggcagagggacagcctgggcagatgccctgaggggaatgagtagggagtcctgggcacagttgggaggccgcagggctaggccaggttggtcaaagctcccagctagctccagcgtggctccagcctgtgtgtcagggttgggggcagtcctggaaacttcggtggaggttgatgaatctcctgccctctctcaggctggtttatgtgtgtgtgtctgcttggtctttgtcccactctgtctgagtcagcctctctctctctctctctctttctcttggtgcagggagtagggtatctgagtctaggtttctctctcgctctctggtctctgcccctccactctaattctaggtaactatcactctctctgggtctttatgcacccccaacccactgtctctgtccctctctctctctgggcctctgtctctctctgagtctctctctatatatatctctctctctttctctctctgggtctctgtaccccctgtctctgggcttctgtctctctctgggtctctatctctctgtctctgggtctctgtccccctctctgtctgggtctctgcccctttctctctctgggtctgtcctcctctctctgggtctctgtccccctctctttctgggcctctgtcctcctctctctctgggcttctgtcctcctctctctctgggtctctgtcctcctctctgggtctctgtccccccccctctctctctgggcctctgtccccctctctctctgggtctctgtctccctctctttctgggtctctgtctccctctctctgggtctctctctgtgtctgtctctgggcctctgtccctctgacttgagaactttgcctgtgggtctgtctttccagctgtatccctccgtgttttggcttctgtctcagtctatttctctttgtgttttctctctctctcaccttctctgtctctcccctcctctctctctcccctcactcatgcttcttccaatctttcctgcagaacaaataagctttgatggtcatgggcagctgtggccagggaattactgggccttgtcccaagagtcagattgctaagtggatgggaagcctgagccctggatgtcagggtgtaaagcaggaggctccgaccggagagaaaatcagggagagttgaagaggggctgaggcaagatatcgctgaccttttccccaactgcaggaaaaagcagatcttggggagctcaacttctcactctgctacctccccacggccgggcgcctcaccgtgaccatcatcaaagcctctaacctcaaagcgatggacctcactggcttctcaggtgagggtcctgggtctgagggaggagggctgggggcctggactcctgggtctgagggaggaggggccaggggcctggactcctgggtctgagggaggaggagctggggatctggactcctgggtctgagggaggaggggccaggggcctggactcctgggtcggagagaggaggacctggggtctggactcttgggcctgaggaaggagggactgggggcctggggccccggacctctgggtctgagggaggaggggctcggggcctggggtcctggacccctaggtctgagggagtgagtctctgttccttacttcattgctgttcccagacccctacgtgaaggcctccctgatcagcgaggggcggcgtctgaagaagcggaaaacctccatcaagaagaacacgctgaaccccacctataatgaggcgctggtgttcgacgtggcccccgagagcgtggagaacgtggggctcagcatcgccgtggtagactacgactggtgaggggcgcggcccgggcgggggtcaggcaggagggctggggtggggacaggccctcccaccaccctccacggtcctcactgaccccaacccccagcatcgggcacaacgaggtgatcggcgtgtgccgtgtgggccccgacgctgccgacccgcacggccgcgagcactgggcagagatgctggccaatccccgcaagcccgtggagcactggcatcagctagtggaggtgagtaggggtcccacaccgacccctgacaagcacccgtgcaccctcggccccttcatccatgcaacgaacgccctgcatgttcgtgagtcgcagagccaggcgtcctaggtttcaatccctgctgtgccaactttagctgtgcggcttagagccagttacccaagcgctctgtgcctcaatttacccactaggaaatgggactgttgatagcatcttctgttaggatagaggtgagatgtgctgagttaaacgttctgtaggtggtcgctgctgttgttacccatgaggctaagttgaaaatagagggggctgggcgtggtggctcacgcctgtaatcccagcactttgggaggccgaggagggtggatcacctgaggtcaggagtttgagaccagcctgaccaacatggagaaaccctgtctctactaaaaatacaaaattagctgggcgtggtggcgcacgcctgtaatcccagctacttgggaggctgaggcaggagaatcgcttgaacctgggaggcagaggttgcggtgagctgaggtggcgccattgcactccagcctgggcgacagagcaagactctgtctcaaaaaaaaaaaaaaaagtcatttaagattatcgcttgatcaggagaaataatcaaacatggccattctctcaatagaaaacaagaggagcaaagaagtagctttagaaagtgttattggcagatttgcctccattaaaagccaagaaagtcaaattattcaaattctgtctagggtatatatgaaagatttaaatgtaaaataatgttgtgaatttcaacacacttacttcatttttcagtatttttcaactagtttagcattccaggaaaaataaatttagaaaaaatatataaaaacttgggcagggcacagtggctcatgcctgaaatcccagcacaggccttgggaggccaaggtgggtggatcacttgagcctgggagtttaagactagcctgagcaacatggggagagcctgtctctacaaaaataatttaggaattagctaggcatggtagtgtgtgcttatagtccctgctactcaggaggctgaggcaggaggatctcttgagcccaggagtttgttactgcagtgagctatgatctcaccaccacactccagcctgggcaatggagcaggaacccctctccttaaaaaaaaaaaaaaagcaagtatatgagggcacatacatttcctttgaaatagcagtctgatgtggcatgagactggccttttttaaaaatttgatattttcttcatcattgatttttttgcattaattttgattttttttaaaatcttgcattattattattattgttattattgagacagagtctcactctgtcacccaggctggagtgcagtgttgcagtcttggctcactgcaacctccccctccctgagtacaagtgattctcctgcttcagcctcccaagtagctgggactacaggcgtgtgccacctcaccctgctaatttttttttttttttttttttttttttttttttttttttgtagagacagggttttgccatgttgtccaggctggtctcaacttcccacctcaagtgatccacccaccttgggctcccaaagtgctgggattataggcgtgagccaccgcgcctggccaatattgcatgaaatattctttatcttgattgctgcatttggggcacacatttacatttagtactgggtgaaactttcaccacatcaccagatttagtctggccctgctgtgggcttttttccagtgatcatgagggacccgacacctgggcacagaactcagatttgagattggaaaagacggggactctactaaggtggataggatggaggctactccctcctcctgtcattcactcattcatccgttcattaattcatcccaccaaccttcccaggagtttctggtgagccactgcccatgttgggcaacgctggtggcacagagtctaggccgagtcctgacactgcccatgaatttcagcccctcatgctccctgtggccccagaagatccttctacacccagagcttcccctccccttccttgctcacagccctcccgtggctccccagtggccccaggacagagtctcagcccctctgataccatgcaggacttgccccactcatccctacagcctcatctctcctcgcatttgcagagactcctcttttttgtgcctccatttccccatctgtagaatggaattgtaataccatctgtccgtcacttcagggccaagtgagaaagcgcatcctaaataatgaaacaggattgacgtcttctcctgttgatgattagcatctgtttcaactctctgtctctcactcccgaaccttctgcactttctcctttaggaaaagactgtgaccagcttcacaaaaggcagcaaaggactatcagagaaagagaactccgagtgaggggtaagcagcctggccacagggaaggggctgggggtggagatgcctgcgtctgagggaggaggggctgggggcctggactcctgggtctgagggaggaggggctgcgcctgggactcctggatctctgggtggtgatggagctacaggaggtcgtggtgcagttctctgccattgctgacccctcctttcctgctccatcgtgcaggtctggcctaggcccgggatcggaccaggctccctcaggaccccatcctttcctgcccggaccgtgaattcatctccttgaagccataacgtccgagctgctggtgcggggcagccctggccctaggcttcctaaccctggaagcgagaggatgagaggaggccggcccagctccttctttcagggtgggggtcattcagcctccactgtgtctgtcttttcttccctggggctccccctcgaggcgaggggccatgcatgtctgggggacccctgccccccaaaaccctctgtctgtctctgtctctttgctgtttgtccaagactcagtgtcccgacccttgttctcgccgtgaatgtcaatgggccaatcctctctgtcctttcagacacacacacacctgtgtccaccccttctgttcgccacacccctgcgtctggccggtccccccactgctgctgctatcaacgccagaataaacacactctgtgggtctcactcca

SEQ ID NO: 771 - DNA, 3886 bp, Homo sapiens
  source 1..3886: mol_type = other DNA
agatggctgtggagctgggcgtgctgctcgtccggccccggcccggaaccgggctgggtagagtgatgcggaccctcctgctggtgctgtggctggcgacgcgcggaagcgcgctctactttcacatcggagagacggagaagaagtgctttattgaggagatcccggacgagaccatggtcataggtgcgggggcggggaggaaggggcgagtttggaacgtgaccgtggtcttggggcgggggatgcgagacagtcagctctctagagccgggaggagacggcctcgccgtgcccaggcggtcgcggaacccatgccacctcgcgctcctctgacctgggctcgccctgcttccctcaaggaaactaccggacgcagctgtatgacaagcagcgggaggagtaccagccggccaccccggggcttggcatgtttgtggaggtgaaggacccagaggacaaggtgagccaaccgcccccctcctctccgccagcctctcagctaggcgggctccggtacttcctcttctagttcctgcatctgctaaagtgggagagacagttgatgttgtgggaatatcctgctgacttgcagaccccgcccggtctgtgaaatgggcggattaattgtggtgataaaaatcaaagagttttgtcaactcttaaagtcatctagactttaagatttcacagaacatgatactttccccacaaaatgagcagcttttaatcttcccaagtaaggatattaaaacgaacggcaaaacccttcagctctcaccttctgtcacttttcgttaaaaaactcatggcggggtgtggtggctcttgcctgtaatcccagcactttgggatgccgaggcgggtggatcacttgaggccgggagttcaggaccggcctgggcaacctccgtctggcaaaccccgtctctagtaaaaatacaaaaaaaaaaaaaaaaaaaaatgagccgggtgtggtggcgcacacctctaataccagatacttgggaggctaaggcacgataattgcttgaacctgggaagctgaggctgcagtgagctgagatagcatcactgcactccagccaggacgacagagtgagactctgtctcaaaaacaaaaacaaaaaagaaccccccaaaaaacaactcacaccaaaaaagttgaaagggcataagctataaaggaaagcccttcccaagagcagtcagtcacttgccaccctaatgtcagactctcagagtctaaacacctgccccagagagttctcacacaagcatatggcaacagctgctgagcagctttgaatctttcagtgttgtgaggtgcgaaaggctgtgcctgtcaacttttgcagtacttagagccttaagcactgttttcctccattcccatccctaccataatactgactgaagcttgttaccttcctccaggtcatcctggcccggcagtatggctccgagggcaggttcactttcacttcccatacccctggtgagcaccagatctgtcttcactccaattccaccaagttctccctctttgctggaggcatgctggtaagtgggcccatgtgagacttgcaggtttcagccttcatcctttggtgaggactgggggactggtggtgctgtgggtgtgagaggattatgtcagattttgtgtctcctaagaacactgggtttccactggatgtccaggacacagtgactgagctctttgtacatgcctcactcagagcaccagcccaggcttaatacttgcttgtgtgcccagagcctcatggggctaagacactgaagagggcccagtctgttggctaaatgaacagatgaaggaaagtcggggatgagctgtcagtctctggcaggaagatggagcagggctaccagatttcccttatctcctttgtctgtcctcagagagttcacctggacatccaggtaggtgaacatgccaatgactatgcagaaattgctgctaaagacaagttgagtgagttgcagctacgagtgcgacagctggtggaacaagtggagcagatccagaaagagcagaactaccagcgggtgagtgactgggccgggagcagtgggcttctccctagaagctgcccactggctcagccaggaatttcacattaaattcattctgagacccccaagggacttacctgcactgcattgtaggtcgtggggcgggtattactaactcgaccttgtaattgaggatacagactcgtaagaggctgtcattgccctaaatcacagttacacacagaatggcacagtagcatttgataccaacaccttgggtgctgtttcagtgggtccacatgctcccaggaccagggtctcaaacttaccggtgaccaggaaccagagattaccataagtgaatctgtgaccttaaggactagtagggcagtgacccatctaaacaagcacagccactgttcagtgtcacctgggggcttccttgcagaaataccagccctggctttacagatgttccattttttcaagaggaaataggatttttatgcgaacattttaatttattttttatttttttctattgctgctgcacaaattacctgtgttttaaatgttgacaaaagactgtgcactgtgtgaggccaacaaaacatacctaaaggccagatccagcccccagcctgccagtttacagcctgtgcccaccatcttcaaggagcagtgtgggagacctaggcagagggcttagagcaagtccactcctgtgtgctccaggacagctctgcctcgtggggtgataccacaactaccttacctctctcccaggcaccagggcaggactaggtgagggctatgcctgacagatgaagaaacagacttgggagaatgagtaggttgcctgagggtaaagatagtccccaggtagagtgacactttgcaggcacttggctggaacctgggcaaagctggctgaccttgggcatcctcttggtctgggaatcagcagttctagcagccccagccaactcaggctcaccttatattcccctgcagtggcgagaggagcgcttccggcagaccagtgagagcaccaaccagcgggtgctgtggtggtccattctgcagaccctcatcctcgtggccatcggtgtctggcagatgcggcacctcaagagcttctttgaagccaagaagcttgtgtagctgtcccaggcgtcacaacccatcctcccaggctgggggagaaaggacctcctggaactgacttcttctgtcaggaggactggtttccagccatacctgttctggaagggagaggggctggaggcacccacaggcacaagctgaaggcagcagcttggctaatactgagcaggtagtggggcaaattcctgccctctctctctggcctctgggccgtttggtagtaatcacccaagggctggtaaagcccctcctcttggcacctcagaatcacagtgttactgatcagggatgtgaggctgctgttgggggtggggggaggggaatgggcaggcaagccagtcttctgtcttcctttgctaacttagggttttgagcaggttggggtatggtgcctgtcatacccacctgccaccctgggaacctcactgttctctctttcagcctagacctgctgatccagggtgtgtgtgagttgagggtgggtggaggggtttgcagtgtgggaatgtggccctgcagttgacctgagctgcttcacatggttgtccattctggggcttaaagaactgggaccagaccaagtagaggccttggtgctggttggggtggggcctgcagagtcttagttactgatttcattttcaataaatgtaggtttgttacatgagtttcccaataa

SEQ ID NO: 772 - DNA, 32744 bp, Homo sapiens
  source 1..32744: mol_type = other DNA
gcgggggcgggaacccgggctcgggcccggccgggcgccgggcggcggcggccgtggagcagcagcctcggtgcgacgtggagggctggaggcggcggcgatgcactaggcctcgctcagggcggctgccccgggacccgcaggtaggtgtgccccgcggccccccgcgcgtctcagcccactctcaccccgacctacagcggagagagggaccgagaccccaccccctcggctctcctccccagccccaaacggaccgagtttcggtcacagctgaccggcactgaagcttccatgctcctctccgccacttccttttttttttttttttttccttttcactctccctccgggatcggggctggcagctgtgttccctgcctcctgtcagcgaccgcaaacgccgctcttgcccctctcttatctttccgggatcccagctctggaacttccatcacccccttagacgctgcccccaaactttccttttctttttccagccaggcccttagtcctattggattctactggaatcgttaaaacatttgtttgtttttctctccggggaaggctaacccaaagagttactcagtattttgcattttggcaatgtagcttgaaataatttgtgcaataattttcttcagttctgcctccttccatctctgcatagacagaaagggcaggccctctctgccgtttctgctctcccgtcgttgacttgggaactttggcttgccaattataattagccgtttggtctgttcatgtgttgagttcaagatggtatttttagcattttgactgacaggcgtttcaaaaaaaaatttttttcttctaaccagctttattttttggtctttattgaggctctttcgaagaattaaattgtttggactgtttttgtttttaattggctgtatttctgatttgtcaaatcaagggcggtcttaatactaaacgcctttaagtaataccgtgataaattacttgtagtataccgagaaatattactgcgataacctaaactgcagattttgatgtacattcacttttataaatccgaaggggagttctaattggaaaaagcaccttcagagcctaaatgatttctaagcagttaaatgatggaacagagggaatgatgggatttgtttgactgtatttgtagtgtagtcagaatcggatttcctagaaatggatgttgatggttcgtagtgctcatcattgcttatgataggttaccagtagctgtaattgatagttgtttgggacgacagtagatgtttgcgattttattgtaatttggctatttttaaattatgttctgataacttaagaattattacactaccaatctaagaggcagtctgaggatcacttttttaaataaatgaaaaatgttttaatgggtttttaaaataaagaatgcatcacaaccaaatcgtaaagactgttttgttgttgatattcgtatattttgttcttgtagaagtattgttactacagcatttggctttctgaagtgtttttgaaattagaatttaatactaaaagtttactaggaaaaggtgattacttttgcatatgcttatattttctggaaagttaaaattgatttctggataagataattttttgtgtcagaattaaagtcaattcctatatagcccatgaaacggcaaattttgcagaatttcttcatcacactctttttttttgtttcttttctttttttttttttgagacggggtcttgctctgttgcccaggctggagtgcagtggcgctatcttggctcaccgcaacctccgcctaccggcttcaagtgattcttctgcctcagtctcctgagtagctgggactacaggcgcccccacgcctggctgatttttgtatttttagtagagacgggggtttcaccatattagccaggctggtcttgaactcctgaccttgtgatccaccggcctcggcctcccagagtgctgggattagaggtgtgagccaccgccccggccccggcccatcacactctttttttttttttttttttttttaatcaacaaaagttaattacaattcctctttcctgctctttgctttttaaaaactgctttattgagataaaattaacataccataaaatacacccatttaaggtgtaccacttggccgggttcagtggctcacacctgtaatcccaccactttgggaagcctagtcaggtagatcacctgaggtccagagttcgagaccagcctagccaacatggtgaaaccccgtctgtactaaaaatatataaattagccgggcatgggggtgagcgcctgtcatcccagctactggggaggctgaggctggcgaatcgcttgaacctgggaggtggaggttgcagtgagccaagatagcaccactgcactacaggctgggtgacagaacgagactccatctcaaaaaaaaaaaaaaaatatacaattcagtggtttttagattaaataattgtgcaaccatcaccataatctaattttagaacattttcatcattccctcaaaaaacctttatccattaacagttactccccattctcttcaccccacccccagctttaggcaaccactagtctactttctgtctcaatattggcctaatgtgggcctttcatataatgcttcttggctcatagcttcttgaaaagcttttcctttaaaatcagtgtacatgttaaaattttttatttgagctagggaataagcaactgatcaccaatattaaaagtgatgttgtaaataactgatacactttttggttgtattcagcataaagttggagaaggcatgaatggcttcagtaacctcaagaggtagtttggtcagctcggaatcaataagtaaaagtgggcatttttgtcattgaatattagaatatcagggaaaagatcttaaaggtcatcagcttacttcctgcttacctcgctattagttggcagcaaccagatgaggaaacatggagattagaagcttgaatctctaggatgtgtggctcaagaaccacagcgtggccatgtaaagcaagaaatgggactttggaagttagaattgtttagattcttgtatatatgtatgtatttgacattttgctagcagagctgagaaagaactggacattcccccaactttgggggaaaagtgggtgactatatgtagctacattgatgaaacccatgttacaaaatcctctaaaaatgctttaacctaaggaagggtagcaaatgtattatttagatatcttcttatactattaatgtcttatttttttaaatccaaattttaaaaaaatataattaacagggccagttggaggtttcctttttcaaatatccagtgccctaacatctaaaacaatggctctgcgaggacggttttgactccaagggaaatttggcagtgtctagagacatttttggttgtcatagctgaaggaaatggtattggccaaggatgttgctaaataccctacaatgcacaggacatacttctgcaagaaattatccggttcaaaatgtcaatggtaccattgtaaacctaggggctgcacgatttctggtaaggacctagtgtttttgattcctaccaggtgggagaatagtctcagtgggcgatgtttggtgaattagattaacaccttagatcctctagcaactaactctatttctttgcaagaggaggaattgagggaaaaataaaaggaaatctgtttacgacatgacgcagatactgtttcgtatgtttaggttgtcttcaaatctgaaaaaagaacccctttttttctaaaaacagacttaatttactgcaaatttggactactattgttttgaattgttatttttgcatatgtttttgaaattgtaaatagaatatagtcatatcttttttatccagaagtgatttttttttttcctggcagcttcaactaccaagaaaggagaagtaagctaagtgtttaactttatggataacacttatgttatatatgtatgtataacacttatgttatgtatgtatgtatgtatgttgtgaatgtccagaaaaattccaagcttataatgaatctttttttcccctatgagctccactttagactatttaatgtttttaacaagcttaatttgttgatgaaagaaggtaattgacagttgagatcacttttgctatttatcatccataccttatggataagttactcaagttattctttctgagcctcagttttctcatctataaaataggggtagtgataatccatgtattacaaggctattgtaagaattattaaatgaggtaatatgtattaagatgcagtgtcaactataatatactgtagaagagttattcgcttcagaagaatcaaattaggaaggaatatagaggttgtcaaaggcaggaatgtagatagtaaggcggagaatagtgatggctgacagcctctctagggaggagagaagcactaaatacaaatattgataacaaactagtaaaataactagtatatcactataatctgaaactccttaatataggggcaaactgacttccttctgtagcacctgagagtatcaccgttatagcacagtaaaataactgattattataatggtgaaattaacttattaagaaaagattaccttgttttcaaatatgctatttgagaagacttgaaaatatatatattttacttcagagttaaaatttttggaagtgacttattcaaaaagttttagtgtttttaagagtatgctgtcgttatttggattaattcccttttggggaataatccttttgtcttcatttactatgcctgccttcctgtgtatttgaagggtttttctattatctgaaggtaattattcttcagatgtgagaatttaactgaagaaataggggttgtaagcctgctcaccatttgtaaaatctcatttccttctagatttcttttaaaattatttttcatctttctggcgtgtcactacgcccagcaaatttttgtattttaagtggagacagggtttcgccatgttggtcagactggtctcgaactcctgaccttgtgatctacctgcctcggccttccaaagtgttgggattacaggtgtgagccaccgcgcctggctggtttcttaaaattttgttaactggtcacctttctttcagaatcatataaaaataagggtagaggtggtcaaaggcccagctattcagtaagatttttatggggtaatttgagggtggaatagttgcagacaatattcagaataagtaatgtggtattgattggtattatatatgatatatatatatctctctatatgatatatatatctctatatatgtgatatatatcaatatatagatatatatatcaatatatatctatatattgatatatatttatatataaatgctgatatatatcatatgatatatattgatatatatttatatataaatgctgatatatatatcatatatatatatcagcatttacttaataacattatttgatgtatactctatacttaaatcttcccatttgtcccaaaaatctttatagctttttcccccctcaaatgcaggattcattcaaggttaatgcattgcatttggctggtatgtctctttaagtctcccccaatctggactagtcctaccgccttcctctcttctttaggtttatccattgagaagtagagaccatatgtcctggagcatgttccacattctgaattggtctgttcctcatgattagattctagtcagacatttctggtgagaccatcacacagatgatgtgtatttctgctgtattacatcaggaggcacatgatttcaggctatcactatatcggtaatgcaagtttgatcacttggtaaaggtgaactgacagatctctctactgtttaataaataatttatagaggatacttaatagccatgtaaatatcctattccctgacaaccctttaaccagtgattttggtacccattaatgatccttgcttgaatcagtcattatgttggaggattacaaatggtaacttttctttttgcattccttctacttttattaccttctttgactttttcagggcattgaggtcaggttagataaattctgaatataggccacggaatgtagaaatcaggtcattcctaaccttttctggagccaagtaaatggtgaagatggaagacagctaaggaagtagaccaaaaagagaacggaggtttgccaatgaaggggaggtgagaagtagtagctggaggaggcagggaggagggaaagggccttcatttggtgcttgaaattttcttttcttttttttttttttgatgggccgatgaagagattaaagatagaattggggaataactaatagaaaaaggtcccagatgaagcaggaagaggtaagatcaaaaacagctgttgggggattaactctggaaaagagtagacacctatactctatctcagaaagttaagagttgtgtatagatgagaattaggtacatttggatatgaacggaaaaaactacatctggggactttttttttttttttttttttaaacagttactttttgagccttgcgttgttggaagtaggctaggggacttgaggagagtgatgaaaatgttccacatattgtggggaatggagaagagaagtgtttcaagataaataagtgaaagaattgctgagcagcatcagaggctcatctgagattggaactcataaatttgtaatcagcatattttactgttttttctggcagtgttctgcaagcaggagaaaagcaaagacacactgtattgaaggtggatgagggaggagagatgcaagggagatgaagtaatggggatgtaggctaagtaatgaagttagtaaagtagagcagggctaagatagccaaccagtggtgagagatgcaagggtaatgccaaggagtgattaattaaaatactaatttattgtttgtttgaggttatagtaatcataaaccctgtatttacttttcccttaaactaacatttaatatttttatttgtaaactatttactgacttattgcagatgtttcttagctattttgctttattttccctaaaatgaaaattccttgaaagcatcatctttgttacttaataagtatctaatagtttatatatttgagacatatttattcttcagtacctctgaatgagagattttaagattatcttgctaatatttttggctgggacaccaagaagagaataccagtgtctaatatggttcattttgactgacaaaaatttcactagtaatacaatcgtatcagtggcccaaaggagtaagaaagcatccaagctattttttgttgttgttggaatttttacatgctagagacagattttatcttagtatagtttattcatattccaggcctgtgacccttaatcaattttttttttcttttgagatggagtctggctctgttgctaagctggagtgcagtggtataatcacggctcactgcaacctccccgttctgtgttcaagcgattgctctgcctcagcctcccgagtagctgggactacaggcgtgcaccaccatgcccggctaactttttgtattttagtagagacagggttttaccatgttggccatgatggtctggatatcctgtccttgtgacctgcctgcctcagcctcccaaagtgctgggattacaggcatgagccaccgtgcccggcctccccttaattttaatggctgctataatgttataattctctgagtgctggggaaaaaaagacattgcttttatttggaataatatctagacttaaaaagtatatattttatgaggatatttatgatttttcttcctgataaagatatcacatgaaatagcatttgttttataagccatttaaaaatatttaaatttaacattacaaattgttataatttttatcctcctagtcaatattatttcttattgtttcttgtcactaaataaaaagtaaataagcaactttaggaagcgcatgcattcagagtttcctgcaaagcacagggtttcataaatgccatatgaggatgtaaagaaaaagaaaattagattactacaactttgttcttattttctgggttccttaagcctcttccatacttctttaatgctcaagaggactatagaagtacttatttatatgacagccccaatgttagtatttcttgagattatgtttaaattgtaccttcaatattgagatttttgtgagcaataatatgtgatacgcattttaaaaaaatttaaagatttttaaaaattatgattaaactagattttgtcaaatgataaatagtgtagaagtatattgctatttgtgtataggtagtatgaaaaacttacatttgccagaaattggcttttacatttcaaaaatgttgtggaaagtacttcttagaacatgagatatttgatgtattttgtaggcaaacagcaagaaaccaactgaaggatgagattaaataggaacaagaaaaggtggtggagaaaggagggggcagagtttttactatggtaacataaactcctgagttctgtcaaactgatctttggtaggacattacagtgtggttaagtttttcttgcatattatcagtacttgtaaatttggagaaatgaaatttgagatttttttgtttgcttttaaaaaaacagcagtcagttgtggacttttaaaaaaattaggtccaaaattgtatcaaaattatgtcaaaaaagctctgtccagctccagtgttaaaaagaaattccactttatccatgttttctcaaattataaatagactttttttaaaaaagttcatttataagtcaattatatggggccaggcgcggtggctcacgcctgtaatgccagcactttgggaggccgaggtgggcgaatcacctgaggtcgggagtttgagaccagtctggccaacatggtgaaacttcgtctctactgaaaatacgaaaattaggcaggcaaggtgacaggcgtttgtagtcccattttcttgggaggctgaggtaggagaatcagttgaatccagaagcaggaagttgcagtgagccgagatcacgccactgcactccagcctgagtgacagagcgagactgtctcaaaaaaaaaaaaaagggtcaattatatggaattcagaagttgttgttgttgaaatggcctctctccactgccttggtcagagtgcagtgatgccatcacagctcactgcagcctcaacttcttgggctcaaactttcttgaaagtgctaaaatgatgcgccaaagtagtatatttatcccacgttacaggtgcacaattactcctttggtaagaaaaatgcagtaaattacactgatgaaaatgtaggctgggcatggtggctcacgcctgtaatcccagcactttgggaggctgaggcaggcggatcacctgaggtcaggagtttgagaccagcctgggcaacatggtgaaaccctgtctatactaaaaatacaaagattagccgggtgtggtgctgggtgccagtagtcttagctactcaggaggctgaggcaggagaatcgcttgaacccgggaggcggaggttgttatgaactgagatcttgccactgtactccagtctaggcgacacagcgagactccatctcaaaaaaaaagaaaagaaaatgtatagtatcttttttcttttggaatagtcctggtcttataaaattgtcacaattagatgttaattatttctatcattcaatagaagatgaacataagtaacagttatgagagtaaataattattgattcagtcattgatctgataaggagacaaagacagaagaggaaagcaccaggagcctgaaatgggtgggaaggagtagtgacataatttaaaatttttttattggtgcagagacagaggcatgaaacttagaatcagaaaatctgaattcagattccctcttcacagttaactcactgaatggtctgaaatcaagttactctagaacttgtttcttcattcatataatggagatcgttgattcattgattcattcagaaatatttttcttactaggttattttgaagatgaacaaaaacatctgaaagtaagctattatgaactgtatagtgttcactgtatttgactgtatagtcagatattagtgatgatgcaattcttcttgtctttccatttcattcttccctgtcatccttccttctttcattgatagcgtatttttacatgctcttgatctagcgcttcacagaaccttcagagcctgcagtcccagctgatttccactcctcctcccactcacacattgggcacaggagtagggtgtgaggcaacttttctaggtcagcctgcttattttctcactgttgactgacaaagtcctgtctttctcaaggtgtgacataaacctgaggtgccttttagtccctgggcttgatattctttctttctcactttgcctctccttttcccatcccctctcgccccattcctgtgtgtatgtaactctgaccatctcctttctccaccacttacttgttccttttttttttttttgagacggagtcgcgctctgtcacccaggctggagttcaatggcatgatcttggctcattgcaacctctgcctcccaggtccaagcgattcttgtgcctcaaccttctgagtagctgggattacaggtgcatgccaccatgcccggctaatttttcgtattttttgtagagatggggtttcaccacgttggctaggctgatcttgaactcctgacctcaggtgatctaaccacctcgtcctcccaaagtgctggaattacagacatgagccactgcgcccggcctcttgttcctctttaatctcacccttcaattggcttcttgctgtttgcctacaaatatggtcaggtctccgatagcctaaaagattcttgctcaactcttgttctttttttttttttccttttaccaccaaagagatgttgatattgttgcctttattacttcatcacttacctcttaacctcagtgggattgcttcttccctaaccactgtcctgaaactgttcttaatccagtatcctttctaaagttagtaatctccttgatctctttgcagcatgttgatgctacttactgttcgcactttacttcctgacacatcttccctgtgtaaggatggtatttctgattgcctttgtcttttcctctaaacatatttgccctaccccttcttcagagctttcattagctctcttcttcggcactttctccatttgtaatatcactttcctgtgactatctgtagttatctactaattcattcctgtaatgtaattgaactagaagcagtaatggaaaattcagggaagcaggattctgttcactacaagaatattttttctccaaagtaattatggttgttttacagtagtactctgcttttaaagtagttaattcttcattattgaagttttcaagtagaggcaaaaagacaccttgtagaaaggatttatatatgaagtagaaagtcaagccagatattcttttaaagtcttgtccaactcaaaaattgtaatttttatctcgtctactctacttccatggacttaactttgacctatgctcagatgtcttccaaaccattatttccagtcactcccctaccacctcctcgtctgtcttctctcccacgggcacaattttgtcatcaaagttgcttatgttctaggccaccatattttctagcttcattatcactttccaatattctttttaccccctttagtggcaaggcaatgaggatcatttttctatgctttggtgacttttctgaaagtaagttatgtctgcccatattggtttagtttgttattgctgttttccctctactttctcctacccaccacctctctctccaggattaggaatgctcaagcaaagaaaaggacgccagaagaggaggctcaggatcctaaagtttgcatttattttaaaattttgcatggcacagttgaaatgttaatgtttgctgaccatttaaaaagtaagatgtttgccgggcgtggtggctcacgcctgtaatcccagcactttgggaggccaaggcgggtggatcacctgaggtcaggagttcaagactagcctgaccaatatggcgaaaccctgtctctactaaaattacagaaattagctgggcgtggtggcatgcgcctgtagtcccagatactcaggaggctgaggcaggagaatggcttgaaactgggaggcggaggttgcagtgaagccgcgattgcaccactgcactctagcctgctgacagtgagactgtctcaaaaaaaaaaagtttataataatagttgttgcaattatttattgaatgtctactatgtaccaagtattatgctatgaactcacataagttatttcatttaaatcttatgacattcctatgaggaagatactgctgctgtcccattttacaaattaggaaacagacttaggaaggtaagacagttgtcacacaactaataaatgacagtgatctaactgattgtatggccaatactcttaactagtatatcgttttacaaggaaggtggagatctagaatcaaatttcagaaagtcaagtaatgttaatacaaacaaggaaatatattttggatttatatttttagattatttgaaatgtatgtgaaccttttgaggtattgtgttagtggcttgtgtgtcttacacactttctgtgatattcattcatttgctcattcgttcattgaatagtcatgcagtttattgaatgcttagactttgtattgggtgtggtataggaaagtgaatgaaacaaatataagtaagtaagtttacagtatagtgggagagataggaaacaagcaggtaaataatcacataatttattttagtctagagtagtttcccacctttttaaaatgactgagtatccaagccattttcttaatagactatctcatactcttaatttgtctcattgtttcctcatatatggtggtttaaaccttactatcctacttccttctatttactgtaaactcaaaggtaggtctagagcaagggtgctgaaccttgagttcacagactcttgtagggtctgtagaattcagggaatctgtgaactttagatggggaaaaaattacatctttattttaacttattccctaactcagtggttctcaaccggggtgagtttgtcttctccttccccaaccctaggacatttttgattgtcacagctgggtgggtacaagatagtccctgataacagaattatccctttcaaaatgtcagtagtgtcaaagttgaaaaactctgccctaactggattttagcatttcctttaattaggaatataagaaacgcttcatggatacagtatggacagtacatttacagtacctgtagctttgtcaccaatagaaatctcaggtattctcatatcacattcaattgctacagatatcttaagatttaatttatgctcatttattgcctataaggtagttactagattcgtattaagaagcaatagtaggctgggcgcggtggctcacgcctgtaatcccagcactttgggaggccgaggcgggcggatcacaaggtcaggagatcgagaccatcttggctaacacggtgaaaccccgtctctactaaaaatacaaaaaattagccgggcgcggtggcgggcacctgtagtcccagctactcgggaggctgaggcaggagaatggcgtgaacctgggaggcggagcttgcagtgagccgagattgtgccactgcaatctggcctgggctaaagagcgggactccgtctcaaaaaaaaaaaaaaaaaaaaaaaaaaaaaaaagaagcaatagtagactgggcatggtagctcatgcctgtaataccagcactctgggaggctgatgtgggaggactgcctgagcccaggagttcaggaccagcctggacaacatagtgagacctcgtctctacaaaaatacaaaaattagccaggtgtggtagtgtgcacctgtggtcccagctactcaggaggctgaggtgggaggatcgcttgcacccaggaggttgagattgcagtgagctgtgattatgtcactgcactccagcctgggtgacagtgagagcctgtctcaaaaagaagaaataatactatgttataatttaaacagttattattgtagctgtagttcagtataattgtccattgtagtgttgtgtgttttatgcatttaaaaacattattctaagaaggtatccataaacttcgccagactgtaaaagaaatccacaggacaataaagcttaactcctgatctagagattggattggattggattggattaaacatttttgaagagactatttcataggtaatgatgtttatttcctattttgtcatttcatgaattacataatatcaggttgtcctcctgttatcagtaatgttaactttaatgacttatgtaaggtggtgacagccaggtctccattttaaagatacattttcccctttgtgttgctaagtaatctgtgaggtaatacttaggcgccatgagaatataatgtttttaacaacttttcacctaatggccttagcatactttggtgatttttgcctgaattagcttttacattgggggttgcaaattggtgattttctaatttggttattccttttatatttattactggcattcttcagtagagattttctttccccaccccctttccttatctttttttttctcccttaagtatctctatgtatccattaatttttacttattccatatgttatactctattacttttaaaaaaatatgctcaagttgtcccaaatgtggccagtgggaacccccttttaacttggtcctttgtcctcttgataggtcctgctggtctttgagcatatcttgctttctgacacaagagtgctcagggtagacttattctttctgtattccatgtctggagttacatattctttcaaagagtcctggttcttttagttggaagtggtatttagaaacagaagtctgggcaccacgtgtgttcattgcttggtggggttctggctggtggttggggttgggggaggcaatgcttctagtgcctttcaaaagaagtttttaactgaacataaaaagatattttgagctataagaaagaaaatcaaatctctatttactcatccttggaaatcctttttttttggaatggatgattgttttttcttttccttattagcccagacccattctgttattacttaagtattattggcagctgtctgtctgttttgtctgtctgttctgatatgttctacataccatccatttcattcatctataaaatttttattatatgtatgacaggaactgtgataagcaaatagaatacacagaaaaacagaaacatcaagaaatgcaaagcctgatagggaagaactgtatgaaaagcaaaacctcagtatgattgatgcaaaaattgaaatacatagagtgactaagtgtgagaaaccaaagaaagcttcaagagagaataatatttgaacatagtattcatacaattataaggagattaccatgtgaaaaaggtagagctatttatagattctcattacaattgttaaaatgccaaatttgtttctagatggtagttaacttgaactatcagaaatcagtagttccctgtgtttagtgcttagagctttccgttttcctgtattttgtgtattttgtttgcttgtttgttttttcgaactgattttttttctgagtagacaaactatcattgcttatcctgaaaccttcttaaggtttctcatcatttttgttctttagcctttcaatgaaagattatttctttgctgaaattttgtgattcagatgccatgtacatttgttgtatttgtctgtacatctacatcttatgaataaatccatgttttcttaccagtgattgtacttttataattatgtgatgatcagtacaaagtttggttcttactgtagggagatctttttaataataagctgtggatggtgaaggcagtgaagagtcaaatgtttggaaactgggactcatctttataggcagtccactagttttatgtaatccccttttactagagatcttccctcttgttataagaattaagagtggtataggaaaaaagagaatgtgcatatgttttccaagtcaaaatctttaaagagtaaaccatgtgtttttctcctcagatacagaaataacttagaagaatctagaaatatttttctgccatctccctgcatatttctaggtttctaaaatggcacttaggattttttttctgtaaaaacagcatggtaaatagaataaatcaagatatcaacatagtattgtcagaatgaatatctaatttatctgacattaagcaatggatgtttaacataaatacattttccacatgtctgtggcttaacacttcatgtcaaaatgtatttattttagatttgggggtacagagcaagatggtggactagaaggctccactggatgtccccctccataggaacaccaaatttaacaactacacaccaaaagcactttcataagaaacaaaaatcaggtgagcactcacagaacctgattttaacttcatattgcccaaagaagcactgaacaggataggaaagacagtcttgaattgctgacaccacctctcccccatcccccatgcagcgactatgtggtgtggagaaatttgtatgcttgggataggaggagtgcagcaattgtgagacttctcattgaatgcactataacagcaaaaagcaaaaccagggtgaactcagctgatgcccacacatggagggagcattcagaccagccctagccagaggggaattacccatcacagtggttggaacttgagttctggcaagccttgccactgtgggctgaggtgtgccggggtcctaaataaaaggcagtgtaagccaaaaggactgcaagtcctagtgctgaactgggctcggcaccagtggaattaggggcacatgacttactaagacatcaattggaacacctaagggagtgcttgtgccaccccttctccaagcccaggcagcccagctcacagctctaaaagatatccctaccttctgcttggggagaggagaaggaagagtaaagaggacttttgtcttacatcttggatatcagctcaaccacagtaggatagggtactggtcaggcccccattctaagccctagctcctggataacatttctagacacacgcctgggctagaagggaacctgttgccttgaagggagggacccagtcctggcaggatccatcctgtgctgactaaagggcccttgggccctgaataactagcagtgataaccacgtagtacgccatgggccttggctgagactcagacatgctggcttcaggtgagacccagcacattcccagctgtagtggctacagtgagagactctgcttgagaaaagcagatggaaaaataaaggggactttgtcttgtatcttaggtatcaccttggccatagtgggttcaaacaccgagtgggctcttggggtccctgattccaggccttggctcttggacagcatttctggacctgccctggaccagaggggagcttactgaagggtgagtcccaggcctggcagccttcaccacaagctgactgaagagcccttgtatcttgtgaacattgacagtagcctggcagtactccctatgggcctttggtggtggtggccacagggtgaggctcctctgcctgtggaaaggggagagagaagtgggaatgaccgtgtctcatgatttgagggccagctcagctgcagtataatagaacaccaggtagacttctaaggtttttgactgattcctagctcctggagataacttctggacttacatgaggacttgggggcacttgctgtcttgaagagaaggacagaagctgggctggctttgccacctgccgatggtagagccctaggtccttgaacaaacataggcggtagccaggtagtggttacggtgggccttgggtgagactcagtgctgtgctggcttcaggtctgacccagtgcagtgccagtgttgaccacagggtgcttgtgttgccctgctgcaagccccatgcagctcagcagaaagagacttcatttgtttgggagaaagtaagggaagagaacaagaatctctgcttggtaatccagagaattcttccagattttattcaagactaccaaggtggtacctctacaagtctgcaagaaccacagcattactgggcttggggtgccccctaaagcagatacagcttaaatcacaacacccaaatccattagagtatctggaaagccttcccaggaaggacaggtacagataagtccagacagtgaagactacaataaataacttcaatgtccagacactgaagaacatctacacccatctacatcatccaggaaaatatgacctctccagatgaactaaataaggcaccagggactaattctggagaaacagagttatgtgacctttcaaacagaaatcaaaacagctgtgttgagaaaactcagagaaattcaagataacacagagatggaattcagaatcctatcagataaatttaacagattgaaataattaaaaataattaaacagatattctggagttgaaaaatgcaattgacatactgaagaatgcatcataatggcttaaaagcagttgatcggccgggtgtggtggcttatgtctgtaatcccatcagtttgggaggctgaggagggtggatcatgaggtcaggagttcgagaccagcccggccaacatggtgaaaccctgcctctactaaagatacaaaaaattagccgggcaaggtggcacatccctgtaatctgagccacttaggaggctgaggcaggagaattgcttgaacctgggaggcagaggttgcagtgagacgagatcgtgccattgcactctagtctgggtgacagggcgagactccatctcaaaacaaaaaacggcagttgatcaagcagaagaaagagttagtgagcttgaagacaggctttttgaaaatacacaatcagagaagacaaaagaaaaaagaataaaaataagcacacctacgggatttagaaagtagccttgaaggggcaaatctaagagttattgtctgtaaagaggaggtagagaaagagataggggtaaaaagtttattcgaaggaataataacagagaacttctcaaacctagagaaagatattaatatccaagtacaagaaggttataggacactaagcaaatttcacccagagaggactaactcgagacatttaataataaaattcccaaagacaaggataaagcaaggatactaaaaggagcaagagaaaagaaacaacatacaatggagctccaatatggctggcagtagacttttcagtagaaaccttacaggccaagagagtggcatgacatgtttcaaatgccgaaggaaaaaaccttttaccttagaatactatatccaatgaaaatatccttcaaacatgaaagagaaataaagactttcccagacaaacaaaagccaagggatttcatcagctccagacctgtcctacaagaaatgctaaagagctggccaggtgcagtggctcacaccggtaatcctggcactttgggaggctgaggtgggtggatcagctgaggtcaggagttgaagactagcctggctaacatgatgaaaccttgtctctactgaaaaacaaaaattagccaggcatgatagatagtccatgcctgtaatcccagctactcaggaggctgaggcaggagaatcacttgaacctgggaggtggaggttgcagtgagccaagatggtgccaccgcactccagcctgggtgacagagtgagactctgtcttaaaaaaagctaaagggtatgtacttcaataaaaaagaaaaagattaataagcaaaaagataccatctgaagatgtaaaactaactggcaatataagtacacagaaaatcatagaatattataacatgataactggtgtgtaaactagccttaattagagaaattaaaaggggccaataaaaaattataactataattttttcaagacataaggatagtaaaatataaatagaaacaacaaaaagctataaagtggggggacatagttaaagtgcagagttttattagttttctttttgcctatttatacaagcagtgttaattgttatctgcataaaacagtgggttataagatagtatttgcaagcctcatggtaacctcaaatcaaaaaacatggaacagatacacaaaaaattaagaaaccaagacattaagtcataacaccagaaaaaaatcacctttactaagaggaagacaggaaggaagagaagactacgaaacaaccagaaaacaaaaaacaaatggcaggagtaagtcgttacttatcagtaataatattgaatgtaagttgactaactctccaatcacaagacataaagaggctgcatggatagaaaaacaggacccagtgatctgttgcccacaagaaacacacttcacctataaagacacacacagacaaaaaaagggatggaaaaagatattctctagtagttatcagacaaaatagatttcaagacacaaactataagaagagacaatgaaggtcaccatataatgataaaggggtcaattcagcataggatataacaattgtaaatatatatgcacctaactattggagcactcatatataaagcaaatattagagccaaagaaacaggttggaaataaagaagacaattcaaataatatcaagcatcttctctgaccacaatggaataaaaccagaaatcaatattaggaattctggaaaccatacaaacacatggaaattacataatatgttcctgaatgaccagtgagtcaatgaagaaattaagaaattgaaaaatttattaataatggaaacatgacataccaaaatctatgaggatacagcaaaaatgatacaaagaggaaagtttatagctataagtgcctacatcaaaaagaagaaaaactttaaataaaaacctaatgatggattttaaagaaagggaaaagcaagagcaagccaaacaaaattagtggaaaaaaagaaataacaaagctcagagcagagataaatgaaattgaaatgaagaaacaggacaaaagatcaataaaacgttgggtttttgaaaagataaaacaaaacaaaacaaaacaaaaactgacacatcttttgccagactaagaaaaaagaagaccccaaaagatcagagatgaaaaaaggagatgctaaaaccgataccacaaaattcagaggattattagcggctactgtgagcaactgtatgccaataaattgcaaaatctagaagaaatggataaattcctatatacgtacaatcttccaggactgaaccatgaagaaacccagggtgtgaacagaccaataacaagtaataagataaaagttgtgatgaaaagtctcccagtaaaaagtccagaacctgaatggcttcactgctgaattctaccaaacatttaatgagggtctagtaccaatcctactcaaactagtctgaaaaataggaggagggaatactttaaaactcattctacgagggcagtattaccctgataccaaaaccaaacaaagacgcatcagaaaacgaaactgcaggcctatgtctaacgggggaaccagccccctgtatttcaacataggttctcttctattttccctaagtgtcggccagtctgagaaataaagggaaatagtacaaaagagagaaattttaaagctgagtgtctgggtgagacatcacatgtcagcaggttccgtgatgcccccgagccataaaaccagcaagtttttattagcaattttcaaaggggagggagtgtatgaatagggtgtgggtcacagagatcacatgcttcaagggcaacaaaatatcacaaggcaaatgggcagggcaaggtcaccaggccagggcaaaactagaattactaatgaggttactaggcaggaatttcctaatcctaataagcctgggggtgctgcaggagactagggtgtgtttcatccctatctacaactgcataaggcagacactcccagagcggccattttagaggcccccctccccggccgggaatgcattcttttcccagggctgttaattattaatattccttactggggaaagaactcagcaatatttctcttactcgtttttggcaataagagaaatatggctctgtcctgcgtggcttccaggcagtcagacctaatggttatctcccttgttccctgaacatcgctgttatcctgttcttttttcaaggtgcccagatttcatattgttcgaacacacatgctttgggaacaatttgtgcagttaacgcaatcatcacagggtcctgaggtgacatacatcctcagcttataaggatgatgggattaagagattaaagtaaagacaggcataggaaattataagagtattgattggggaagtgataaatgtccatgaaatgttcacaatttatgttcagagactgcagtaaagacaggcataagaaattataaaagtattaatttggagcactaacaaattgtccatgaaatcttcacaatttatgttcttctgccatggcttcagccggtccctccgttcagggtccctgacttcctgcaacatctctccctttctttttatataaatgtgccatggtgatgaaggcttgttctctcgattttgacgcaggattctttgactggtccagcacactaaagacaagccgattaaacagggaaacataattccgaaatttactacagtggagcccccaatagacttaatccaagttgtggggtttagtccagaaagattttctgccacctgatctaacgcctcagctccaggcacaatggataaatgagcttgagagacttcaaaaatttgtttatttaatttagtcatgtccaatgataaattatcttccctacccagaaggtgtcctttgaccatttcccatgaatgatcagtctcgttataggaatacagggtgatacggaaatctgaagtattccagtcgcactgcatttgcatgtgatgttcgagactcactacccgatctccaagccaaataacagactgtcttaaatcattaatttgattagccaatttttggtcaatgccttgttgagaattcaacatttggtggaattggcttgccagtcattaacaaaatgagctgtttgaatagactgatgtaacgccattccggcagtggtggccattgcagtgactgtaattaggcccatgatcacagcaattaaagtgaaaacaaatctcttagatctttaaagaattcgctgtaacacttcattaattaaatgtattgagggggaggattcccaaggtctgggcaaagttaccggaatccagatttcttctccagctcgaaccaacattatacttttcctggagtcaaaatgggagttaatacaagtgtataaatgacaatgcattggacagtttgattcttcgtccaaattttgatatttcccactaatggcatgtaaggaggcttaacacaactctttgtggaaacaggttggaggtaagtaaaacagaatgtctggatctacgttgatagtgagagagggggacggtagcagggacaacagacaaaatagtttccccttcccatacttgcagtccagacatggcaatagccaatttctaaagttgtgggtgttctggactcagaatggggaatatcatacgaggcctcagatgggggtaatgcctttatcttcccattttaaggaaaagaatgagctgaacctcctatgcaaagtagaatgatgattctcgttctcccaataagaaataaaataagtagcctccaggcattcccttccaccagaagagcacttgttttttaaatagccctttggtgcccagtctattactaaaccatatgagtcatttataaacattactgcatgtgagttaacacaatcttcccaaattaaggttttagatgggccctcaaaatttttagggcatggttttcctgcaggtttatattgaaagtatgggatatctcccattactccccctttcatttgtcttaaaggagaaagggagaggctggagaccaaatgtcctggtttctctgtagctgatctctctggaagataagcagcccagacttgagtttctagatggatacaaccaggtgcatgtccgaggcacagaggtgggtgtttgtaacccatggtaacattaaatgcagtgccgccttttcctgattgagcggggcaacggtcatctgtagctccaggcatccacacactatcattagtgtagatttctgcaggagcgtccatccaggtgagtggtcgaataagtggaggaaaaggcacataagcccaataagaataattttgtgtagccggtaaatcagtgtgaaaggaaactggtgagacagaaagtataaggaggggaatcattaaataaaacctagtgtaagcgagattcagtgccgaaagaggaagagaagaacagagggatgttattttcaggctaatataaatggtgagatttttaggtttgtaaggagaaaaagaaaggtaattaggagaagtgggattggttagatgggtctgtgttgccatcagggaggattgaatgagacccattgtgatttggtgggccagcttctaaggagttggcacagatctcaccacatctgagggcggtttttgacgcggacgtcttttccctgtggttttcctttgatgatctcctggtgacacacaagcatattctctttcccacgttaactagaatcagagacaatatttaaaggttttggggaaatcctataaggcagtaattacagcaatttaactctgccttttgagcagaggtataaggggtagaaataagcttgtttgtaggacctacataaccagcatttccattactggagccatcagtgaacactgtaacagcctcaggaatgggctgatctttggtcaatcgagggaccacccaagaagtcatttttataaaatcaaacaatttgttttttggataatgaatgtcaataatgccaataaaatcagtcaagtgaatttgccacagtatggaatgttgaaaggtgacttgaacttcgagccgatttaaaggaactacaattaaattcggatcaaatccggaaattttaagtattctacaccgagtctgtccaattaagatggccagttggtccagataaacagacaaagtttttgacacagaatgaggaagaaaacaccactccgctaaatcattatgttgaactattagcccagtaggggagtgcaatgaggcgaaaaccagaagctgaaaaggctgaaacggctgtactctagataactggatggtctgaattctttacgaattccagttctagtgaagcctcaggggtcaaagtcctgggactgcggagattggaatctccccgcagcatagaaaacaagttagtgcataggtcggaatgcctaaagtaggtgttaaataattaatgttacccaaaagtttttggaagtcatttaaagttttcaaataatctctcctaatttgaactttttgaggttgaatatgtttatcgaccatgattcctaaatattgaacaggagtggtctgttgaattttgtcctgagcgatgtgtaatccagcctctaacacagcagctcaaaatttgataacagtcaattctttatcagtgggggcagcaattaaaatatcaatataatgaagaatataggcctggggaaactgggctcgaactggtgaaagcacttgcccaacataaagctggcagattgtagggctatttagcattccctgaggaagtactttccattgataatgagctgcaggctcttgattattgatagatggtacaataaaagcaaatttttcacaatctgatttatgtaaagcaatataaaaaaatcaataactatgagaggccaatttttaggtattaaagcaggggcaggcatgccgagttggaaggctcctataggtttaattacagcattaatggcccttaaattggttaccatccaccacttgcctgatttcttttttactagaaacacaggagaattccagcgggaaagaaggttccaaatttctaagttgtaactgttcagaaactaattgagttaaagcctccagtttttctttagagagcagccactgctgaatccaaatgggtgtgtcagatttccattgtaaaggaataggatcaggaggcgtggcagtggccgccattaaaaaggataacctaaaccagccctgtcttcttttatagtaattgggaggggtttagtaatcccttcatgttttggacggagacggagtccaggaacataccgcatgttttccatcatatgctgactgggagtactataagagttaggtggaatgttaatttaagccccagtatctactaaaccctcaaacttttttccttgaatgtgtatggaggtaggctgttgttcagaaattacattaatccaataagcggccttttcgctgctggagccccttccagggccacgtgtcttatctcctttgtttaaaacaatattaagtagtaaaagcaattgagcaattgagtcaccggccggaatggaaacaggaagcttggcagacacgattagtttaatctcgtcaactgaatcagaattaatgagaccagtatgaatggtgattcctttagcagaggtggatgccctacctaacaccaggctcaccaaaccttgaggtaaagggccagtgacccctgtggggacaattaaaggcaaagagttaggtagtaaatttagaggaatagtgctacagagatcgaccgccccaacccctaacgtggaggtggacaagcattgtactgagaagaagaggctgggacccatctgggttgactgtaggtaaatttgtttgtggtgggggctgcgttgggactgcctgaagtggaaatgcaatgttggtctgagtctgaagcatcccatttgatattggggcctgggactggtcccacttcccatttccctggttctgtggtagggggtttccatctgtatcatacttagagtggcaagtacttgcccaatgtttaccttgcgacgacgtgagcaaacagtagcagcagcatttggccatgtttgttgagccggcttggccgcttttaagtttttaacagtgcaatttttctgagtatgaccaagttgactgcaattatagcaggctccaagaaaagaattagtggggccagtttgattggtccttcatggcccgtgcccacagaatagctttgtgggtgtctgatccaatgccttcacaagctttaatatatgcagggaacacctcgtgatcaggtaaattttgtcattggatggaatgcatggccattttacactcatggttcacattttcaaaagctaacatatgaaaaagaataccttgagcatgctcatcagacagatttttcaatggcatcttgtaatttagctaaaaaatcagggtataattcatcatgaccttgtttaaccatagtaaaagaaacaggagcttggcctggggcgcataatttatcccaagctctcatacacacctttgttacttgttctgtggtaagagcatcaaagtttaattgggcataagtatcagagaaactatcggagcctgtgagctgagcctgagtaattagaatactattagtccgatttagctgagcctgcagatgggcctcttgtgaccaccagatacgaaattgtaaatgctttaatggggttagaaaagcttttgccaaaaggtcccagtctaaaggaagcaaaatgacctcagtacaaaaagtttgtaataccatttaacataaggagaagtaggaccatactgagtacaagcatccttaaattcttttaaaaagctaagattaagaggtacataacgacacatttgtaccctttggaagataggaggttctagtgtgactgggtaagcccacgtgtctaatccacttgtttctttgttttggcataataagtgttgcattgaagtttcaagagtaggtatctgagacagagttggcatagaagtgataggaaaagcatgtgtagataagggaaactgaggttgagggggtcggaccaggatgagagtgtgagaaaggggcattgagggagcagaaggagcagaggtatcctggtgattactggtgtgcatgtgtgaagaagggtacagagaggcaggctgagtggatggcaaagtgaccggttgaggaatggaaatgacaggagagtgaggggctgaagtggatggggtagggcctgaagaattataggtaaattgtagtttggtcctggagccattaggtgactccggaggtttgaagagagaagaattagcgtatatggtcccgggctgtctgagtcgtggccgcgggagcttataagtactggctcttcgtgaaaagaaacaaggtcagcagggggtaacgttaagccaaagtcaccagagttagacattgaattttcagcatcgttaggtgggggaggagtagctgaagggagaggctgatcagataacgaagtccatgcgggagaggaaagttggagaagaggtggagggtcctcacattcagaaaattgtgttaactgtagggggtcacgggattggtatgtcattaggacgacatgtaccaaggcccaatcaccccaaaaagtgacaggaacacatttccctgccgggaacagctcctggaatgttgcaccaacacgatcccatacttttacatatggttcccttttcaggaaaccaaggacagtatttttccaccgccttgaatagagtgaccatattttccatggttactcggacccttccctgttttaacaggtccacatctaaggttgcttttttaggaaaccaaggacagtattttcccactgccctgaatagagtgaccattttttccatgggcactcaaacccttttctgttttaaccagagtgtaatatagaagagataagcataatttttagactccgtgtgacccgtagttaacctggacaaattcacagactactcaccagttgtcagggagtcgaacaagcatttctgtggaccgaaccgatgacatttctccgcacctaccaaagggaatcgggttcccacgtgcacttaggaaaaaaagaaaaaccatgctgggcaccagatatcgggggaaccagttcccgatatttcaacgtgggttcttttctattttccctaagtgtcagccagtctgagaaataaagggaaagagtacaaaagagagaaattttagagctgggtatctgggggagacatcacatgtcagcaggttccatgatgccccctgagccgaaaatccagcaagtttttattagcaattttcaaagaagagggagtatacgaatagagtgtgggtcacagagatcacgtgcttcaagggcaacaaaatatcacaaggcaaatggacagggcaaggtcacaaggccagagcaaaactagaattactaatgaggttcccggtcccgctgtgcaggcactgtcattgataaacatcaggaaacagggtttgagagaagatagccggtctgactacaatttactaggcaggaatttcctaatcctaataagcctgggggtgctgcaggagactagggcgtgtttcatccctatctacaactgcgtaaggcagacactcccagagcggccattttagaggccccccttcccggccgagaatgcattcttttcccagggctgttaattattaatattccttactggggaaagaactcagcaatatttctcttactcgtttttggcaataagagaaatatggctctgtcctgcctggcttccaggcagtcagacctaatggttatctcccttgttccctgaacatcgctgttatcctgcctgttctttttttcaaggtacccagatttcatattgttcaaacatacatgctttacgaacagtctgtgcagttaacgcaatcatcacagggtcccgaggtgacatacatcctcattttacgaagatgatgggattaagagattaaaataaagacaggcataggaaatcataagattgttgattggggaagtgataaatgtccgtgaaatcttcacgatttatgttcagagattgcagtaaagacaggcgtaagaaattataaaagtattaatttggagaactaacaaatgtccatgaaattttcacaatttatgttcttctgccatggcttcagccagtccctcggttcggggtccctgacttcccgcaacacatatctgtgactattgatgcaaaaaatcttcaataaaaatactagcaaaccaaattcaacaacaattaaaaatattattcatcatgaccaagtgggatttatttcaggaatgtagatagttcaacatgtgcaaaggtgatacatcatatcaagagaatgaaggagaaaaaacatatcaattgattcttaaaaagcatgtcataaaattaaacatcctttcataataaaaaccctcaaaactgggtatagaaggaacattcctcaaaacagtaaaagccatgtatgacagacccatagctgttatcacactgaatgaggaaaaactgaaagcccttcttctaagatctgaaacacagcaaggatgcccactttcactacagttattcaacgtagtattggaagtcctagccggagcagtcagacaggagaaagaaagaaagcatccaaattggaaaggaaggagtcaaattatccttgtttgtagattatatgatcttatgtttggataaacctaaagaattcatcaaaaaatgattagaagtgatagattcagtaaagttgcaggatacaaaatcagcatacaaaaatcagtatcatttacatatgccaacactgaacaatgtgaaaaagaaatcaagaaagtaacaacagctagatttacaacagctagaaataaaatacctgggagttaaccaaaaaagtgaaaagtctctacagtgaaagctataaaatgttggttcaagaaattgaaggcaaacacacacacaaaggaaagatattctgtgttcatggattggaagaatcaatattgttaaaatgtccatactaaccaaagcaatctacagattcagtgtattccctatcaaaataccaattaaattcttcagagaaatagaaaaaacaatcttgaaatttatatagaaccacaaaagacttggaataaacaaagctatcctatgcaaaaaaaagaaaattggaagaaccgcatgatgtgatttcaaattatacaacgtattggcatataaccagacacatagaacagtggaaccaagtagagaacccagaaataaatccattcatctacagtgatctcattcttaacaaaggacaatcttggggaaaaggacagtctcttcaataaattgtgctgggaaaactagatatccatggatagaacaatgaaactggaccctatttcgccatatacaaaaataaaatggatgcaagacttaaatctaagacttcaaactatgaaacaacgaaaagaaagccttggggaaaatgtccaggtcattgaagtgagcaaggatttcttgaataaataccccacaagcacaggcaaccaaagcaaaaatgaacaaatggaatcacatcaagttacaaagcttctgcacagcaaaggaaacaacaaagtgaggagacatcccacagaatgggaggaaaatatttgcaaactacccatctgacaagggattaataacaagaatatatagggagctcaaacaaccttatagataaaaatccaatatgttgattaaaagatgggcaaaatatctgaatagatattactcaagagaaaacatgcaaatggcacatgggtgtatttatcatcagaggaatgcaaatcagaagtacaatgagctatctcaccccagttaaaatggcatttatccaaaagacaggcattaagaagtgcttgcgaagatgtggagaatagggaaccctcatacggttagtggtaatgtaaattagtacaatcaccgtggagagcagtttggaggtccctcgaaaaactgaaaacggagctgtatgatccagcattcccactcctaagaatatacaataaatgaaatcagtatattgaagagatatccatatttattgcagcagtattcacaatagcctcgatttggaacagctgaaatgtccatcaacagacgaatgagtaaagaaaatgtggtacatatacacaatagagaactattcagccatagaaaaggatgagatcttgtcatttgcaacagatggatggaagtggaggtcactatgtaagccaggcacagaatgagaaacttcacatgttctcccttatttgtgggagctaaaa

SEQ ID NO: 773 - DNA, 27624 bp, Homo sapiens
  source 1..27624: mol_type = other DNA
agagcgctggggagagagtggagcgccgttcgccggtatgtgcgcatgcgttgaggtctcttgacgccgattggggggtcacgagtcacgggcggcgtgcggcggctggtgggggcgtgtccggcggagcgggcgcggcgttacgaggccgctggttggccagcgctagtcacgtggttcctggccgcaagcgacgcgcgccggtgcgacgtcaacgcagccgggcgagttttaccgatctgtgttccgcggcccggccgcggctgagtcttcccagggtcagggtcaggcgctttgctgagtccctttgtggccgccatggacaattccgggaaggaagcggaggcgatggcgctgttggccgaggcggagcgcaaagtgaagaactcgcagtccttcttctctggcctctttgggtgagaaccgggctgaggggtcggccgggacctaggctgagaggacgaaggagtcacgctcggaggtggcgggttagggcacgcagagctcgggccgaggggacggagaggaacctgcaataaggtgacatggcctgaggcggcagaggggacgcaggctgagggccaagagcctgggccggggcaacacggtttgaggagagacggtctgacatggcggaagggatttgggctgaggacacacggaccgaggcgacactatcttgaggcgaggaaggggacccaggccgaagacaggccagcgggcgggggagaacctggaccgagggagtacgtcctgaagccttggaggggaccggcctggggggacggagggagtccgggagagaagccaggtccagaggcttttcggagctctaggggagtctgtttgaaggctctcaggcggcagtgatggggcctggggctgaggacgcctgcccgagggactgaccttttcaacccctggagcagtggatttgcgtgggccctgggcggtgagggtgaaggctgaagggggctgacaccaggcagaggggctcagggctagatgatcctaggagcggtgagccgcgtctgaagtgtggggggtgcatggggtgagtacggccctggttagcagtgactagtttaaggacagctgaacggaggaacccgggatgatggagtcaagactgtggaggtctcagcactttgggaggccgaggtgggcagattatctgaggcggggagttcgagaccagcctggacaacatggtgaaaccccgtctctactaaaaatacaaaagttatctgggcctggtggcgggtacctgtaatcccagctactcgggaggctggggcaggagaatcacttgaacccggaggtagaggttgcagtgagccgagatcgagccactgcactacagcctgggggacagagcgagactctgtctcaaaaaaaaaaaaaaaaaaaaagaaagaaagaaagaaaaaagcctgaggaggcctgggttgaggctggagactcctgggtgggggaatgcgtggtggtggcttggccaaggagatggagggataacagggagagacagggggactgagagaaccaaaacgggggatcaaattcctgctgtgtgatcctcgagtaatagggatgacagagacatgctgagaagagggatgggaaaaggcctgggagacagaactaacacatatgacgtggcataaaactcacgttagctcctaaaagctgacacgaccatcctgtgataaattgtagtggcttagaagtgccaagagcccaagtagctctgccacttacttcatgactttgggtaaattgtttagtctccctgctaaaggagatcacaaatcaaacctacctcccatttgctatgagtgttagaattgagcctggcgtggagttacatctctgagagtgttagctgttgttaatgtgacttccagaaggaaacaggttcggagcgtgcagagagctgatgggggttcaaggtggacgcccgagcggagaggtctgggaggggtcaggagagggagagactgagaaacatgagtgtgctaagaggagctgaaagggaacagaaaagggatccacgaagacttagtagggttgagaggagcatgaggctctgggcagaggaaggagaagggagtttggcagggggcggtggtgtgggaggtggtgggatctgtgctgatgggacgacccgaaagggtcaaggggaggttgtggaaactgagaggagacctgggaaaggactagtgggcttgtagagagaacagtgtgtggtggccactcagaagcagagcctggggacggtggtgggactgggaacatctgcagaaggctggagaagggggtttgggaggagggcctggggatgggaagagactgtggtaggagcctggcagaggctggtaagacacgaaggagagggatctttacaagagaggaaggaacaggaaaagggctctaggccacgccccttgtttgaggttggataatgtttagcaaaataacttgaagaacatgatggcgaattgcctggtgtggagaaacatccggggctgatggactggattgattaggtgaaaaatgttttattttagaggctgcgaggagagagagggtgtgtgtgtgtttctttttcttcacaaggggagaagttcaagtgctgtgtttgggggtggggccacgagctgggtttttggtgatagttttcctgggtggctctgggtgtctggtccctttggcccagggattagtgggctgttggactgtgtgcttggagggagcagctaagtcagccccaaggcatttgctacctgattgggaaggcaggatgaacagcaaacaccaataaagtggaattacctactgtaaggaggggctcgatgatgtcattcctgtgactgtctgagctcagaggaagcagcgtgaaccagggggaggctcttggtgaggagtgagctgggccccaaggaatcccaggacttgctggggagtggggccggggagggtgctctaggcagcagggatggtgcaacagagatctaccgtgacgggaggttctgcctggaaagacagggaactgagatccagagggatcagaaatggcttcctgggggagaggccccaaccctggggggatgaacatgagttctggggtgctctctggcagggagcagcactccaggcaaggattattatggagcatgccttaggaagatggaacacagggagttccacgttagaccataaaggtggaagcggcaggtgaggccagacaaggaaggtctggtgagcaagggctgggcctggaggaggcactgaagatctccgaggaggctaagggaggcccatcctggcgagctcctgtttgccttctagaaaggactgcagcagctggtgtgggggagagtgacagcaggaggctgttgcagtgccggtaatactagcagatgctggttattaagtgctcgctctgactcagaccctggcctgggccaggctcaacctgctgatggatggtatggatttagtccttacaaaatccccgtggaggtagagaaacttgggggcttagagaagttgacttatttgcccagccccacagtaagtgggagaagtggcattcaaacccagttctgtgtgattccagagccttctcacttagcccctttgctgtgctaccacggtagtttctcctcaaggttcatgaccatctctgggcactacatttaggaaggatgttggcaaactaggtgtgttggagagctgccaccctcttaactgtcctcccatggctgttttctccaaatatgtgaaaaaaagagctggtgtgttcatctcagttccttccagctcccagaggagctgacctggtgctgtgggagtatgagtgaggttagggcagagggcagggaggatgggaggctggcctgaccggagcttgtgtgcctgggagctgggagcacagccagaggccagcttgggaggacctgcttggcgggcgggaatcactcaggcacctcctcctctctgatctgggtttgcttgtgttcaacatttcataacccacctttattcaaggtccttggtagctgccgggactggagaagggagcgttgcggctcagcttgtccttggtgcctctcccttcccctttgggaaccccagcaatgacagcatcccacattgaggggcctctgcccctgtcaaagggcaagtcagagagcccgcacctgggacgcaaggcgatgggtgtctgtgctgtcgcctgccttggtgctcagatgccacccttgctcttcattatttctgggctgccagacgctagggggctttgatgcaccagcagccactgaaggcgacagcaccagccagttaggagaagctcaaagccatacctgttcctccccttggtgatgggggcgcagctcaaacttctgctctggaagcaaaaagacggagacttcctaactacagcacagtgagccagcagcagaaggggatggctgagtccaggcacactagttcctcctccctgctgcgtgtctcctggggaatccagagtgcctgctgtgccgtttggggatcctgcaggttctgaatggcggctctgttccctggggcttttcctcatccctgatgtttcccagccacctcccctgtccccaaaatagccaaaataaaaacttccttcctcttggatacaaacgtgtagagggagtttcttcatctgtgaaatgaaaatcatggtaactgtttcctcaggtggttttaaggataaatgagacgatgtgtgggaagtggtgggagcacgttgcctggctctgctaatgtttattaagggctcactgtcatctttattagtaggtattgtcattggaagttgagctagaagtgctggagaaataggtggcagagggtgttctgtatacaaacagtgcattcctaagatcagatcttgacaaatcagttcctgtttgaactacctgtaggcaataacggcgggaccctgggagggccagcttgtctgtacagggcctgcccagggccttggctgagactggtgtgggcacgagcttccagatttctctccagaccgccttcctctgcagagcgtgcagaaaccccggcgccatttccagtgggcaccctggtgaatcacagtgccctgccagctgccaagatccacaactgaaaacttggcatctcttgcccagtctcagagtggagtctttcctgagggcacacaaggtttctggggaatccgagagttcctggctttcctgatggataggactttgctgcctggccatacaaacatttccgtctcctttttgggatggggctactgagaggcaagggtctttgagaacaccttttaagaaaaaggaagtacattcgcccttggtctgtggtgaaatgtaatcccgttggggtgcaggagggcatccgtataagaaaataagaaacagggcgcctgccaggctgtgtgccgtgtggcaggtgagatcctggctctgagctcatctcgaagggccgtgggcctgtatgtattttgagcattgtgcagtaaggggtggggcatgggaggccaggactctggaagccgaaggaggagcattacttagctaatctgggatggagatgaagcccatgctgctattctgaagtagggaagcgtgcctggaatcggtcctctgcggggcctgatgagagggatgctctcgtttactgaacgcccgtggtgtggccagctctctgctgggcacgccgtggggtgctgcctgcaagattgctcgtgcttcagcagccctgcaaggtgtggagtcttatgcctagttacacataaggaaacgcaggctggcacacgatgagctggcgctgaggccaggcctgtctgactactgtcagcatttattttattttattttattttatttattttattttattttattttattttattttattttattttattttattttattttatttttaccaccacaagaaactctctagaattcccattcctgggtggcaggcacccctttgagcgtatttctcttcctttgtgtaatagcaaccattgagcaccttttccattctgcgctctgtgccaagtattgactatgtgtcatttctaatcctcacaaagactcctcccaggccagattcattgtctccattttatttcatttttcattttttgagagacagggtcttgttctgttgcccaggctggagggcagtggcgcgatcatagctcattgcagtctcaacctcctgggctcaagtgatcctctcacctcagcttcccaagtagctgggactgtaggcatatgccaccatgcctggctaatttttagtagagttggggtctcactgtgttgcccaggctggtctcaaactcgagatcaagcaaccctcctgcttcggcctcccaaagccctgggattgtaggtgtgagccactgtggccagacatgctgccattttgtagataaagaatggaatctcagcactttgggagcagaggcaggaggattgcttgagcccaggagttcgagaccagtgtaggcaacacagggagaccccatctcttatttaaaaaaaaaaagcctcagggataactagccccaggtcgaacacttagcaaagtacctgaaacggacttcagcccaggtctcgccaccccaaagtcattctctttctaccccttgtctttgcccagacaggcatgtcacaagagggtcctgtggcgatttcagagctgggcagttagcctgtgacactttattctttcaccgttgttaactggggcttgtggagagatgggaaagcagagctgggctcaggccccgccctgcaggaactcatactctgcttggtcaggcaaggcccactgcagagtggcgggaggcagctggtggtttcccgcttccaggtgatactggtggcggtgccttcaggatgctgagcctctggcagctcccagctccagtgcagtcagtggactagcagggctggtggcccccggctccctgtgccagggtggaccctgcaccacaggcagccttaactttttctgacgttccttctgcctgttggcttgttactggcaggctcggtagggggctggcttaattcatactcctttgcctagaggatgctccacgcagccccagcagagagcagcctctgctcgtgagatgagggaagcctaggcagtacaggctccctggcttctttaatctagaggaggggtgggggcaggcagggaccttgtcctccctccttattttcccaaggagccttgggcatggggaaggaagccttcctgatcactgagtgagaggcaagggcaggactggatccccagggccccagtcctctttccaagccctgctgcttcctggcagggtaagcttggacaagccctccgccctctctgagccccagcttcctcgcctgtaaagcaagggcagcacccaaagggctctcgtgaggagctgtgggctccttccaggggagtgcctgggaggcagggaacgccatgcgccagccgtgattaaggcacatggtctcgagagccgtgcaggaggtgggcttacagggaagacacaggcatgtgacgggccctaggacaccttccccactgagggtgctgactggagacttggggcagtgggccttaagtctgaggaggaaaccgtaggcctgtggctgtggcttccacagaggcaagagagatagagtgagtccaggacccgaaatgggggcctgactttgtccaccctgcctcgtgaggtccttcgggagctgcaggtggtgggtctcagggcatggtgtatttctggcagccaggaagtgcctggtggatggaggaaggaaggagggggctaagactctgccctgcacaaccccctggcccaggtcccatcaggcatctgtgtattcctggcagtgcccagccttccatatggcagtccctgaggttggtggctgtgtttgggagacctgagactccttcctccgccttggagggggagagagcaaagctgagcgggtaattatagacagccctgcatcaggcagcccaaaccagttccctctattcccggagtggctcagagccgtgggatgggaggagtgaagcagaggcagcttgggggaggtcagtgggggagggacagtcagctgtcacatgcgctgccacccaggccctcaggagaggaggcccagctagattttcctttcgtgtactgttgttatctcctggcacgtaataaatgctcggatacctgttccccaggtgaataaatgtgtatgtgaatggcttcttcaggatcttccactggaacctaggcacgtcactttccccctttggggacttcactcccatttctaaaagaagaggatgggaccctggagatctcctgtcatcccctggccatggtaatgggcaagaccgcggggtgcaggggaagaaggaggcaagcctggggcctgagcaggtgttaatccctctggcctttccaccccacagaatcattgaccccgtgcagggttggctgtgcttagcctgggatcacagagtttcagcccgggcagctggtaggctttgtgtccgtcctgaaataaacccggctgggctgactctgctcattgttgattgcccgctgtgggccactcagtgacgtgggtcatttctgcccatccagggtctgtgctttttcagagagtgcatggagctggataggacttagtcacactcaaaaagaagggaaggctgagctgggggacctgtggggtgggcagacctgtgattaaggtctgaaaatgtccctttaagagaacattccagagaaggtccttctgagggttttttgcagccaggccccaaaggacccttcaggattctcagccagaaggttttgaaagtttcttacctctccaaggccaggaatgggttctaaagaagtcattccaggctgggcacggtggctcatgcctgtaatcccagcactttgggaggccgaggcgagtggaccacttgaggtcaggagttcgagaccagcctggccaacgtggtgaaaccctgtctctactaataatacaaaaattagtagggtgtgatggcacacatctgtaatcccagctactcaggaggctgaggcaggagaattgcttgaacccgggagttggaggttgcagtaagctgagatcgtgccactgtactccagcctgggcgacaagagcgaaactccatctcaaaaaaaaaaaaaaaaaaaagaagtcactccaaacaaggcccaaggtgtgttgggctggctgaggtgaggtgggtgagggaagacagagtgcagcagggcgagtgcgggaagaacacattgctcagggccacttcccagggacagcagagggtgggggacagcatcagcacagccccagaaggcagagggtaggcttttcatctggcaagatgacagagaggataggaataaatagattatttacctggtgtgatgtggattcaggaggccaggatccctggcccaaccagcccgcccaccgtgggggcatttatttgcctgctgacattgccaggcctggccgctgatctgatcgctggtggctgctttccaggtagtcggtctcagtcaatttttccttctcaaactcacctgatcagctgaattacctgggccccccaaaccccaattgttaaaaatctcatttgcaggccccatccagaccctactgagcgaatcccaaagtgtgtggctgtgggactctggtttgatgaaatgagcacttcatgtggctgaaagggatgggcaggttggacacactgaatccgcagtgcagagggaaggaatgctcacatcccagctcccaaaattacctttgagcccctccacagctggggttggtgtggacaagttcccaggtataatgttgggccagttgacacagggtgtgggatgggatggtgaggatgatttgaatgggaaagtacccactcctcccttttctcttccttaaaaataaactaaacactagttatgccagtgaagagaggccctgaaatccatttggtgggactccagagtgtgtggattttattctactgattatgtagatattgggagtttgagcagttacagagactacagacctcgcgggctaagcctggttgtattattaagggcagaagaatgcagtgggacttacgggtttgaggtactaatgaggtcccccaagtcaagaggaggctcattatgtacatgtggaggtcaagaagccagagtgaagctgcccaaacagggtaccctttatgttttcaaattcctgtctatctcccagtgtatccctactgttggacaataagtttttggggggttttgctgttttaaataatgctatgctgaacatccttgtaacttttctgattagtttttttaggataaattgctagagatgtaattcattgctggaccacagggccaaatataaatcctaatacttaaaaatatgtgtgtgtgtgtgtctgtgtatgtgtaaatgtatagatatatacacacatatatacacatacacatatatacacatgtgtatatatgtacacgtgtgtgtatatatgtatatattttttttctcgaaaagatgtacaaacagttaaaaaaaaattcagacagtacaaatacgggatgtccagtgaataagtctgcctcccacacctggccctccttctgcaggcttcaccttaagagaaaaatgctgttactaggtttttgtgtatttgcccagaaatatcctatgtttatataaacatgtatgtttctattattttcactctctttctctttttttttttttttttttttttgagacaaggtctggctctgtcgtcgtccaggctggagttcaatggtgtgatcttggcttactgcaacctctgcctcccaggctcaagtgatcctcccacatcagcctctctagtagctaggactacaggcgtgcaccatcacaccctgctaattttttgtattttttgtagagttggggttttgccgtgtggcccaggctggtctcgaactcttgagctcaagcaatccgccaaccttggcctcccaaagtgttgggattacaggagccatgaaccaccacacccagcccaccctcttttttttttaaacacaaatgggaacatcttatatctacactttaaaatagtgcttcccatttctttgtatggctgtgtgatatatatgcccagtcctgagctggtaatgacacactccagggctgcaaggtctttattgagcaaccacagagtgcaaggcacaggattaaggctgcctctgcgaaagcaacacgatgtcttaaactgggctagtcccccagaatgctttgcagtctcccggggaaaggggatttgtagcgcgcctgggacccagtgggcccctagtatcccaggcaggaagtagaagaggctgtcagaccctggggttgtggtggggtcaggaactcttcgccccactaccccagcaagcacccagtatctaccccagtactcccggagggagctggtctgcccgaagtgagtgtgccattgtatgcaggggcgggggccacagactcaagaggcctgggggaagctggcttcacaggtgaagggtgaggggtaggggcacgtctgtgcccggcactggagcagaatgcttgctttctcctggatagccgactagattgtctcctttttttctttcctttttccccagaggctcatccaaaatagaggaagcatgcgaaatctacgccagagcagcaaacatgttcaaaatggccaaaaactggagtggtatgtcatctccgctagagctcctccaaggtgctctcctcctccctcagcttccactcacacaggcctgcccgagaggttggccttgagggccctttctctttgtatgccctctccggcatcggaaagccactggcctgctctcttgttttgtgcctgctgggttactttatactctgggtcatggggccttggtgaaaggacagagaggatgggaataaatagattattagacctagataaacccatgtggattgatgagctcttagagtcctccttaaattcagaacttcaggtttcctggtaacttccttagtgcttccatcagtgtctaaattctaggctgggggaggatgttcaggtgattccaataacaacgtgaatcatggctgctgtttgttgagtcctaagtgctcatcatttaattgcgttagcacagcagccctaagggtcagtctataaatatccctattttacagatttggaaactgaggcttggcttagtctcttgcccaggatgccagaactagtaagtgacagaaccaagattcagaaaccaaggctctgactgcagagcctgagtgtttaacctgccccagtgaggcaggatagcttcacagaggagaggggtggggaggagccccttgggctcagggaggctggagatctgtttggagctccctgcaggcccaagaagtccaacaagccagtgtgttgagccctttcgaggctcatttcatcatacatctttcatgtcaccaagattgaattaaggaaatacggcaagagacccagtgtttgaatgcagggaggaacttctgactgtggaggagagggaacctggtggtgggaccatggaggcagggtgcagaggtgcacaataaaattgattatcatcgtttttgagaatgttgttggtttccccaaaattcaaagagttattcctgagttttcacaaaatacgttgtgaataaagccaaatgttttttgtatttttatgctcccaaacttagaaaattcctctagagaaaaaaagcttattttttaattacataggtgttgcttttcccctaaaatttgttacctctgcccccaaactcttcaaagaaaagccctaggccatttccccccggtaatatccccttttcttgaaatttttttttttttttttttttttttttttttgagacagtcttgctctgttgccaggctggagtgcagtggcgcgatcttggctcactgcaacctccgcctccctggttcaagtgattctcctgcctcagcctcttgactagctgggattacaggcacgtgccactacgcccagcttatttttgtatttttagtagagacagagttttaccatgttgtccaggatggtctccatctcctgatctcgtgatccgcccacctcggcctcccaaagtgctgggattacaggcatgagccaccgcgcctggccgtaattttatactcaaatttggaactcttgaaaataatgaaatcatatagtgaaaacccggaaggctttgtcttttctgctgctcaaaacttaagaggatagggccaggcctcctggtcctcttccagcttagaaactctgactcagattcagctggaggagaatgaaggggagaagcctcagagctgagctggaggtggtcagctgcacgaggaggaggagagatgctgctgcctcccaaacgtcagttaggagatgtgtgggcagaatggcttgggacccacagaagctgaccgtgtgcagatgagcacaggatggatgaggcttcaggcacggtctcttctgccctccgcccatgggcactggtctgcatgtattcattcttgctgtccacatcctgtttccctctctggacatgcagctcctggagggagccggctctgtgttgtccgaccccaactccatgagcctcacaattcatgcaagtgccttgtccatggggatctgcagtgaagggaacagaatgtgaacagaggcagaggagttgggagaatcaggaagagctttggggagctgtggaaaaagaaacaggacttggaaaggggagtagatgggaagatgttatgtggtttaatctcagttgccccttgcttcccaaaatacccctccgaagccaccccatgatttcagcctgtactttgccttctagtggtggttctgggccctgtgcttcgaggctcccctggggaggactgcccaggccgggaggtgcaggaggccacctcactctgttttatatcctttccaactcagctctatctgccttctccttggatctttagaagtggtggccctggaaatgctggcatagctgggattagggacatggtgttttacctgggcttaccctggctctctttccatatacctggggctcagggccttcccccgaggcagcttcctgccgccctcagagactgtcaggtgggccaccaggagcctcagcgcaggagccagcagacctgagcgcaggagccaggagacctgagttctaggcctcggtctgggctcgctcaggtcaccctcgtcctgtcttggggactctttccgcattctcgagagcccgacccacctcccagggcagtgtctctgtggcttcataaagtgtggagccccactgaggccaggactgcccttctcttctgttccagctgctggaaacgcgttctgccaggctgcacagctgcacctgcagctccagagcaagcacgacgcagccacctgctttgtggacgctggcaacgcattcaagaaagccgacccccaaggtgagggcctctgcgggccacacgggctggctgtccggagcgccatcctagcaccctgcattgattcctcaggtttcctggcggctctggtttttccagtggccgacatgtgataggctggcaggggcgtgcctgaggcagagtgagcgttgactttagaactggctctcttccttccagttggcattcgcgccctgctcaagtctccgcccccctatctaccgtgtcggtggtgtcggtgcagctgatcaccccttcccaatcccggagcatttgggagtgggagttccattgcagacccaccgcctgccggggagagaggaaaatctgttctgttgtcagaattaacatgcagaagggagcggtgtggggggcggggaggattctgagaccagccaggtaggagttgctgccgaaaaaggagcggaaattagcccaacctggcttccctacatcctggggaggaattagagagaacagagcccgagatgtagttgccagagaacaaattacttaaaatgagagcgtgctagggacagaaacccagtttggggctgactcatggtgagaaaacagttttgtccccctgggtgcctcccgaagaggaggtccagcccagtgtttgcttgcatgtggcgggaattttaatttattttttaaaatgttggtgccaggtacaggttgctaattagaaagcacaggcagtttttaaaaatgaccatctattgtcactgtcatctcaggggaatggaaaatatatgaatctttaaaaaataaaaagcagctatataatcttggaataaaagcctgtccttcccaagagaagacaggtttgcagcagtgcagggagcttcctccatggatcagtgagcactggttcacatggcgtgtttgagaactgctggcatacccctttgtcgtgatctgacgtgttagttcccagatgaggatgaatttgtgttgaccagtagctcttctctgtccttagactgaccagttgctcctcagcagctgggcatctcatgcgttggcctcagtggtcacatggtggggctcaggcctggcaagaggccgaggagcagccttgtaactgggtgggccatggggcttgcctggctggtagcactgggccacagcaggctgcgtggttgatgcagtgatgacccagggagaccctgggttggttttaagcttgattcaccacatggagtctccatgccttccattaaactgccccgccaagcctttccttctgctccctgggaaactggttggcctagaggtgctgtcttagcatctgtgacgttcagctgctgccccatctggagtgactggaaggacactctggggcaacactgagcgccaggctgccgaacagagagtgccatttgctctttcagcagacccctcacttcctgcagacaggccctgcctggcagtgggatatggtggggtccctcccctgcgtttgatctgagcttttctagctctccagcgagactctgcagggtgtgggcctggagtctggatgtggcccctccctggccttaggaagctcagaaggtggctgaggactccgaccggtaggaaagtataaagatgatgttacatccagggcacagaggccaacttgcacagagctgaggctgggggcgtgaatttggctatgggagatctttcaaggaagaaagggggcagttctgaaaggagagcctcacctgggtagagctgagagcaggtgccgtgtccagagccctggggacgtggtgttgagcagggaagggtgttagtgcagcttccagagctacagcctaaagatacgcacgccagccatgactcccagtggggcaaggggcacattggcatcaagggcagtggctgctttgtgtctgaggctagtcaggcctcacacaaggccaggtgcagtggctcatgcctgtaatttcagtgctttgggaggctgaggcaggaggatcgctcaagcccaggagttcaagaccagtctggacaacatagtgagatcctgtccccaaaaaaaagcctcacagagaatgtcatgtagcaactgtgtgtggctcagcagcgcaggtggtgggtggtctgggaggaccctgcctcccctgtgatcctgggcaagtcagtcttttgggcctctgtttcctcgtctgttaaagcagagactgctgtgagatgatgcagtcatgcccagcgcggcacctggtgtgtgataaacttccagtcaggacacccttggctttcatcagtccaggggcccctgcctgccctgggctccccacagcctctgcccttggccgggtgccttgtgagacagcgctggaggcccgatttggaaccttgcctggcttccccaagcaggtggccggtaccctggggccgtcctcatcactggtctcctcagcagcctagaaggcctctgtcttgggtcagcacttctagggcttcctccaggactccctccagaaggacctgcccccaagtggcagctggagtgtgcctgaggcccgactgggctcccgaattcctctccctctcgcagagggtggcctgctgccaccttggtggctctgggtggggaagggtgatgctcatatgtgttattggttcctcagttacccaaccatggctgctgctcagggcagactcgggccagcgaggcctcttcccaggcctgcctgatagttgggggtgggggcagtgtgtgtacctggggcagagaagcgacctggcccctgcttgtcccccacttcctccccagctgccatttactgggtttctactgtgtaccagatgcttggcatcttttaacccatttgatttctttgtgcattctgtgatttgcccccattttactaaggaggagatgaccaagtgtaaccaggaagggcttcagagacgcagaagtcaggttgggcgtcgctggtaggagtgactgcggggatgggcggtggcctgggccatagctccccaacttgggctgtattgctctgagcccctttccagccctctgtgggtgggtacaggaggggccaggccacagaactgggtgttgctctgcctgtccgagtgcacaaggcctggtgacctgagataagagtagcagtcatgagtgtgtcagaagctcgtccaggagccagctgtcccaggtgtctgctggtggcccgccgctttccagacatggaggggacttaaccccgtgagtccatgttgctgcctggggggtaagctgtctccctgctgctactgcaaggactgtgccatgctgacggcgggtgctccagagccagtgccagcaggcccaggtggcagctgcagatctcactgctcactgcggagcagcagcctttgccgcctcagcccacagggtgccaggttggtgtcctgggtgttccggccaggagagtgaaccagtgagcagcccggggcctccatgtggagactgcagccaggtggggcggggcaaggcgggcctctcacctcactccagctgctgctctcctctgcagcgtggcccggcttagccgttgcttctgggtccgccgattacaggatgtatgtgtcttcaaactgccggatttaggttgtgttctctccccttcctcctcatctgccccctttttgccaccgtttccactgtctgctgccacagtctcggtctgtcagccctagaacctggactgagtgctgtaccttctctcagtcccttttagatccccagaggtctttctgaattggacaaaacctacagaccccactccccagaggagtgcttatggaccccactgtttacatgtcagaaggaggggttggactccctgaaagcccagccacagacctgagacaaagagcctctgtccagatgcctccccacggagggagtttggagtcccatccagaccgtgagccccttgagaggagcccagccccggcgcttcttggtagcaccctcttctcaggcgaacatggcctgggtgaccatggagacccccacggtgaccaggaactttcagatgcccaggctgaagctcagagcccatgccctgtggcctgtccaagctccctgcctttccctctccccaacccaggcctccctccccacaacacccctgtcctcctgagatgtgctaaaatggtgttcttaaaaaataccccctgagagctcatttctgtctgctagaaaatgcctcccactcatgcttttctctctcctccaaataacttgtcaaaaaaaagcctttcccaaatttaaaatcttgcaagagatagtacaacaaaggtagcccagttcttcctcagtgccatcctggtgtgttcaggttttttggcaaaacctttgaggagctggtgggtggcaggactaggttaaagggactgagcagagggctcccgactgctgagctacgaggaagagggggcagtggagagcacactgagggctcagtgttgatgacatccagcctcctcgtgccagaggtccaggtcctcctggtgcaggagcagaagctgctcaggatcctgcagagatggtggcagagcccaggtagaacctggcaccctgttgcctccaagaccacctcagatgctggtttggccgcctcccatgcctccttcccctttgccagcagctcagtccttcaagagcagggccttggcaggtctgtcttaaaacaccgtgggagtctggccatcatcctggcctagcactgctgtgccctgtccctggggttgtgggaagctggtagcatcctggcagcccgaggagagaagggctcccccagaagcatgtgcccagcaagtcacagtctgcagagtcagccctctcaccagatttcctggggctcagggattccgtccccttcttcccagccccttgagagtgtgtggcagcgctggcagctctgagcgcctattgatctctctgctggcagccaggtgcgcctgcgtccgcctcctctcctcagcttctgctgaaacgacttcactttctcatgtctcctcccacctccctttctctccagaggccattaactgtttgatgcgagcaatcgagatctacacagacatggtaagggctgcttgcttgtcctgacacccccgggtcccactgcattgccccagccttgcgtcccctctttcagcacccccagcactgttcttattctgcggccaaaccacttggggagggggaagtgggagctggggggattaggtcacctgagctggcctgggctggctgggtcttcacccagctccccaccagcctgacggccccctcactccacaggcagtcatggttttcattcatagaacttaggttattgagctgggcagggtggctcatgcctgtaatcctggcatgttgggaggctgaggtgggaggatcttttgggcacaggagttcgagaccagcctgggcaacatagcaagacctcctctctacaacaaattagcctggtgtagtggcatgcacctggggtcctagttcttgggaggttgaggcaggaaaatcgcttgagtccaggaagttgaggctgcagtgagctgtgatcacaccactgcactccagcgtaggcgacaaaacaagaccctgtctcaaaacaaaaaaagaaattaggttactggagagtgtgtgtccggcacttccccttgcccagccttcccgcaagtgtcacatttgataagcatcttgcagcaggccacagggataggcagagcccacaggaggctcagcacctgccctgcccccagggcgcgttgccaacgacagatgcagaccagatgggcagctgccaactggagccagagtgaagggtcccacccaggccggggctcctgtcagtgctttctctctctctctttttttttttttttttttttttgagacagagtttctctctcatctaggctggagttcagtggcgtgatctccactcactgcaacctctgcctcccaggttcaagcgattctcgtgccctagcctctcgagtagctgggattacaggcgtgtgctaccatgcctggctaatttttgtattttcagtagagatgtggtttcaccatgttggccaggctggtctcagactcctgacctcaagtgatccacctgccttggcctcccaaagtgctgggattgcaggcatgagccaccgtgcctggccagctcctttttgcctctccgcttgccctgtctgtctcagccctccaaccccaggcagggacacgagccctaccccttgcgttcagggcagtgctgcagggatgactgtgattagaacaataatagcagctgccatttattaggccagacactgcagggtggtttaatccacagccctgtgaggttggcattattgtcatccccgttccttagtggaggagaggggctcagacaagtgacatgatttgcccagggacatgtggctacaagcaggagtcactgagacccgaaacaaggtctggctgagcccagggccttgccctttcctactgccctcagcaagggggtggcgttggaccagcccctggtgcagagcagttaggcaagcgcctggacactgggtggaggcggatggaaggtgcgaggccccttggaacctgaggcctccctggggagctctgggtgtgcctgggggaggctgacagataggtgttggcctgggggcagagctggtactcttgggcagaggtctcaagccctccctcccatcctggtttctccagagccctttgccaagtggctctggactggtccttccgcctctctggctgttatcagaggcttcctaagggccagggccttggccaagtgctcgtgctcacattctctctggtgtcacaccatctgtgccctcgtggatgggatggaattaggctaaggccctggagtggcttgtccaacatcacccgctcagcccagcacgcatagccaggcctctagtgctggggccctcccttctcactcctgtgttcccccacctctcgatcttcttcacacctcaggtcttcttcatacctcctcacaggcgtggctgaggggtgggaacttgaagggtcataggtcagcaggcaggcacgcaggaggtcatgagtcgcaggcagccccttcctgtgtcccctccagggccgattcacgattgcggccaagcaccacatctccattgctgagatctatgagacagagttggtggacatcgagaaggtgagtggcagcagggccctgcatgggctggcagccaggaccagtgctgctctctcttcttcccaccaggggagtcctctggtgtctgagtgccgagaagggggcatggggcgccggcagagcttggagaatggggtctggctgtgtcccaggcaggcagggcggagggtgtggaagcttcacggaggcctcctctcccttccctgccctcccctggaacccatcccccgtgtctccccaggccattgcccactacgagcagtctgcagactactacaaaggcgaggagtccaacaggtagcccccttcctgcctgccccagccccgcagggaccgccaccacttcccctcactactcctccccacacagctcagccaacaagtgtctgctgaaggtggctggttacgctgcgctgctggagcagtatcagaaggccattgacatctacgaacaggtggggacaggtggggatggcggcttccaccctgccccctctcagggcctgtgcctcctcctaagccccggcaccttgttctggaaccacccctcccccggctcaccctctgcctctcccccgacatcccttgccatgtcatccccccaccctgtcttcagcctggctgaatgttctccacctacgactccatgccgtgccagcaccgtctctctccctggctgtgcccctcccacacccctcgcagagcttcctggaggggcccagagtgaggctggctaaagaacccagagggagggaatgggaagaagtgccaagaggcccagggtggccgtgggcaccccaccccatggcccgatggtcctcatccacagtgggagggagggagtgtcacatggggtccccccagcgtgcacggagccctgggtgatggccgagaaaaaggcaggcagctggccccctgggagagaggggcgggcgccgcctctcatgttcccaccgcctgccgccgctctgcccaccgccatgccagcctcccgttggtcctgacagccaggctgcctccttcccactgtctcaggctctcagaaggcccacgaacacctggctacagcctccacccccacccagccaccatcacaccctgatcttggtcgctcacgcactggccgctgacctctccaagctggtccctggctccctgcccttggggtcctgggttaacagggcctcacctcgggacatgaaccagctcccagctggccccccagtgcctggcagtggctctggccctctggctgcttgccctgagctcaccagtgccacttctccatggctacaggtggggaccaatgccatggacagccccctcctcaagtacagcgccaaagactacttcttcaaggcggccctctgccacttctgcatcgacatgctcaacgccaaggtagcacaccccacgcccgcaggaccaccgcaccaggccaccatgtgcttatctccaggccaggtcccgttgcccccgaagagggacgtgctcctccctcacgtctggcccctgccagccagcctttggatgagaagtgtggttctcacagctgtgtttctgtgctggcatcacctgcccacccagccctggaggcttttgcgggtccagctcctgcctcacttagtgctctttccttcatgggtgcactttttgaatcctcactgcaccccattaaagtcagcaccattgtcaccgcgtcttatgggtgaagatggtgaggctgggacgagagtcccttgtttgaggccacatgactagggacctgcagccccagtgttccagatctttgtgactcctgctgtcgtggctttagctgtagctcacacatgcccacctattttcaggacacttggcaaaagaggggccaaagagggcagtgggagggggcgtggccagcgggaaggagctggagggttggcgctagattttgcttggccggagtttttttaccattgcctggcagaagcacggagtccaggatttcctggtgtccctggctcacggcctggggtggtggccccacacaccccacacacacacaccccacagagccctgccctgctgtgggcaccggtggtgggcaaaagcttgggctttgtcagaccaggttcccattcccaccccatgtctcaccgtgccctgggcaggtcactgcccctctctggatctgtttcctcactttgaaaagggggctcaccgtcatttgaccctctcagggtcctcaagaagcaccagccccaggcctggcatggaggatgtgctcatttgtcccctgccccagctgagccaggtgggaggaggcagtgggtgcctatctggggaaccttccccctccacccacctctccctgcagccatctctgcagccaggctggtgctgagctcagctacgggaaggtactgacagacacagagccaggtgacacctgaggctgggggaggggtgcaagagctgactcaatatcacccgacatccccaagtcccctcagctgctaggccagtagctctgaggaccctcttgttactaactcatcttctcccttccctgctgcccagctggctgtccaaaagtatgaggagctgttcccagctttctctgattcccgggaatgcaagttgatgaaagtaagtgctgggtgctccggcctcccccttcccgaacctcagacgggggtggctggggctccaggtgggacaatcgccaagacttgtccagtagttctcagagggtgtctttgttttgttttgttttgttttgttttgtttggccatttgagtctccattttccagatgaagaaagtacaactcggggagtgctggagctcaggatggctaggtggacacacacacacacactacacacaccacaccacaccacacacaccaaacatacactacacacaccacaccacacacatcacaccacaccacacacaccaaacatacactacacacaccacaccacacacatcacaccacaccacacacatcacaccacacgctacacacacaccaccccacacaccccacacacactacacacacaccacacacagcaaacacatcacacaccacacatatcgcacacacactacacacacacgacacacccctcacacaaaacacattgcacagtacacacaccacacgacacacccccccacacacaaaacacactgcacacacaccacacatgacacaccccacacacacacattgcacacacactacacacaccacacacaccccacacacacaccgaacacaccacacacgcaactcaacacacaccaaacaccacacgtgcccctacacaccacaccccaacacacacaccacacacacacacacctccaccacacaccacacccaacacacacaccccccatacccacacacacacacattctgtgtgatgttctatgttggtaaggttgccctgagagcaagccgtttctgatgaatagggcagcaggatcgcaacacgcccgtacccatccccagtttaacccacacggattgaccctctgagagtcctcaggaagccccagccccaggcctggcatacagatagcgtgtcctttcatctaatccaggccagacctcaggtcagcataggcccctgacccctctctgccatttgcttgcagaaattgctagaggcccacgaggagcagaatgtggacagctacaccgagtcggtgagtggccagcatggggggccaggccccttcacggggatgggtctcctaggaaagctgcccttctcagacacgctctccatgacattcacccatttcatctggcccccagcccactgtgaagttctttctccagtcaccccagaaaccttacaagtagcgccaagaggcgcagggagtgttctccccattttatagatggtggcactgaggttggggaggtcaggaggctcggccttggcccctcagggacagagctggtgttcagagccacatctgtctgcctctgaagaccagggttccttgagtcccccaggtgagtgtgtgagactcacagtgggcgccttgggcacccaggaggcacagacggggagggaaggggtgagaaggagagtggagctgaggacatgggagaggtgccagcttccctctgcctggtggagccgcccacgcggctctctctcccttccctttctctgttcccagcattcccgggcttagtggtgtccggctcaggtcctgattcactcctctaatggcacatgtcaagcatttctccctaggtgccccttgggaatggaagcccctaactgaggacagtgaaaatgccatcctgttcctcctgccccagacagtgggtggcaactcagccaggagctcagggaggggatgcccagcaggccgtggcttctctcccccgtgtcccatggcactcaggagtggccttttccatatctccaggcctcagtttcccacccattcagtgaggatgctggacttttttttttttttttgagacggagtctcgctctgtcgcccaggctggagtgcagtggcgtgatctcggctcactgcaagccccgcctcccgggttcacgccattctcctgcctcagcctcccgagtagctgggactacaggcgcccaccaccacgcctggctaattttttgtatttttagtagagacggggtttcactgttagccaggatggtctcaatctcctgacctcgtgatccgcccgcctcagcctcccaaagtgctggtattacaggcgtgagctactgcgcccagccatggacctttttttttttttaaagctacaatatctttctcccccaagggaaatgatgtgcccagcatagtcaagacagacaagagggagctcccatggctgagttggggcctcaagccctccctctactcctcctcagagaccaggggtgacagagacagatcttgaaaaccttgggacaagtgcccttgggctgcagggttgggaacggggggagcatggccagcctatcacctggtgtgccctcaggtgaaggaatacgactccatctcccggctggaccagtggctcaccaccatgctgctgcgcatcaagaagaccatccagggcgatgaggaggacctgcgctaagccccacccagccccccagtgcccgtcttcctgtcccatctgctcagagagaggtggggccgagacttgctggagagcttccctcctttcccatctggggagtgccgcgggccacagtgggcaggtggcaccgggggtcagcatgcaggggcgccagaggcccaggctgctggccggacagtcaccctctgttctcgctacatcccttgccccctgtccatttatttaagcccccataggtgcccttcacccccaaaaccagctgtacagaatctttgatacagacctatttgctaggggtgctgccggggatttggggtcagcatctggccccctatctcctgaccagctgagtcatgaggccggtttctctctctctcccacttttgtcccccagccaagctctaaagcacatgtagccgctgagacctgctgtttctgctgggggcaggctcctcttcccccagccccgggagcctcccccagcttcctgcagccccgacctctcaggttagaccctgggccctggagcttaggggattctccccaccccagccccacacctgctccttccctaatgctttgaggttttcttggttggaagctgcagctggcccaagaaagaaaataaaaaacaacacttttgcatgagt

SEQ ID NO: 774 - DNA, 32744 bp, Homo sapiens
  source 1..32744: mol_type = other DNA
gaaaggcctcgcgcgtcgcgcctgcgcctgcgtccctgcggccgccagagggagggttaaggcgcctgggcgcacagcgagccggctgagggggctgtggcggccgcggcgggcgacatggacaacgcggggaaggagcgtgaggcagtacagctgatggcggaggccgagaagcgagtcaaggcctcccactccttcctccgagggctgtttgggtgagcgccagaccgtgcgtgccctggggggggggggtctccgtacttggcccccttcctttcaggctgaccccccgagtcccccacgcaacctctggggccctcagaccacgtctaggggccctcagcctgcaggcgccctccagaaatcctgtagggtcccccagcgccccctggagcccccaggacgcccaggggccctcagtccgcacgcgccctccagagaccccacaggcccccccagggtccctggaaaccccgcatcctcccaggggctctcagcccccacgcgcactttagagaccccctagggccggcagaactccccagggttcctcagcccccacacgctctccggatcccctaacacgcccccttagaatccccagagtctcacagggaccctcagcccccacgcgcctttcagagaacccctaggacccccagagctccccaagcgccccacgaagcccctagaacactctggggggggggctgtcagcctcacgcgccctctggagaccccagatcgcccccctcgccctggcccgggttggtgcgggggtcccacgacctagaaggtcagcggctccctgaggcccgcgggcgcggtagctcggggcgcgcgtggggcccccttctcagtgcgtagcgagtcgtattggtgcatttcgccacgctgaagcccgtatcgctcctgagaccggtccgggtgaggcgcgccggggtggagccggaggggtgggtgcgggggccgcccccggcgcctggaacgcgcacctgggggcgtcccgcctgcaggtgggccccgccggggagggggcggtccggcgagggatccagagctggtgtgcttgttggcctctctccaggggccttgcgccgagtacacctttagtaaatacttgactaatgaacgaatatattttctcagcatagtatttttccttctccggagattgattgatagccagagcctcctgtttgattaacggtaacgctgctgctgtttaagtcaggcgtcctttgggaatccctttaatttcctgtaattcttccgtgctctcctaaggaggattttaaattccaacctctcaaaaagcagagcccgcactgacagcccggaagaattctgggctgttgaatatgtgaatgattcagctgtttaggatgagaaaggcagaaattttgtgtgtgcctgtttcgttgttttcttttgaaagtgaaagatcctttgctgttaccaagagcagatacttaacccattgcatgactagacacgattttatttctgtacacattcagttcagactctatttcagaagacagacataatgggctcttagcttgttttgccaacttcattcttttggctataaattataatactttaccgctattgatacgtctttaggaaatgcttaaggacaagttgcatgcagtacgcataactgcagaaatgcataaaggctgcaaaaatgcaagaagataagggtccctgtcctcaggaacctctcagaggacgtttatcacagctggtttctaaatttctcatgtgatgtgtaggagatatagctatgaattatgttttgttttgcatttaaaagttatgacagtaccatcaagtgctagcgccacactaactccttttaaatgttttgattcacaaaacatttaaaattcactctaataaaatttaatgtcatagtacctcatgccaggaggttattttaatgttacaacattatttcaagtcaggaagtgcttccctgtgggagagtctgtaactggcagaggaaaaagcttgacagcacttggtgcttgtctcaggagaacactccttttgggaaagaggttttcgatgtttttaggaaactaggccaaatcttgagcttataatccttaaaggattttgaaaagcctttgtttttaaagaaacatctcccttttaaatgttgctacctatgttattgacaggacatataagaagacgaatcttcaccattcacactcagttacacaaaagttaatgcatcttagttcttacctgggtacaacaggttggtttattatctagctttgggacctagggcaagttacttagcctctctgtgcttcagtttccagtgtataaaacggagacaataatagtatatctcaaaatttatgggagttcagtgaggttatgtttataaaacatttggaaccatggatgttggagacagtgaccatgagatattaattagcatattcatcaaaattatcagctccagttatttatcaaagaagcagtaggccaaacagataacttttccagaatttcagagccgtagactgcatcattgattttttttttttgagacggagtctcacactgtcacccgggctggattgcagtggcgggatgtcaactaactgcaacctccgcctcccaggttcaagcgattctcctgcctcagtctcctgagtagctgggattacagccacccgccaccacgcccggctaattttttttttttttttgtatttttagtagagacggggtttcactgtgttggccaggctggtctcgaatgcctgacctcgtgatccacctgccttggcctcccaaagtgctgggattacagacgtgagccagcacgcccagcctcattgatcttttaatgaaataaaatatctgaaagagctttaaccattaatgtaccatgcaagtgtgatttatactttgaagactgttatttccagtaatacttgctccaggaaagcttgcaggaagaagagtacttagaattttaggagtttagtaatattgtataattactgaagccagaaaacagacgtagtgttcctgtgtcagtaggacaattaagattctgtatcaattttagatgtttagaatcctaccttatagatggcatgtatcatcacctttctagactggaatacatgttattccaccctgcccctgccttcttagctatagaatgtcaccattttcattcctaaaggtctgcatgtaatcctttatttaaaacgcagagtaatccatctctatgtcagactccagaattaatgtaatacaaaattaataaaacacacatactgacttgaatatcatcagagctcatatatttaagagctgactagctggtgctttaaagaggataagccatctgttttcaggttgtggcagtcattaaaagctgcttggcatattgcagatatttcacatcacagacattctgaatgctctatctgcagattaaagcctgtcatgagttctctagtgtttaccactcacagtggttttgtggcaatactgtattcttagtagtattctatagcttttgtttcttgctttcagtaaaattagatgaaaatatgcatatgtatttatgagaacatgtcagtcaaatatttcttctctgtgtaaggcacaaatcctctgccttatctgcttgataggtaaggtatcaatattcctttcccatccccaccttcctccccaggaaaagagctgacaagggatgcaaacattgcaggaaaccactgttgtggtggtttgtgtttctgcttaattgcccgttaagcagtaatgtgcttttgtagttgtggaattaaaactttttctcaagtttgtagtatagtacgtttagtaaaactacttccaaaggagttgtcttgtcctttagtttgttgccagggatgagctatggaattttgtagttaatttcaaattccagtttataatgttaatgaactactggtatgattttaaatcggcctgagtctgacattaagatagttttgaattggaaaagcctcttataatactatcccctccatcttgttgctatgagacccggttgggaataacctgcacaatgcacatagaagaaagtgcttaagactgacagtggaggccaggtgcagtggctcacgcctgtaatcccagcactctgggaggccgaggcgggtggatcacttgaggtcaggagtttgagaccagcctagccaacatgatgaaaccccgtctctactaaaaatacaaaaattagcctggcgtggtggcgggcgcctgtaataccagctacttggtaggctgaggcaggagaatcacttgaaccttggaggtggaggttgtagtgagctgagattgtgccactgcactccagcctgggcccccgagcgagactccgtctcaaaaaaaaaaaaaaaaaagaatgccagtggaaagatgttctttatggttaatgctgtcttcctttgcctttcagtgtttagtctgagtttacacaagagctacaaatttggcaatgtcaatgtaaatttaatgaaaggccccattgggttatcttgaaataattatgaatctataatttgttggttgtttgtgaaaattgtgaatatttcttaagcattgtagactgtaaattatcagtattcttcacttgtgtttatttcaacaaagattgcttttaagtttggccaaaatatggtggggccatgtgataacataggtgaagcatttaggttttcctcagttacaattcttgttcaaatgcagattgaacttttaaaaaaattattaggctcaggtttactgacagagacaggtgatacagtataagaaatatatacgtatatttgtgtatctttctcaaaagaaatcgattataaattgaacaattatttttataaattatataatatacgtaagaaatataattatattattattcatggggagaccaggtagaggctcaagttctctcatttactattttggtgactatagtcaagtaaatcatactcagaacttgttttttttagttttcagatgggcagagagacagaatctgtttttcacgattgttaaggattgaatgaggtcagaatgcttattcagttgcacagagctatataactttattataattgtttggttttctgattttaggttgttacagcttggtatcaaatgataaactgttaccagactggcctttttcttgttgcatttttgcagttttctccacatattctttcattcttgtgagctctgtgaggtgcagttactctggagagagggagggccagtaatcatatgtggctccttggaagtctgcctgttttgttgctgtggctaacacctcacccagcctgaggcatgcgttaggcacgtggtaaatattggtggagagaatgaatgtattaatgctaatacaaatgctgatgttttttcttttattcttacctagttttcaagagcaaagctataccaagtaaaggagagtttaagtcgctttcttccgttttatttatgtatttatttttttgagacgagctctcactctgttgcctaggctggaaggcagtggcgagatatctgctcacttcaaccttgacctcctgagctcaagagatcctcccacctcagcctcccaagtagctaggactacaggcatgcactaccatgcctgactaattttgtattttttgtagagacagggtcttgctatgttgcccaggcttgtctccaactccgggactcaagcgatctgctctgctgacctcagcctcccaaagtgctgcgattacaggtgttagccactgtactaggcattttatttaaatatttgcttattatgaacattgtagctgtacacggtagaaaagtacaaggagtacagagagttttctttttttttgaaatggagtcttgctctgttgcccaggctggagtgcagtggcatgatcttggctcactgcaacctctgcctcctgggttcaagtgattctgctgcctcagtctcctgagtagcttggattacagatgggtgccaccacacccagctaatttttgtatttttagtagagacagggtttcaccatgttggccaggctggtcttgaacttctgacctcatgatccgtccacctcggcctcccaaagtgctggaattacaggcatgagccaccgtgcccagcgcagagagttttcagttgaaaagtaaagttctctgagtcttctttttacgtaatctcactcccaagaagcaaccatttttaactttctcattagtttttctgatggttaccaccatatttctaaataattttagagcacttctacttcctgatatcttgattttcagacagtatctgttgattttgctaaaaatgatgaaaaatttattataacttacatggtcttacattttcccctttacctcctcattttacttagttatgtctcaatctctattaccttttatatataaacagcatatttaaatcttaattcatgtatgaattaatgctgaataattaagctaatcaaaatattatacttaaaatttttttaatatatttttctatttttgtgagttatggagtcaaagagaatatattgtccaaattgtgatatttttgagatactaataaaatgggtacaagtcaagcatatctatgcaatgaggacacagaatcaccctagttacagacttcatatactcttcttagattttcacattgtgtttatctgattggttataaaatcagtaaagcttttgtaccttcaaagaattttcagtgactaataaagttcacagtaaggaaacttggaagtagagtttcagaatgttaactatttctgtatttaagtggaacttataagtaataacaaaatctaataagtcaatacttccttgaattaaggtatattttttcatggtgaggacttgtctgtcaattccagttttagtccgtgtattcattagggattagtgttgtattttgaaggcctttttgaatatctgcggagataaacatttttctccttaagagttattatatgttaattagtaaatatgaggcctcgtattgtactgtcctcgcactcctggagtaaacctctcaggattataatatatttttaaatgtagattccatttttatttttatttatttgtttatttttttgcgacagggtctcactttgttgaccaggctggagtgcagtgatgtgctcattactcactgcaacctccgcctcccaggcttaagtgatcctcccacctcagcctcctcagcagctgggattacaggcacaggccaccatgcccagctaatttttgtatttttattagatatggggtttcaccatattggctaggctggtttcaaactcctgggctcaaatgatctgcctggttggtctcccacagggctgggattacaggcatgagccactgtgcctggcctagattctgtttttacatacatgatttaggattgttttatctacaattcatttgtatatagctttactttatcagcttgaagtattgctgttacaggtgcctcctaaaaataatgtggatgtttttctttttttttttttggactctggtctttgaagatttaagaatataccacagtgaaaccattggggcttttgatgggtatttctttgataactttcttgtttttgtctctggagtttgtaatgtttaaattttctatctctactgaggtcaattttggtaaattgtgttttcctaggaaataattcattttatctaagttttaaaaaatgtatttgcattgtgcatagtagtcttttctgacttttaaaaatgttctgttttagtaattttcttctgtcactttatttttgtgtttgtgtttttccccttttttccttgattctttttctctaaacaaccaatattttgattgatttgttctactggttttgtgttttctgtcttactgacttatacttttatctttattgctttctttggcttcttttgtttttccctctggttcatttttctagggaggtgtttattcactgttttcattgctttatttgtatggattaaaatattcatggctatacatttttttcttaaaactgcttcagttgtattttatagatcctgttacataatgtttttatcttagtttgtttcccctttgttgcaagaggcttttattgtaagggttttattccaggtagaaagaatggcctttctttgtatattattacttaaactttttttttttcattatgatcagagaacttactgagattttcgttgccacttaatatattgttggtgttcatgaatggtccaggtacactttacttaaaatttttttttcgacacggaatcttgctgtgtttcccaggatggtctcgaactcctggcctaagcaatcctcctgctttggcctcccaaagagtgctgggatcataggcatgagccacctgcacccagcacccatgtacactttatttttttggagacagagtctcacgctgttgcccaggctggagtacagtggtgcggctcactgcaacctccacctcccaggttcaagcgattctcctgcctcagcctccccagtagctaggaatacaggcacacgccaccacacctggctaatttttgtatatttagtagagacacggtttcaccgtgttggccaggctggtctcaaactcctgacctcaaacgatccaattgccttggcctcccaaagtgctgggattgtaatctcccatgtatactttagaaggtggatattttcttatcaaattttgatagagatccctcttgtctagttattgattatattgtctctgtctttcatgtctgtattttctgttcacttgatctgttttggggggcatattaatatctgctttcttataagtgtatttctatcttttttaacgtttgcaatttctgctttataaagggggctactgtgtttttggtacatagattttcacaactaatattattatgaattatatttttagcattatgaagtgaacttctttatttcatttaaagcctttgagcccaaattctactttgtttcattgcagggtagcaatctctgttttcttactgcttgtgtttgcattccttaggactgtattatgtaagaggatcatacatgctgtctgttaccttgtgccctctgctgccagttgtggccatgtgactgactttgactgatgaagtatgagtggaaggcacttctgccatggcttttacccttctgtaagaaattaagaagagtatatataccggataagtgctacattccagagtagagaatgatgacacttggagaaagaggcagcagtcacagccagtctgcagtaaacaagtcaagtgactgagagaagcctttgggagatgtcagggttatttgctgttatgacagttctaatgagagctgcttgatttgtttggtatacttttgaccatctctttattttaagcctttcggaataggtattttagttgtgtttcttgtactgagcacaaagttgggttttgttttttgagcagatctgaaaatgacgagtatatgattggttcttaactgtcatactactatatttactgtatattatattttcattgctatttgtcttcatgtctctttttttatttaggaaggtttgtaattttgttctactggttacctttatgctataaatgtttttaaatatccttagctccttttccttacttaggcgcctattattttgttcactccagaaaactcctgttacctatgtgcttctcagtgagcacgttctacatctcttgttctctaatatccctttttttttaagctgtttgtactttgtcagacatagaagtgtttccctattatttttctacccttgtccttacattttgtcttagatctacaatacaacatatgcagtgacaccaccagtcatttcagctatgtttcctagtcatctcttagttatcccttgggtcctggcttacactgggggttgcatgctggatggcctggttgtataatccttggctcacacttttttcccccttgagtttctggtaaagcattgttccactgttgttttgctccgtatattgctgttgaagtcttagcctgattttcttagttttataagtaactttgagtttttatgtggaagcccagaaatgttcttcatttataaaatctagtcatcttactaggatatgtttcacagtagactattctgggtcagttttccaagtacatgtaggcctgttcagtatttcgattcatgccttttgtttccagaaaattttctcagattgtgaaaatgggttttttcttcccctctttagggactctcattacatggatattggctctttgcccatcctgtattacttttacttagatccttttctcttcatttttgttctcttggctgttttcatagttttccttattgtcagtagaatctgctttccccttaggtatgctataacagagattttatttctgagatcattttgtctttttatttctatccttctagaatttgaaacaagagttcatcatcttatttttttgtgtatttccatgatgagtttttaaatttctagcttatgatgtactttcatatctgtttaataatatttcagtcatatggaattgttttcctgtgccttgtgattgttttagggaacgtattttaattcttgtttcttttttgttttggggcttttttggtatggctcatttttattttaatatttgttccttttttacaacttttattttagagtcagggggtacatatgcaggtttgttaactgggtatattgtgtgatactgaggtttagggtacagatgatcctgtcacccagatactgagcatagtacccaatagtttttcaactgtttctctccccataccccgctagtgtccccagtgtctacggttgccatttttatgcccatgggtatccagtgtttagctaccacttataagtgaaaacatgcggtatttggttttctgttcctgcattaattcacttaggatcttctttcttatgtagtagcttcatatggatgctgtttctcctttctgtttagtgtagagagtcacagagtttcttggacacacaatagcatgtgtttctgtgataggagatgagcggtttgtgtgacttcatgggtttcttagtttaaatgctgcgttgtgtaggtacagttaagtgcggtttctttaatgaatggtgctgtggaggggtaggtttgtgtgacttctaattctgtgatactcttttgtttcaagaacgtatttccatcacttgccttctttcctttcactgccaaacctccatagagctgcccccaccttctaagttgccttctcccagaagcagtgtcttctggaaactgcagcctgtggcaaagcccttctattcagttcccaactgcagtgctctaacctgccaggtcttccacctggtctggggtgtttgcccaccctggtagggcacttccttgctgagagttcttccctggacaatgattgccaggttaaactcccctctcctgtcgacagacgcccctctgactggcagcagaggcagtgttgctagctctggtagttttggattttttatttcctaaattatatttaatggaggcttgctgaatactgcctccttttgctgtaggcacggattatgggtggttgtgtatgctttttgttgatctataaggtttttggaggatgtgtggatatatttatctaagcagccaccatgattttttgggaatcacatgtctcatcagtattttctgaagactgaaattcagcttaaatttttataaagactgaaattcaatttaaaaactgctcttggtaaatcaggttgtatgtaacagtcatttctgaattaatctagcagttaccattatctttcttaagtatttaaatatgtttgttttgttttataaataggtccagtgtatacctatttcttctctataaagatgactactccccatataaagttgaggcattagaaaactattgtcaaaataaagtctaactagttttctttgttatacttgttctcataagctttatttcaggaaattgtgcttaaacacaaatactttggtcacaggccttaaatgtctctgattattttctctgtttgagaatctatgatttttgtccttaattaagcagaagtaaactgaaaagttcttagaaaattgattccaaaagctcaaggccactgagacagcgctccccttactggtacagtgctagctggcttggtggaatttttctttctctccaaggccaagacaggcctggctgctccagggaactggaggctggtaaataaatgatactgttcatttgtaggtggtctgactcaagcccatgccctgggcctttccaccataccttgggcttctgcattaccgatttataaaagaacagtgaaacatttaaatgctgccttttgctgtaagaattcaaattagcattctggagagtatctccctcctacctttttaaaaaaatagtttttaattgacacattgtattgcatatattgatggggtacagtttgattttttgatatacgtctgtgttgtataatgatcaaatcaggatagttagcatactcatcacctcatacatttatcatttctttgtgttgagaacatgtaaaaatatctcttccagttgttttgtgtccttctggggcctctgcatctcctccacggaagaaatctctacttttgcatcacataaaagatttgtactgttttaaaatatattaagcactgaaataaagtaatcttggaagggttaagtttacctaggaaagccccaagtttttagaatctgtggagtttccagaagtgaagcatcaggtggaaataaattgtttatagagcctataatatcacagagtagttgtgtatggcagaggcacgttcagacagattttgaattttcctctcttctggattctttctacatttgcttattattttgaggcatacatgggaaaccttaaaaaatgaatgtggacagtttgttccatccagacactaagcatcagccttgttattgtggcctgtgtgctaggccctgtgctgcttcctcttccccagagcatcagtctagtggctaaggagatactgctggtaaataatgagaagaaggaggtaccatgctttgtggggatccccccaggctccccacactgggcaagtcccttttcagtcttttggggtggcttgacacaccccttcatggcatcctgatgttagagctgaattttgcctctggttctacatgcttatcttcatagtactgtcactgtcactttttgtggtatttctactctaatatcttgtgattttagaggcaactttatttctatctcaggagttgtcagcctttttctttgaggtacatctcatgatgtgtgtgtcattagttctcacaattctacgatgtctccttcctcccacccacagttttaaaatagtacggactatagttgtcatagttttacaatgctctgcaatagttattattcaggatgggggaaatcaagattttagattatttgaagatgaattggttttcacagctctgctgttcactggctcctggtgggacatttgtggctttgacaatgtttcctcaggggaacatggggaattgataggctttttctcagacccttctggccgtgaagcttgatattctttcctcagtgtcgtgacctccttgtgggcaagaagtttatttccttagtgttttctggcacatatggatctcagtaaatatttcctgaataagtacggtcaagaagaagagagtctgccttgcctctggaatgcaagggtggttcacctgggccagccaggtggcagtggtttttgtgctagctgggcagtgttttctttcacggtggggaaaatgttttcttcttccaagtcagattcctgtaatacaaaaaaatagttaatttagctcagtttagcttcttaatgtcaattgagtgctaagtgtttaacttatgttgctgcgtaatatggattccccacagaatattttttccaaggatcttctgcctcactgtgagacctctggataacagttgttactttgaatgcaaattctgaatacttgtccataaaatttacaaaaaattaactttcacataaaacaaaataagcatccggtgtaatttcaaaagtaccttttttcaggaagttttaaagttatggtcagtttatgacaaatgggtttttaaagtgaggctacctctggcaattctgtttcaggagacatgaggatctcatggtttagcaaagttcaaaggtcactgaacttgaagtcaagtgtcaggtacactactgaccttggctgggtagccttggataagccattgtcctctagatgccattttctcttcagtaaaatagagatagtgtctttcatggttgtaataatgaaaatgacataacatatatggaaatatctagcataaaacctggaataatgtaggaactctgttaattctagctgtatcctgtctctgaaaataagtggataaagtacattttaattaagctagttttatttagaaacctttaataagaatgattgaactataattacagttcaagattcccagtactctttagaaaaacaagacccaagaaagtagcaagactttacgccaagggaggtatggctaaggttgagaatgttttcatgtgaggaattttccatttaggaaacttattagctgtttttctttttttttaatgtgtagatttgaagtggagggaaagggacatgaaggtgtgagagaaagctgtagcttattctgacacttcatttttggtatggcttgttgccattctatctttcactgtgtaacatagtccccaaaggtttttgtttgtttttttgattttttttgtgtgtgttggggaggaggttttattgagatttaatacacataccgtacaattcactgatttaaaatgtacaattcagaggtttttagcctattcacagggctatgcaaccacagcagttttagaacatcttcatcaccccagaaagaaaccctgtaccatttagctgtcattttccctcacctccctgcttttccccaacactcccacctctagatgtctttgcctgctttgcgctgctgtaacacaataaccttagcctgggtaatgtataagaacagaaatgtatttctcacagtttttgggggctggaaagtctgagatcaaggcaccagcgtctggtatctggtgagggccttcttgctttgtcttcacatggtagaagagaaccagagaaaatggaacctccctttcacaagctcttttattagtggccttaatacattcatgagagcagagggctcatgacctaaacacctcccagtaggccctacctcccaacactgttgcattggggattaaattttaatttagttttggaggggacaaaaacattcaaaccatagcactaccaaccactaacctgttttctgtctctaaaaatttgcctactgtagacctgtcatataaatggaatctcactgtgactgctcatattgcgcattaatattccattgtatgtgtataccacatattatttatctgttaatcggttgatggacttttgggttgtttccactccttagctttttttttgttttgagacggagtctctgtgtcacccaggctgaagtgcagtgacactatctcggctcagtgcatcctccgcctcccaggttcaagtgattctcctgcctcagcctcctgtgtagctgggactgcaggcacccgccaccatgcccagctaatttttgtatttttactagagatggaggtttcaccaagttggccaggctggtctcaaactcctggccctgaagtgatccacccacctcagcctcccaaagcgctgggattacaggcgtgagccactgtgcctggccactttttagctattatgattaatgctgctgtgaacagttgcatacaagtttttgtgtggatatgcgttttctctctttctttatctctctctttcattctctttctttctttctctctctctctctttctctgtctctctctctttctttcttttcttcttgacaaagtctcgctctgtcacctagactggtgggctggagtgcagtggtgtgatctcggattactgtaacctcagtccctcaagtagctgggactacaggcatgtgccaccacactggctaattgtttttgtatttttagtggagatggggtttcgccatgttgtccaggctggtcttgaactcctgacctcaggtgatcctccagcctcggcctcccaaagtgctgggattacaggcgtgagcctcctcgccccgccgggatgtgttttaatttctcttgggtgtgtacctaggaatggaattgctgggttatatggtaacattttccaaagtggctgcacccttttatattcctcccagtcgtatataaggtttctccacatatataaggtttctccacgtcttccctgactcttgttattttttgtcttttgacagacagtagcccatcctagccatcctagcaggagccatgtggtatcacatgtgtggtttcgatttgcatttattctagatacatgttcctcatgagacatacaatgtaatattcccaaaggtttttatgccttccatacatggatctagatatgataaccattctgattgagtacctgctctgggtgaagctctgcagtggcagctgtatgtggattatttcttttgatcctcataataactcctaggtatacattatcttcagtttacgcatgccaaaactgaggtgtgaaggagttaaagaactggtccagggccatactgttagtagttattgcctaaggtctgagtcacacctgagccttgctgtatgcccagcctctgctctgcactaggacttgtgttgacagggagctgcaagctcctctgctggagcttggagtttaatggagttcctaacacgtgtgtgcactctttcatgtacatgtgttcataccaggcccagcatccagtgtcagccttgacctgtcctgtctctgagtccttatgtccataccccaccgagttccttgttatgtatactgtacagagtctgctgcatctcagttttccactgtttattttatgattataaatagacaagatagataaacgtctttcatggaggggccttagcatagtaaaagcaaagttaactctgggaggattacggaggataattttggcttttatgtgagaagaaatttccaagtagcttaaagctgtccctcagtggaatcagctgcttggtaaagaactttgcagaactgtatatgtccaagcaacagtggaggtacccttctctcagggtgttgtaaaatgcatttctcagggtgttgcaaaatgcatttctaaactgggccggaccctgaggcttcctccaggttggagaaggacttgcccttaccagagttgacatcatacagctgtagaatgtcgtgccactttctcataagacgtggcttctgaataaacatagtgctgaactcttgggagataacagggtaaagatgtctttatccttcaaaatttaatctcctttgaaaaacgtacttttaactactcagactgatataaaacttccagcttttatagatgggaaggactctgattaaagatgtaatcagaataacatcttcagtttgtaacacctctggttctggggtcagccagatctgtgtttgagtcttttttttttttgagacatagttttgctcttgttgcccaggctggagtgcaatggcacgatctcagctcactacaacctctgcctcccaggttcaagcaattctcctacctcagcctcctgagtagctggtactacaggcacatgccaccacacccagctaatttttgtattttcagtagggatggggtttcaccatgttggccaggctggtctcgaacacctgacctcaggtgatccgcccgccttggcctcccaaagttctgggattacaggcatgagccatcatgccctgccctgtgtttgagtcttaattctgagctatcctttctgtgtcacctcgggctagttactttaccacttaacaccccagtttcctcatctggaaaacaggtatagtaagagtatctcctttaaatagaggttaagattctgtaatgcttgtctggcacatagcaagtatatactaaatgttaatcatttgagggagggagaattagagatgtggatggttgttaaaaatctaatttttaactttttctcagaggaaacacaagaatagaagaggcttgtgaaatgtataccagagctgcaaatatgttcaagatggctaaaaattggagtggtatgtacaaagtttttgtttgctttttaggcaaatggtttaaaatcactttgaagggagaaatgactgttttccccttgaagagcaagactattggccccagagacagatgtcagtgctgaataactgatgtggctgctactgacatatggagactaaaggggtgtgctctaagtgaatgaagctggaaagcctggcttaagtttaagcacagggacagtgtctgtcttagtttctataaacttcttaatacagtaggcatgtggtaacttaaaatagttaaaattacttggaattagagtaatctttgcttcttactaatatgttcaaataaacacagtgccataaggaatgaaagttggaataaaagtcattaaaactagtgggataaagagaattttctttacctgaacattggttgagaatgaccattccctgctacgcaataactgattgtgattccactgagaactgaaagtggggtttggggggagggggatggatttacattaacctcaatagactcttggttattttttaaagtaatgctttctacccagtgagaccgggcataacaaaattcacaggattattattttcattggtctgagatgggatggctctttgagagaaattcatccctctcccttcagcgaaagagatctttcatgccttagtgatgggatatttctgtagtgaaaatggagaccaccgttgaccagagcaggggacgtgggtgttgtgctctggctcacagctgctgtgggattggaagtgggactcgccctctacaagctgtttcaaggcagacactttaaaatcatttcaaaggagaaaatgcttttgagctagatgattctaaaaggtctcttctggctttaaagatctttgtaagaagtttagttttagctaaggctttagatatgctatttttcaaaacacacctacgcctgaattatattgtatttttaaaatggtggagaaaacagtttgtttcacattccctcttttattttgttcaggtcttataagtaaaaagtgatcttacctgaagagatcacttacttacttatttatttacttacttaatttgtttatttatttatttattcgagacagagtctcactctgcagcccaagctagagtgcagtggtacaatcttgactgactgcaatctctgcctctggggctcaagcgattcttatgcctcagcctccctcgtagctgggactacaggcacgcgccaccacgcccagctaattgtttgtattttagtagagacggggtttcaccatgttgcccagggtggtctggaactcctgagctcaggcgatccacccacctcggcctcccaaagtgctgggattataggcatgaaccactgtgcccggctgagaccacttattacttattgtatctggtgatgaggtattctaacctttggaaattccatttcagagaggccactgatcatgtatgtaactaaggaggctttgtatgtgcaccccgcgtcatctgttgcctggggtgatgctctagcctcctgacattgtcatactgctgcacttttccagtctgtttccatttatgtctgaggttgcaattttttgaattttggaaatcagaccttggcgatgaccttgagcagtaggataggatataaataactcccacgtgcctagcgttccagtgaaggaacactaggcataaatgtgttaatgaagtaacgtaacacaagttaagtaaggtcatatcattccaaataagagctgacgtctctgtagtggccctcaaagactatccccttccttgtgcacccagctcccacttcagagcctttgcatgtactgttccctctgtctccctactctttccccaaacagaatgttgctgggtccctgcttccttcagctccctcttcacatgtcaacttattggtgaggtcttctctggccaccccttttaaaaataacaatcttgtccttcctggaaacttttttttttttctttctccaacactgttatcaccatctagcaaaaataaattacataatgttttattcatttatatttacatgtttttattatatggtgattctcattagaaagtaaaccttggaaggccatgtttgtgtgtttttatctctgctgtatctccaggccctggattattacctgcaaagtcataggtgctcagtatatttgttgagtggatgaatattagactccttgaagttctatccatgttgcattggtgatgatcataacagcattgcatctctttatagttttaaaagttctttcataatgactaagctaatttgtttgatactcagcttttgagagatcatcctcacaggtattataccagttttgcgggtgaggaaatttagcctaagttgtgtggcttcccagagaccatttaatttaatatatgatcctttaaagacagttccaagttccccctccacctccgagaatggagtcttgctctgttgtccaggctagaatgcagtggtgcgatctcagctcactgcaacctccgcctcccgagtttaagcgattctcctgcctcagcctccggagtagctgggattacaggcatgtgccaccacgcccagctaattttgtatttttagtagagatggggtttctccatgttggccaggctggtcttgaactcctgaccacgaggagtgcctgatccaccctaagtgctgggattacaggcatgagccactgtgcccggcccaacacttccaagtttagatagaccgagctagcatttgctgtcagtgattggaatgaatagtcagagtgaaaaagtaagccagcaactcgttttggaatgtgggaatgtgaaaatgtaaaattaaagcgcttactgttgtctggagaaatggaggtagcccagaagagcctgggtgttgtggtattactgagcaagaaaaggatggcccatgactgattctgagacaggaaacatagataagttatcaaaaatgaaatgccagcaggagagcaaggatgtagattgtaaaaaaaagatggcatttcaatatgccaaaccacagatatgatctaaggctagatttgcatgtaataatgaaagtggccaccgtgtgtaatgtgagtcaggcccttctaagcactttacttgcgaagtccaagctattactacgttcttctgaggcagagcccattaaagctcccacttagccagatatgttcctgagttgccacttcatggttaagtgctgccccaagtaccccaggtgcctggccactgtcctggcagtggcctttgccccttctggatacccaccagcctctcatgattcacaaggggccagcagggcttcttcagttccagctctagccctgaggctggcatgtactctgattgttcagtgccttggtttcttcctgcggctataacaaaataccttagtgtaatttataaagaaaatgaacgtattgttcagagttctggaggctgggtcgtttaagatcaaggtgccagcagatcccgtatttggtgaggactgttctcaccttccacgatggcgccttcttgctatgtcctcacgtggtggaaggaacaaggcagttctcttcaacctcttttataagggcactcatcccatttatgagggtggtgctctcatgactttatcactcccccaaaggccccacctcttaatactgtcaaattggatatcaggctccagtaatacaaattttggggggatactgccattcagatcatagcactacccatgtcatgctggtggttacatatttttcaaagatgcctgggtactctttttaatcagaaactgtggtacagagcaagaattgaacctgggcaggtgggctccagagtttgtactgtccctttgccctcaggttcagaaacccacatgagaactgtgcatttcctctggggagagggagttggaacaagagatgcagctgaagctttagcagaattggatgtttacggccaggtataatcatctgtaatcccagcactttgggaggccgaggctggaggattgcttgagcccagaagttcaaaaccagcctgggcaacatagcacctgtctctacaaaaaaaaaaaaaaaaaaaaaaaattttttttttgagacaagagtcttgctctgtcacccaggctggagtgcagtgacacagtctcggctcactgcaacctccgcctcccggattcaagcaattgtcctacctcagcctcccaagtagctgggattataggcacctgccacaatgcccagctaattttttgtatttttagtagagacagggtttcgctatgttcaggccaggctggtctcgaactcctgacctcaggtaatccacctgccttggcctcccaaagtgctgggattataggcttgagccaccaaacccagccaaaaaaattttttaaagaattaaaaataaaaaatagccaggtgtggtggcacatgcagctactcaggaggctgaggcaggaggatctcttgatcctgggaggtggaggttgcagtgagctgtgatcacgccactgcactgcagcctgggtgacagattgagaccctgtcttgaaaaaaagaaaagaattggattttttttcctcacaaaaaaaatttatagcaaatgtttaatatcagcagtgagtactgctttatgataatttttttagaaacctaaaggctttgtgatattcttaaccatgcttttcctggtagatcagattctttcctctccatttctgctgtactgacttccccaatgtgactcatttttcagaggcactctgctgtgttgctttctctgaactcaggaagtttcgcatgttgatgtttaaaccctctgggaagtggcctgatgcagcctcagccttgatttccactggcctcctccagtcagggcaggcttgtcactggcctccacttccagccctttcttaccttcaagcatttcttctgtgttcctgtgactcctctgctagcgattccttccctctttcttttccagcactccagaatccatggtccctgatccaaaaccttttctgaaaaagattagttcatgtaccttatatgttgtactgtgtcccagttggagacctgggtggtaccccacaaccagatccatcagtgattctgcagggaaatttgtaaattctcacactaaatggggtaaaatagattaaacctcatataaatttcagtcagattttgctataaagtaaagaaaaaaatttggatttttagacttttctggatttcaaaattgtgggcctgattttcactttttaggaaacttactttatccatgaagccttcattagcagtttcttccacaccgacagctaagtgtaggagacactaagatagaaaagtgagcaaatatctttgcgctcagtgttttacctttctttaatcatttgtggcttgaagcccttagctgatgtttattatatgttagtggaattgaattgagtagcccaagacttggctactggtattgaatggacagatcagggaatagtggcttagtgcccagggacacttggaaagtctgctggagctgaggtggagaagctttcatcgctgtttgacttgattctggttatttttatatttgcccgaggtgcactggaccacatggatttttgcttctgactagaatgcttcttttcagtggaatataatttttctagggaggtccagtgcttacagcatgggctgctctgggggggacttgttcctctgtgtttaattgtagtgtcttcttcagctgcaggaaacgcattttgtcaggcagccaagctccacatgcagcttcagagcaaacatgactctgctaccagctttgtggatgctggaaatgcttacaaaaaggcagatccccaaggtaagacagccaggcatgtagcatgctatctctgtgtgtaactaaccagtcagtacttccctcaacgttaaggtcagtgttggtgtgctttcaagtcctggtaaaaaggaatttttgtattttggaataatagagaattttgataaccttagggatttttcttttttaatcatttgggggcttttatgaggagaaattatgttaaatttatactggctgtttactttatagcatcatttaattaaactcttatttatattgcattttagagaattttttggaaattacctttaattttatctaagacttcttatatcttaattttgtgaaaatgtatattgttcataaaaggaaactcttatgttcccttactcctaaatacctaaggagttttcagatccagttaatgggagattgtaatattcaatcgttaaaaagtctgattcatacagtattcatttggttttttaaaaagtttttcaaagtatttgttttgaggaaagaatgcaattggatatttaatgtggtaaaattttgcaaagattatttctttttagttagaagagtgtaattaaaagtattaatttcttaccttccacacgcgtgcacagcggaaattttgtgtttttcctttttcttttagcagtccattttgtttaacacacagatcccaaattttgagaataaatatgtcataaagaaatagggtatcttcaatacctttggtataagggttaatcacagtttatttcccaaagtgacaaactggacacaggttaaataagctgttagagtggtaacattgtaatgcatcagtactttagaatatggtgcaggcattaaaatccctggtttcagagaatcttcagtgacctggtaaatgtttacatgtcaattaaagaagcacatgagactgaatgttgtataatctcattttcagaaaaaagtttgtgcatatagaaatgtgtctaataaacgcaaaaggaaagtacatctgagtactaacaacggatttgagcgggattattgatagattatttttctctttatattctgtattttaaaaggtgtaacagggatccacattttttatgtagtttagagggaaattgttttaatttttgttcatctgcttacctttctaattttgtagtcaggcctttctactttgctgcctctttaaaccaaacgtaataaacttggagctgtcactgtatgccagcatcataaacaccatcattttatgatagggaaaattttttggctcacttgtttagaaaattagtaaaatttattagcattattatttattagatttgtttcttcattttgttagtatgctacaatttagcatctttgaacattatacagaatgttgactttgcttaagggttgtttgaataggcatttcaaagtgcttttgcttttggctgcatggagagtagaatctattgaggtgattgttcttgtgatgtggtgccatgttccaaaattaatatatatgcatggtattaatgaggaatatgtttgcattcatattttagcagatacaatttatcagtgttggtgacaacctctatggttttattttctttataatacagtcttttgcctggatggagtcctcactttaaggttaagagtaactaagccaatgttactccagctacagttccctaaattatactatagctgctgggaacaaagccatgctgatgaatctggacttgtgcatgatttttgtttgcttctcattaacctgcccaccctccactccaaaattatacctcattaacgttctgataacagccaggaagacagcctcacctgaaccctctttgactgaatggatttttcattgtttttcttaaatgcctacgcttcagaggctatcaactgcttaaatgcagccatcgacatttacacagacatggtaagacattgcattgcttgagtggctgtggggtggagtcttgagatggcttagagttctatctttcttttttatgttcccaaactggcattcagataggtaaaatcggtgtgtgactgtttcttgttttttcccctagggaaggtttacaattgcagccaagcaccacattactattgcagagatctatgagactgaacttgtagacattgagaaggtaagcagtgggcacacttcctcagatgtgaagcaggcagataagctgactcaaagaactctcctctcctcagtctgagagtgatcgtaggtgtagagtggtcatagatggccttgcctggagactttctggcaaagtctactagctggctaagtagatgggctgttttcctggagtggacatctaagacatgagagctgattaagatttacagagatcacctgttgtttccactctctctgattcatgtcagaacattagcattgccaaaagaaccttcagctgtattgcttagtactctaaggcccagtgaagaaagtgtaagaggtcacctctgtacactcagtcagcatcacagctttaagtatctgtgtgccagtgactcagaaatctgactgcagcctagacctctctccaaatgctagattactgtatccacctgcctgctgacctctccactttgtccagcagtcatctctaacccaacatgtctgggactggattctcagatgtccccaacccagtgttccccgctaaactacaggcttccttgccttttctctttctctacaacctgtgagcaatttttgtgagcggtgtccttcctgctcccaagtcttggcacaactcactaccttgtctctcagctcacacttgatcgctgcaggatccttcaaaccggtctccctgcttttgctctccctaccttgccaaccccacatccccatgccacagagtagccagagtgagccttctaagcattgcatcatactctgtttctctactgctgacagtcattagacccctttcactaagaggaacagctggagctgtgcagagccttcatgggtccactgaattgcttcctcccagccccacactccccatgcatctgtgtggcctggcctctcctcttttctgttattctcctcctcttgcataccctgcatggccatcctggcctccttgctgttccgcacacatgccagatgagcgctcctgcctcaggacctttgtatccacgatttcctctgtctgcaaagctcttccccagatgtccacgtggctgactcctcacatctttcaagtccacatggctaacttccccgtgcccttccatttttgctcatttattacctatttccatgattaactattatgaccccctagttaatttagccccccaggaagacatagtagatccccacacacctcacttaacttcttgtattgctgagcagatgtctccttacaatatgccctctcatatgcttgctcatcattctcattttggttgtctctctccctccgccagattgggcacacgtgtcagcagagagctttgtctctgctttgctgatgtgtcccaagagcccagaactctgggacctagtggggtctaaatatttgctaaataaacaaatgctacccctacctccaccataccaaatggagtcttcctggtctggggaaggatctgctaggcgttactgaaattggactggcattgttaacgttcactcttttgactgtgtgacctccacctgttggttattcagcacaaaatttgctcatatttgttacataaaatttattatttgaccttttttttttataattgccatacttttctgaggatactccctgatcttgatcaagtcagggccaccctgtgcattgacgtgtgtgtgagccttctctttggaaggttatctgtggatcctggaggcaggtgatggagctggatctgaacctcctttgttccctggtgtggaattgatgatggaatgggagggagatggatctggtgtggctggggtatttatttggtcagggtgtctgggatggccacagtatctttatttaggtttgagtgagtcttgcggggatgagcactgtgcgcagagcatctttgccagcagaggctcctgttccagcttcctctttcacagtggtcagaagggcactctggggcaggagcctgcagtgctgtgtcatttctgctgcccaggcatggtctccaacacatgggtctccataaacttgagagcagataaaatgaaatgtgacatactctttttttctcttgaaaaaaaaaaggccaggtacagtggctgatgcctataatcctaccactttgggaggccaaggcaggaggatcacttgagcccaggagttcaagaccagcctgggcaacatgagaaatccccatctctactaaaaatataaaaaaaaaaactatccaggaatggtggcgtgtgcctcattctgttccacaggctggacaggttggagtggcatgaacacagctcactgtagcctcagcctcctgggctcaagcgatcctcccacctcagccttccaagtagctgagactacaggcatgtgccaccatgcccggctaattttttaatttttcatacaaatgaggtcttttcatgttgcccaggctggtctcaaactcctggactcaagcagtcctcccatcttggcctcccaaatgctgagattacagtcatggaccatcatgcctgaccttcacggaatactgaattttaaaatgcagctataaaagaacaggtgtactatggttctctttttgcaaatacttagtcacacacagaaatagtctggaagaaaatatttctctggaagaaaatatttctttggaacacctgtcagagctgtcatgtacacacatgtgagattacctgatgaaggtacatctcctccctctaaaatgtgggctctgtgagggcagggcccatgactgttccgctcaccatcacagccctgagcctagcatgatgcctatttacaaagtgggtgctcagtaacagatgctaagtgaatgaagacaaagtgcatcacaaatgaaagctgcctatagttccatggcctgttttgttttatttgttttcttgtccctgcaaatctcttctaactcactaggagctgccttgaagccacttaactaatgggcttgggcagaaaggcagcacctttaatctgattttcagagactgctagctccctcatttgcatttgctgtgaaacctttgtcattcaagcatcctgcaaacccaccacctgcttctgtatgtttgcatgctaaaaatggtttttacggtttttaatccttgagagaaaaaagcattttgcgacgtgtaaaaattatatgaaattagaaatttcattgttcataaatatagttttattggaacacaaccacacttattcatttatatcttgtgtatggctgcttttatgctaccacaagagagctgagtagttgcaacaaagatgcacaaaacctaaaatatttcttgtctgacctgttagagaaaaactttggctagagccctggtttaaagagctgctcatacttatctcttgttatttggggtatagaaggttttttcaatcttatgagagctttatttctaaggctgtctaccaccgtctacaaaccagctgattctttgcagagttcagctcttacaaaactgtgctaaaaacagcagcacacactatcatctgactcttctcagccattttgcttagttttggactccggtagacacttatttttttgtttgtttgtttgtttgagacagagtttcactcttgtcacccaggctggagtgcaatggcgcgatctcagctcactgcaacctctgcctccccggttcaagcagttctcctgtctcagcctcccaagtagctgggattacgggtgcccacaccacgcccggctaatttttgtatctttttagtagagacagggtttcaccatgttggccaggctagtcctgaactcctcaggtattccaccctcctcggcctccaaaagtgctgggattacaggcatgagccaccgcacctggccgacaccagttcttttttctgagttgtcacgtgcttgatttcactaacttctaccacagcatgacaaggacttctagctttctggcctgtgatctctgtttcttctccacttgatgccatatattttagattgacggcaacacccttattctaggtgacacttaaggtattagtgtgtgtagtctgtgctgcaagtcatagacgtaaggtgtaattagggcttcatagctctctaacaatccagtgtggctgctaagggtttgacagtggtagagacactggggttggaggtaccttgtgtcctttgtaattacttaggaacctgcctgacagttctgccattttggtgtctagcttacagtgtcactctggacttggtcatagccctcctagctcatgggaagtggaaggcctggaggaggatgcaaagtgagatatatggcccaagcctgggagtggcccccaacatgtctgtttacattccactggagagaactagtcataggctgcccctcactatggaggaagctgaggaagtggtgtagctgggcatatgccatgtggggagggggaaacagattttgatggtcagcaagcattctgcttccagaggtgcatgctttcttgtatttcctaaagaaagtaggccgagttgtgaaaagtttgctggtagagtaggtttatttatggaaaaatacctatgcaaatgtagttttaaaatgcagctctccaaataaattgtgtgtgaataaaatatgtatgttttcaggctattgcacattatgaacaatctgctgattattacaaaggagaagaatccaacaggcaagtattacttttcttaatatgatttaatgggttttattatgtgtgataaaaaaatacttctttatactttgtgagtgtatttgactataccaaatgaagatgtactgaggcccagtgcacatcttttatttttccattgacttgttactcactctgctttggttcttgatttcagctcagcaaacaagtgtctgctgaaggtggcagcatatgctgcccagcttgagcagtaccagaaagccattgagatctatgagcaggtgaggatactgttgtttccttggagagaagttgtctgaataatttttcaaaattaaactttttatttttctgtttattgagatataatccacacatcacgtaatgagtacagttcagcggtttttagtctgttcacaaagttgtataactatcaccactacttaattccagaacattttaatcatccccaaaagaagcccagcagtctattctttcctcctagtccctggaagacacaatctactctctgtctatatggatttttctattctgaaccttgaatatatatgaaatcacataccatgtggccttttgtgactgccatctttcacttagtgtattgttttcagggttcatccatgtcatagcaaatgtcagtatgtcattgtttttcgtggctaatacctcatggtttatttatcaatttatggatgtttggggtttttccactttggggctattatcaataatgctgctgtgaacatttgtgttaaagtttttgtggtggtgtttttagttctcttagttacatacctgggaatagaattgcagttgctggaccatgtggtaagtccatgtttaactttttgaggaactgccagacattttcacagtggctacaccattataccttcccactagcaatgcacagtgttccagtttctccacatcctcaccaatacttgttttggtttttttttttttttttttttaaataatagtcaccctaatgagtgtgaaatgttgtctcattctgtttttgattgttatttccctaatgactagtgatgttgagcatctttttatttgcttattggctatttgtatatctttggagaaatgtctattccagtactttctccggattttaatttggctgtttgttttttggtggtgagttttaggtgttctttatatattctggatattaatcccctattagatatgtgatttgcaagtatttactctcattctgtgggttgtctctggactctgttattaatgtcctttgattcactgaagtctttcatatttttgaagtccagtttgtctattttttctttgtctggcttttgttgttatatagaagaaatcatcgctaaatctgatatgaggcttttcctttctgttttgttataggaattgtatagttttggctgttaggttta

SEQ ID NO: 775 - DNA, 32744 bp, Homo sapiens
  source 1..32744: mol_type = other DNA
gcggttgcacgcctgcgcgagggcgggcggcgggggcgcgcgcgcggcgggggcgggctttgccgagcgcagagctgcagccgccgagccggacgtgtccgcgaagatggcgggccgggtgagtgccggtctgggagcccaggcttgaggcaggggcgccgggctcgcgggcactctggggtccaggcggccccagaggagtgggagtgaatccgagcaatggggcgcgaggccagagcgggacttgagggtagcaggggagcggtggcaggggattagccctcctcaacaactccacccccctcgaggggagatgacccctcgttacacgcgtctgctgcgcctcccgtcatcctcccttcccatcccttggggcttgttccctcgtcctccacacagccgcagggtcgcggtcgccgaagccccctctgacgggctctgggggtctttccgcacccccttgcgagggcttattagggggcgccggagtaactgccgggagcacctctgctgcattcggggcaaggggtgtaggaaggatcttcaggaacccatgtctggctcttcacaaattaaaggtcgttgggaaagaggagggggtgccaatgacttttagtgttaaagcccggccatctgggggacctgtcaactgtcgggtcaggcaggaattggctttagcttggagtgaggatggatttggggtgtcacgttttgtttttatggatgacactcgcttcgaatgcagcaggatatgctgtagtttcagggttttaaatttacttcctcctttagcctttaggatcgttgggtaggatgggtttggcgaggagagagagctggttgagtgctgtattgcagtctgccttgagctaaaagctctcaagggatgagtcctgcccggagattacactggtcataaacctgaggacattaactgcgtcattgggggtgaaagatgtgattgactgatctatttataacagaatttttgaataagtttgcatagatttatgcatatatgcaaatgccctatctgaagggacttgtaggtcatgagattctagagtaagaagggatcttaaaggtcatttagtttggcttctttctcttccttttccccatggcctctccttttaaggctagtccttctgccagtacttcagaccctatctgtatattcacctgctccttcttaacataatcaagcttctctatcttaaacccttcccccacccccacagctgtcaccttttcccgtcccagtttacagcaggaaatttgatagagttgtctatatttattgtcttccatttgcttaccacctactcacccttcaacctactgcagtctgatttctgccccatcatcccactgaaacctgtccctcaacttaattgatacctttcaatccttatcttatttgatatctcagcagcgtttgacgttgttgaccatggcttccttgacggaaagcactcttcacatgtgttctggaatgcctcgctcctggtttgactcagacctctcttttgcggcctcaccctcctctactttgttattcattgctggtattcctcaaaggccgtcttctcactctcaatttcccgctcaggcaatttcttctaagcccatagctacaactgtctatatgccagtgattctcaatattttacccccagtccagacctgccctttaagtttcaggttaatatgtccaactgcttatttaaaatcaaggtcccgaaacgcagctttttcaactccgaacccaggatcttagcccacctaacttgtgtagatactcctcgacttaacgatggggctaccttccgataaacccattgtaagctgaaagtatcagaagttgaaaatgcatttaatacacccgatctaccgaatatcatagcttagcctagcctgccttccttacacatgcacagaacacttacattagcctacagttgggcaaaatcatctaacataaacctatattataaaatgttgaatacctcatgtcatttattactgtgctgatagtgaaaaacagaatggttgtgtaggtcttcaaagtacagtttctgctgaatgcctatcacctttgcactattgtaaagttgaaaaatgttaagtcaaaccattgtaagtcagggaccatctgtacctatccagtgagataggaatatctcactgaatgataccatcatccacccagttatataggctgggaatctgagggagggagagggtgggtaaccctttatgtctctcttttgctgtacccatgtcctctgccctatcccccggtaaaatttgtcagagttctgctcctgccccccataaaggtatttaattagggccaaagactctggtttgggggaatggttgctttagactagttccaagtcacccactggactatctggattggtcacatgggttctgtcattttaacctaaaaatctccagtctgtccacctttccacatcttcatttttacctccttttcccaaactaccatcatttctggtctggactactgcaggaagcttccaagtatttttttgttcgtttgtttgagatggagtttcgctcttgttacccaggctagagtgcaatggcgtgatccctgctcactgcaacttccgcctcctgggttcaagccattttcctgcctcagcctcctgagtaactgggattacaggcgcccaccaccacacccggctaatttttgtatttctagtagagacggggttttaccatgttggccaggctggtctcgaactcctgacctcaggtcatccacctgccttggcctcccaaagtgctgagattcgtgcccggcctcccaagtagtcttcttagagcatgtggcccacctccaattcattcttgaccttcattgttccttcccgtgcctattactacttaaacccctcctcagcagcatcccattacttttgggagaaaaccaaatccttaatgaggccttcaggactctttgtggttctgctcctgcttctttccactcattctcttactctgtgtgctcaggttatatggtaaacgagcctttcaattccttgaacctgtagtttctcttaccacaaggtctttgcgagtggtgtttcctttctttgtaacgttcttccccccaaccatttacctcctactcagacatcacttagctactcaagggaggcctactctgaccccacattataagtcaggatcctttgttatatactcttgaagaactgtattcctctccttagagatttatctttttgttactttgagtgtgtgttattatttgcttctaccacttcacctcagtgaaaagcagagaacatacaagttatttagtcattatcaactgcgctttgtgtaccttgtgggacttaggtactcaatacatttttgttgaaaatgaatcagtctctgaacactctggtgatagatggtatattaccctaaagcttgcctgtaatgtcatacagctatgttaggtctttgttatctggagttccatgtaacttttatacgtagttactatttctgctgtttcaagccatacggaactaaacacaattctttttccatgtaatagctactcaagctactcatttacttgaatacaggttacatatctcctcagattttcgattttgcaagttaaacatcccccaattcctagcatatttcatattccaaacccttcatcatttaggctaccttcctctggaagtaacctaatgttactgttttgtcaacctttcttctaaaatgtgcccagagtggaacacagtgatcagagaagaatgtacttaagctattattgtcttgagatggacactaccattattcataccagataaaattgtattagcgttttttctatagtaaatcacattcttggctcatactgagcttgtagtcagtgaaaactcatgttcttttaaaatcagctccctagctccattctaggtttagagcagttttattgaacctaaatcaagaccttatccttttacaattcatttttttaggtcagtgcatgtctgctgtttgttgaggtaatctggattcttagttctttcatgttaggaaacataatagctgtctcttccagtttggttagatctgtaggtttaatcatgacttctgtttctacgtttgagttattggtaaaggatagaataagacagggtcagaaataacccttggacatgctgccagtgacatgcctctagactgatacccattaatacacttgggcactgttgcttaaatacagatgtgtctcatttaattccaacaaaacaacctgcaaagtaggtagtattatctttgtttttttgcagagagaaagagagagagatttagtaacttgagaagttcacatagccagcaagaagcagggtcaagatttgaactcagatcagcctggtactgttacctagttcaccagcttagttgcaagagtgtagtaaagactaggtttacctcacctagaactttttggacataataatgttcagaaactatcttctaccttttggaaaatctgaaaaactttggcccatctgattgtctatcatttcttctgatagcctttattttctagtaactactgagtgatttttagcaaaaatagttcaccttgttgcaatacttttatttgtgcatatttatggagtacatgaaaatttttttacatgtgtataatgtgtagtgatcaagtcagggtacatgagtccaatgtattaagtatagtcatctactcagctatcaaacattgaatttattcctcctatcactggatcttttttttttttttttgagacggagtcttgctccgtcacccaggctggagtgcagtggtgttatcttggcctcactgcaacctctgcctcccgggttcaagcgattctcccgcctcagcctcctgagtagctaggattacaggcatgtgccaccacgcccagctaatttttgtatttttagtagagacagggttttaccacattggtcaggatggtcttggactcctgacctggtgatccacccgccttggcctcccaaagtgctgagattacaagtatgagccaccgcgactgacctcattggatctttttaccttttaacccacttctcttcagcctttctctcccttactccgccttcccagtctctgttatctatttttccactccctgcctccttgtgttcaaattttgtagctcctacatatatgtgaaagcatgcaatatttgtctttttgtgcctggcttatttcacttaagagaataacctccagttccatccacattgctgcaaatgatatgatttcattctttttatggctgaatagtattccattgtgtacatgtatgacatcttctttatccattcatctgtagatggacacttaggtggttgattccatatttttgctattgtgatagtactgcaataaacatgcaagtgcagctatccctttgatacattgatttcttttcctttgtgtagatacccagtagtgggattgctggatggaaggtaattctatttttagctttgagaaatctccatacagtgttccttagtggttgtactagtttacattcccaccgacagtgtatgtgagagttcccttttctctgcatccttactaacatctgttactttttgtctttttaataatagccattctgactggggtaagatgatatctcattgtggttttgatgtgcatttctctgatagtggtgtggaacatttttccatgtcttcttttggccattgtatgtcttcttttttaatgggattatttgttattttccttttgagttgttcgagttccttgtatgttctggatatcagtcctctgcttgatgaatactttgcaaatattttctcccattcaacaggttgtctcttcattctgttgattattcttttgctgtgcagaagctttttagtttgcttaagtcccatttgtttagttttctttatgttacctgggcttttgatgtcttaatcataaattctttgcttacaccaatgtccaggagtgttttccctagactttcttgtagtatttttatagttttgggtcttaaaatcttcaatccattttgagttgatttttgtatatggtgagagataggggtctagtttcacacttctgcatgaagttatgcaattttcccagcatcatttattgaagacagtgtcctttccttagtgtgagttcttgtcagtgttgttgaagatcatttgtctataattatgtggttttatttctggattctctattctgttccattggtctacatgtctatttttataccaataccatgctgttttggttactatagctttataatatattttgaagtcagataatgtgatgtctgcagctttgttctttttgcccaggtttggtttggttgtttgggcttttttctttttccttttttggtcccatatgaatcacattggtattttgatagggatttcattgaatctgtagattgctttggcaatatggtcattttagtgatattaattctttccacaagcataggatgttttttgatttattttctttcattggtgttttgtagttttctttgtagagatctttcacctccttagttaaatgtattcctaggtttttgtttgttttcggtagctattgtaaatgggattgccttcttaatttctttcttggctagatccttattgatgtatagaaatgctactgatttaaaggttttctaaacctacagatatataatcagcaaagagacaatttgactttctcttgtccagtttggatgcctttcatttctttctcttgtctgattgttctggctaggatttccagtactgtggtgaataggagtggtgaaaatgggcatccctgcctcattccagcttttagaagaaagatctcacctctcctcattcagtatgatgttagctctgggtttgttgtgtatagactttattattttgagatatattccttctatgcctaatttgttgagagtttttttaatcatgaagggatgttgaattttatcaaatgtttttgttgttgttgcaatactcttttttttttttttttttttttttttttgagacagagtcttgttctgttgcccaggctgtagtgcagtggcgcgatcttggctcactgcaacctccactcactgggttcaagcaattctcctgcctcagcatccctagtagctgggattacaggcctgtgctaccacacccagctaatttttctatttttagtagagacagggttttgctatgttggccaggctggtctcgaactcctgacctcaagtgatttgcctgccttggcctaccaaagtgctgggattacaggcgtgaggcactgagcccggctgttgcgatactcttaatgggttttatatttcctttttgtgggggacagtttattttgcattcttactacttttgatattctgacatcatcttataagtgggatttatattcactatgtaattgaagttttttccaatgaagcaccgtatatagtttatctgggaaattggctgaagaataaaatgtgtgatgttattcagtgtacagtttctaggtcatcagaagataccactaccttcccactactggaaaagaaaaaagaaaagttttccacagtgcctgaactgttttgtatgcttatcttttaaaattgccagaaatctcacttactggagattcagcagtccctttctgaaaatacacatactttagtgcaaataaagccagtggatctctttcttcataagtccttaaacctagtcgaggtcatctgtttggcagagataggagtaagataatgtgaaataggaaccaacgagagagaacttgcttaggagttgaaaggggtatggaaagatgttagaggtaaaatttgtcgaatctagtgttttgactagggcaggccagaatattcagtatcagtatcaatatcagaagcttttgtagcctttgtttagaaacctagtcatttataacattttgtgggtgaatgacatcattaccaaacaaactttcagatgaaactttggaactcaagctgtaaattgtggatagctcatgtgcagtactacaaatcaaaacaaatactataaagtgtttggtagtccatttcctgaatgaaagtttgtccaaagtatatcaactttctgcagtcttacatgcagtagttattagttttgtgtatcgctttagtggatatttttaaaagtatcttcaaatgcaatgaattttaggaaacaaaacaattctttaaagcatcattagatagcttcttctttctgaaacccagaggaatttatgtataggatgactctttttttcaagtagttaagttaaggtgcaaaagtataaggtaaagtatattatcttaccattgaaaattttggcagtggcagaagagcgaacccttacaaataccttcattgggcaatacactaagcacttgctgtaatgctttttaaaacatctatactctggctgtggtattttaagtgaaaatctctcagtgagatactctttcgtattttagtactgatatccttaatattgctctgagagctaccttatactgacttcagtttcctagtgatttaaactactaatttccaacttatttttttttatagtgaaaactaaatattccttttgtagatgtaaccatttctggaagccctaagtatttttgaatgagtataattcatgcacactttaagagatttcaagcatgacaagcacagtgaataacatatatccatgtgattaccactgaggtttaagaaatgttaacatatgatatctgcttcagatatttatctttttaaaaatagaacattacagctgggcatggtggctcacacttgtaatcccagcactttgggaggctgaggctggtggatcacctgaggtcgggagttcgagaccagcctggctgacatggagaaaccccgtctctactaaaaatacaaaattagccgggcatggtggcacatgcctgtaatcccagctactcgagaggctgaggcaggagaatcgcttgaacctgggaggcagaggttgcggtgagcgagatcacaactccagcctgggccacaagagtgaaactcagtctcaaaaataataataataaataaaaaatagaacattacagatccaattgactcttctttgtattgctcctttttttttttttttttagttttatttaaaaattttttttagaggctgagtctcacttggtggcctgggctggagtgcagtggcgcagtcatagctcactgcagcttcacactcctgagctcgagcaatcttcctgcttcagcttcctgagtagcttggactagcagaggtgtgccaccacatctggctaattaaaaaaaagtttttagagataggatctctctgtgttgctcaggttagtctcaacacctggcctcaagtgatcctcccacctcagcctcctgagtagctgtggttgtaggtggcagccaccacacctggcagtatcccttcttgagaccactgacctttcccagaagtaatcactgtcctgaagttggtatagattctttctgtctacatctatgcatgtttatgctcaaaaacaatatattgctttgtgtgtctttaaaatgtatataatggttttatgctatatctttctttctgcaacctgcatttttcacttaaaataattttgaaatttagtcctgtggatatatagtgagccaattaattctgcttagctactctgtagtctgttttgtgaatataccacaatcatctactttcttattagaggacaatttaggcagttccaattttatttttcccggaatgtacattattttagtcgagtgccattgccacattagcgatattttggttagtgagggactgcagataggaaggtgatcccaaaagattataatgccatatatttactctacctttctatatttacatatgtttagttacacaattacccattatgttacagttgcttacagcatttggtgctgtaacatgctgtacaggtttgtagcctaggagcaataggctataccatataggtttgtgtaagtacgctctatgatattcatataacgatgaaatcacctagtgacacatttctcagaatgtatccctattgttaagcaacacatgagtgtgtgtctccatgcatatatgtgtaagagttagcatgtgtgtccagaggtagaattgctgggcgataagtcatactcatctttacctagttatgccagtttatactgtcactagcagtatatgagtacctgttatttatatcctctccaacacttaatattgctgacattttaacttttacaatataataggtgtaaaactattgtttaaatttgcatgttgtcctcattactagtgagattaagcatttttcatattggtcattgggatttccccttctgtgaattacttttgtatatttgctcattttttctgttgggctgtgtatttttttagtgatttgtataatttttcgttttttggggggtagggtatgctttggattctaatcctttgttgtaaatagcttctctcagacagtgatggtcttttcatgatgtttatagagtgttggatttaaattttatagttataattaccctttttttttttttaccttggtgatttgtgcttttatgtgtttttcaggaaatctttctccaccctgaagtcattttcttataaaagttttaaaattttgccttgcacattttggtgattgatcaggaatttatttttgtgtttggtgtgaattatgaactaattttatcttttccatatgtataaccagttgtctcaatatcatttattgagtccatttttttcctttactgatttgcaatgctatctctgtattatatccagttcccatatatgtgtgggtctaagtgtcgactctattccgtttcataattctttttgtccatatttgcatcaataacactgttttaattgctgtagctttaaaattattcttgttatttcatagggcgtactttcattacctttcttaatttggcatttcttggctcttttccgtatgaattctgggaacaacttaatccccactcctttaaaaaaaaaaaaaaagacactttggcctggcatggtggctcacacctgtaatcctagcactttgggaggctgaggcgggtggatcacttgaagccaggagttcaaggccagcctggacaacatggcaaaaccctgtctctaccaaaaattagcgggcatggtggcacacgcctgtaattccagctacttgggaggctgaggcatgagaatcagcttgaacccaagaggtggaggttgcagtgagttgagatcgtgccactgcactccagcctgggcaacagaacgagacagttttttgtttgtttgttttaaagacacttttaaccttccgctatggatttttgacctacatttttcctcttgtattttataagagtagacacagagagcacttcaataaaattcagctcaataactttattaacctgatctccttttctttgactttaagctgaaagtgttaatttctcacaacttgtgctctatagatttgaaaccaaatcaattagcatcagctgtttatgagtaatgcagggtattttggtcttttgctaaattcagaaagaaatgttaaagtgctgatggatttgcactagctgtatagatctttggtggaggaggaaatgggaaaattattaatttcaggtaagaagtcatttttgaaatgcaagattcatttctttttaaaatcaccacataataaaaactttaagggctgcattggtgggtttttaaaaaaaattgtgaagtgtttttagtgttatgtgctgacaaatatttttgtagttgctttgacaagcaatgaaactaccaattatcactaattctgagtcttccaatgaacctctgtgtcaaatttttaaatttaattatcctgactatttttctcctagagaataatattgatataattttgtgaaccatagcagacagttcccattgctgagaatagagcctggtgtggggatattatgattcttgaatggttgaacaagacatttgcttctgaacatcttagtaaattatcacttctgacaatgtctgtagtttgaattttgatattctctgccaaggtattgaatactctaaataatgttgtttattctattatttaaatcattagtattatagatctagctttaaacagctgctgcactccagtcctttttcttcacctgcagatattgagtctgataactgttttgtatacatagcctttcagtaaatctacttatcagtcatcaaattaacttaattataagttaaatgatgagatggaccaagagtgttattgaaatctcatttccacacatttcttctcttcttttgtagaaggtaatgaaatgaacctgtcagtgttcctgtttttatgaagtttatttctcttagtacagtgattctgatagtgggttctgcagaccagcaaattagcattatctgagaacttgttagaaaagcaaattctcagttcccacttcaggctgactaatttagaaaccctggggtagggcttagcattctctttcaataaattctccaggtgattctgatgtatgttaaagttgagaagcattcacttagtgttttgagctctccaatttagttccttataaattgttgaagatattttttccagatttctttccaaatatgtgctcaaccttgttactgataggtttcaaggttatcgtcttcttcccattaataccttcatctatatccaattttcaaacttttaagaaagcatggctattttgctgcagtatggtgaattaggtactctgactgaccttcccagataaacaatttaaaattctagataatttttttttggagggaggacagggtcttgctctgtcacacaggccggagtgcagtagtgtgaacatggctgactgcagcctcgacctgttgggctcaagcgatcctcccacctcaacctcccgagtagctggggccacaggtgcacaccaccatgtccagcaaatttttttattttttgtgcagatggggtcttgccttgttgcacagactggtctcgaactcctgggctcaagcagtttttccacctgggcctctcgaagtgctgggattacaggtgtgagtgactgtgcctggcagatgaaatattttttaagtaaaaaccttatgtgcatggagatagctggctgaaaagtaaggaataatcaggccaaaaactatgtgaaggtgaaaacccagagatataagccaagtactgctgccttgaggacattatttgcaaatgacattacttggaaaacctagttaacttgtgcttgtgcctcaagaagctcagagaacggaagataaaagtagttttctggtagaacgtcccacctctcctggtaaagatggtaccccaagggtctatacatcataataaatgagaactagtaataaacgtaccttgtctaaggatcggaaagaaaaatttcctgcctcaaactttggtggtgatgggaagggtacagaaattccctgagaagttttacccacaagctgaccttcatgcaggtttgaatcctgattttatattacctggatggtatgaaaatcttaagccagtaattaaatataaaagtggtacaagagtgacgatgccttaaaatgcctaagaatgcctaaaaagcagcaaatacaaagcttcttgggagaacccatcttgatcttaggatttagaaaattcctaaacataaagctgtaagaaatatgaactcacattcacaaaatgcagaaagaaataagatgcaatgaatgagaggaagcagaaacaataaagagcagaatcagaacctgcaaagagttcacatattggagttagcagacacagattataagtacatatatttaatatgcttatagaaaaaaagaaatttaaaataggaatgaggagcaagtatacaaaaatgaccagtgtacaaatttaataacagattagacacagctaaagaaagatttagtaaagtggatctgaaaaaattgcagtatagaggcaagaaaatgaaaagtaataaaagagttaagagaatacagagggtagaataagaaggttcagtctagtcagaattctggggcaggggagcaggggcatggaaaagaatgaggcagaggcagtatttgaagagataatgacagagaactgatgaaaaacaacctacaaatttaggaagctaaagaatcccagaaaggataaaaagaaaaaaaattcacacataaacattttttaaagaaactacatgataccatagagaggtcttaaaagctgtcagaggctgggcatggtggctcacgcctgtaatcccagcactttgggagcccgaggagggtggatcacctgaggtcaggagttcaagaccagcctcaacgtggagaaaccctgtctctactgaaaatacaaaattagccgggcgtggtggtgcatgcctgtaatcccagctactcaggaggctgaggcaggagaattgcttgaacctgggaggtggaggttgcagtgagccgagatcgtgccattgcatgccagcctgggcaacaagagcaaaactccatctcaaaaaaaaaaaaaaagctgtcagagaaaaaagatattaccttcaacaagtatttggctgtcagctgttttcctgtctataataatgaaagccataagacagggagtaatattttccatatgcttagagaaaataattgtcaaccaagaattgtatatcttgtgaagaatgggggcaaaattagacactttaaaacagacaaacactcaatgttgtaaccatcaaaccttccctactagtggaaattcagatcaatttcctgaaggctaaaaaaaaaaaaaaaaagtgaccactgatgtaaagtctgagatttaagaaggattgaagagtaaagaataatggtaaatctgtggatatattgaaataaatattggctttataaaatgatgtatgcggaggttttaaaaatagaactaaataggccaggtgtggtggctcacgcctgtaatcccagcactttgggaggctgaggtgggcggatcacctgaggttatgagttggagatcagcctgaccaacatggagaaacctcgtctctactaaaaatacaaaaaaaaaaaaaaaaaaaaaaaaaaaaaaaaaattagccgggtgtggtggcgcatgcctgtaatcccagctactcaggaggctgaggtaggagaattgcttgaacctgggaggcagaggttgcagtgagccgaaatcacgccattgcactccagcctgggcaacaagagcaaaactccgtctcaaaaaaaaaaaaaagaactaaatatatgataacaacatccaaatcaaaagagtggttaaagtattttatgatctttatactgttgaagagaaaggtaaagctattcaattaactttagattttgataggtatgtgtattagtattttcagagtaactactaaaataatataaatattaggaataatttatagcagaaaaaacaatttttaaaaggcaaggaagaagtgaaaaacatagaaaaggtcagataaagaggaaacaataaaatatagaaatcaaatcaaatatatggtagactaaatgcttcattcagacaaagaatgtcagattggattatttaaaagcaagcaggccgggtgcagtggctcacgcctgtaatccgagcactttgagaggctgagacgggtggatcacttgagatcaggagttcgagaccaccctggccaacacggccagctggccatggccagctaatacaaaaattagctgggtgtggtggtgcacacctgtaatcccaggtacttgggaaggtgaggcaggagaatcacttgaacccaggaggcggagattgccgtaagccaagatcatgccaccgtactccagcctgggcaacagggtgagactctgtttcaaaaataaataaataaataaataaataaaagcaagcaaacaaacttactgaaacaacacaaaatccagctataattttcaagagagatagctaatacatatgaatgtagaaagatagaaagcaaaaggatggaaaaagtctatcaggcaaactctaaccaaaagggaggtaaactaactatattagcatcagacaatatgatctttcagacaaaagagacagctagagataggtccctcaacaatgagaaaaggtttatttatccataaaggtaaaaacaattccaaacttgtgtgaacctaataattgcctcaatatacaaagaacaaaatgacacaattataagatgaaatagacaaatctaccatggtgaggagtttcaaaactccctaattgaaaaattaaaaagacaaaatggttacagctgaaaattaaaattaaaaattcattttctcggttgcaatagccatttttcaagggcttactagtgacatgtgacaatggctgctgtattggacagcacagaaagtacttttgcactgcattaatttagaagacttaatataattaacaatattaataattgagtattgaacaccacatccaaggtgcagatctctgaataatatctgatcataatgtgggcaagttagaaattaatgacaagaaaaggcagaaacatgggagacaggtgaagatttcttaaacagaatataaaaagcactagatacaaaggaaaaaagtgattaattggatttcatcaaaagacactgacttagtttgcttaggctgccataacacaatactatagacttggtggcttaaacaaaataaatgtattttctcacggttctggaagctggaagtttgggaccggggtgccagtatgactgcgttttggtgagcactgtcttcgtgacttgcacacaggcttcttgccacgtgtctgtgtggcggagagacagcaagatctcaccatctctcttccttttcttataaggccacagtcttgtcagattagggcccttcgcttatgacctaatttagcctcaattatctcccaaagtccctatctccaaaatagttggggtgggggaagtgccttgactaatgaattttgttgggggcagtggggagtgcacatttcactccatagtagacaccattgaggagaaagaccagagtggaagaaggtatttgaaatacatgtatttgacagccaggcacggtggcccacacctgtaatcccagcactttgggaggccgagctgggcggatcacgaggtcaggagatcgagaccatcctggctaacacagtgaaaccccgtctctactaaaaatacaaaaaattagccaggcgtggtggcgggtgcctgtagtcctagctacttgggaggctgaggcaggagaatggtgtgaacccaggaggcggagcttgcagtgagccgagattgcgtcactgcactccagcctgggcgacagagcaagactctgtctcaaaaaaagaaaagaaaaaaagaaatacatgtatttgacaaggacttgtacctggaatatataaagaactacaaatcaagaataaaaagaaaggacagaaagccaatggaaaaatgaacaaaggattcaaacagggatttcacaaagaacttacctgtaacgtatgttaaatgctcaacctcattagtcatcagagaaatacaagttaaaacctcagggagatattactacacacccaccagaaagttaaattaagaacacatttgtcatgacaattctgggtttgattttgttttgttttttgagatggagtcttgctcttgtcgcccaggctggagtgcagtggcataatcccagcttgttgcaacctctgcctcctgggttcaagtgattctcctgcctcatcctcccgagtagctgggattatgggcacccaccaccacgcctggctaatttttgtattttagtagagatggggttttgccatgttggccaggctagtcttgaactcctgatctcaagcgatccacctgccttggcctcccaaagtgctgggattacaggcatgagcccgcgcacctggcctgtcatgacaattctaagtggtgatgaggatgtgcagcagctggaactgatgaaaatgcatgagcacaacctctttggaaaactagcagaattccctaaaactgaatgtaggcatgatgcccatgacccagcacttatagtcctgggggtgggaggagtgaatatatttctattcatgatttctatctctgatgacagaaattaagctagtgggtatctgtggttgagtagaaggatagtgactaggagcgggcagtatgggatgctggtaatgtcctcttgacctaactgttggttaccctgggtgtgttcacttgtagaaattcattgagccaaacacgtacaatgtatgcatttttgtgtatatatgttcttcttcaataaaaacttgatttaaataatgttctttttcttaaactgggtagtaggtttatggtgttttatgtgttgcctgtgttttatacatattttattcctgttcagtgtccaaaaaatataaaaagtagtcactgctttgttgttaatttgagcatctcctgcacctagcacagtgcctgggacattatagatatttattaaatatttgttctatggaaaagaagtaggctagtaatttctttttgctttccaacagccagtttttgattcaattatttgtaaatatgatttctactcagttgtttctaaataataaaatatgtaaatactattatgtttatatttattagtaagctgaatttattaaatgagaaacctctcaatattaaggacacatcataaattattagcatgctgtgttataatgactaaaagtagtatcaacaatttagataagtatagtgtggccttacggatgtaagtccgtaagatcatgcagcattgaagatgtgcagtttactagatcttctaatattctcgggtgtctcactgtttcttttttttttttttttgagatagggtatcactttgtcacccagtctggaatgcagtggcgtgatcagggctccctgtagccttgacctcctgggctcaaacctctcacctcagccccctgaataacggggattactgatttgtgccaccaagccaggctaatttattttctttctttctctctttctttctttctttctttctctctctctctctctttctttctttctttctttctttcctttctttccttctttctttcttttctctctttctctctctctctctctctctctctcttcctttcttcctttctttttgtagagtttgggtctcactatattgcccaggctggtcttgaactcctggcctcaaatgattctccctccttggcctcccaaagtgttgagattatagttttcagccaccgcacccagcctcactgttttcttcagttgtttctgaacaactggaatctcagctgtctttttccattaaatcccgtgttcgttcctccataccatgctgcctcttgcccatttttgcatttctcctttctgctttcctgaacatcctgagtcttactgggctggcattcccttgttgggacaggggagaggctctaggccttggatccttgttctgattccttctccaaagagttttccctttttcttcccctttcaaaacaacataagtgcaaaagctttgtcaggatgttgggaattaaaaaagcttcagaaacattttgattcatttaacaacattactctgaaactttttagagtaagagtaccaagtcactgaataagacgatcttgaaattaaacgatattttacagttttaaaaacaccttcacagatcttttcttattagattctcagcacaaccttatgagttggcactgtcaaaattcagttcaacaaacaaaatccaactaacaggaaaactcacagctaacatcatacttaatggttgaagactgaaagctttcccccttaagatcagaacaagacaaggatgctcttgccactcctattcaacactctattggtggttctaggtggggcagttaagcaggaaaaagaaaagacatttatatcagaaagaaataaaactatatttaccgatgacatgatcttacatgtagaaaaatcctacagaatttaccaaaaaaaattggaactaataaatgagttcagcaaagttgcaggatacaagattattatctaaaaatcagttgcattcctatatgctagctatggataatctgaaaatgaaatagaaaaaattccatttataataacatcagaaagaataaaatacttatgaataaagttaaccaaagaagtacactaaaaagtacactaaaaaacagaaaacatgttgaaggaaattagagatctaaataaattgaaagacgtcctgtgttcatggcttggaagacttaatattgttaagatgacagtgctacccagatttatctacaggtttaatgcaatcactatcacagttcaactgcctttttcccggaaatggacaacctgatcttataattcatatggaattgcagagccatatttgccacaacagtcttgaaaaaaagagaacaaaattgtaggactcatacttcctgatttcaaaacttattacaaaactacagtaatccagatggcatgtcactggcatgaggagagtcttgtaaaccaatggaatgcaatttagagtccagaaataaacccatacatttatggtcagttgattttgaccagggcgccaagatcattaactggggaaagaataatcttttcaacaaatgttgctggggcaactggatatctacatgtaaaaaaataaatttggatccctgcctcacatcacatatgaaaattaactcagaatggatcaaagacctaaacctgttaagttcttcgaaggaaacataggtgaaaatctgtatgaccttggattaaatggtgatttttaaagatataacacaaaaacacaagcagtgaaagaaaaaggtagataaactggactttgttaaagttaaaaactttcatgcatcaaaggacactgtagaatgaagacaactcacagaatgggggaaaatatttgcaaattatatctctgataagtatatatattttatatatatgttgtttatatccagaatatgcaaagaaccctttcaactcaacaaagataagacaatggaatttaaaaatgggcaaagcatttgaatagaatagacatttctccaaagaagatgtacaaatgacctataagcacatgacaagatcttcaacatcatagtccatagggaattacaaatcaaaaccacaatgagagataacactttacaccctctaggatggtcatactttttttttttttttttttaaagacagtaacaagttttgataaggaagtagagaaattggagccctcattgctgatgggaatgtaaaatgatgcagctactgcacaaaagttttgcagttccttaaaaaactaaacatagaataactcagcaattctactcctgggtatagacccaagataattgaaaacatatgttcatacattaacttgtacatacattaacatgtggcattattcatagttgccaaaaagtggaagcaacccaaatgtccatcagctgatgaaatgataaatacaatgtggtatatccatacaatgaaatcttatccagctgtaaaaaggaatgaagaagccaggtgcagtagctcacaactgtaatcccattgctttaggaggccacgatgggaggattgcttaaggccaggagttcaagattggcctgggcaacatagacccagtctctacaaaataaataaataaaaagaatgaaatactattacgtgccacaacatgaaccttggaaacattatgctaggtgaaaatccagtcaccaagatgacgaattgtatgattctgcttacgtgaaatgtccacaataagcaaattcatagagacagaaagtagattagtggttgagaaggagtgagagaagggatgaattgagattaacggctagtagggacagagtttctttttggggtgatgggactgttctggaattagatagtgattatggttgtacaacatagtaaatatactaaaaaccactcaaaggctgggtgcagtggctcatgcctataaccccaacactttgggagactgaggcgggaagattacttgaggccaagaggtcaagaccagcctgggcaacacagcaagaccttgtttctacaaaaaaaaaaaaaaattgttttaattacctgggtatggtggtgtgtgcctgtagtcccagctactttggaggctgaggtgggaagatcacttgagcctgtgaatttgaggttacagtgagctgtgattgtgccactgtgatccagcctgagtgatagagcatgaccctgtctctcaaaacaaaaccctccaaaaaacaaaaaccacccaagtatacattttaaatgattaattttatgtgaaatatatcagctgggcgtggtggttcacacctgtaatcccagcattttgggaggcagaggtgggcggatcacgaggtcaggagatggagaccatcctggctaacatggtgaaaccccgtctctactaaaaatacaaaaaattagccaggcatggtggcacatgcctgtagtcccaactactcaggaggctgaggcaggagaattgcttgaacccgggaggcagaggttaaagcaagccgagatcatgccactgcactccagcctgggcgacagaacgagactctgtctttaaaaaaaaaaaaaaaaaaatctcaaaaacggcaatgagaactcaattaatatttatcatactgtatattccctgagtggtgcaggagaatcagagcttagaatcttgtgaggaaggcatggtacttaaataagtctagtgtaaggcagcttgtaataagtagtactaagactgctgaagaagcacaaataaaggagatattctatcttactaggaaccagggagtttcacaaacttggctttgcaaggtgggaaagattttcacaggtggaaggggtttgaaatagggaattcagtcaaaaggaatagtgtgagtgaaggaatggagtttggaatgtggggtacatggggttggggtggggtattgaggtagatgacgcagaaaaataagttaaagatagatcttgcataggtggctgtgagtagcatgctaaggagtttgggctttattacttatgaatcatatttttggtttcaggtcatgtctggtggcagagggaaggctgaattggaggagaacaaaagctagaaccagggacaacaattattaccattgtagttttttaggagaggtgatatggctgaactaggttatggttgtgaggctggaagggaggcacatccaagtgacagtgcagtagacttagtagactcttgattgtttatgtgtgcattccagggataggcagtgaagggaagaatgaccctgaaatcttgaatttaatgacttgaaaggataatgatggtattaacagatgaggaacatagcaagacaaacaaatgaaaaagtgaatactgaggagaaggaggtaccactgaatttggcatttagtcattggtgattttgaagacagcagttacagtaaagtggctgctggaaaggatttcaaagaatggttgaagaagatagccataggatgagaacatggaaggcaaggaagggagacttgagagatttggtaataaagagaagagagaaaagggtgctagtttgaaatgagttaaaagaactacagagtagaattaaaataaagtagaattatgggatttttgctttttaagtgacccatgagaggcttactggcagtgtgccaagattcaagagagcaaagattggcagggtgggattaagtgatgggatagccgggtgcagtggctcatgcctgtaatcccagcactttgggaggctgaggtgggtggatcacttgaggtcaggaattcgagatcagcctggccaacatggtgaaacctgtctctacaaaaaatacaaaaattagccgggtgtggtggtggttgcctgtaatcccagctatttgggaggctgaggcaggagaattgtttgaacctgggaggtggaggttgcagtgagccaagatcgagccactgcactaactccagcatgggtgacagagtgagactccatctcaaaaaagagaaaacaaaaaacaaaaaaaaacgacggtagggagccttctgcctctttaaacatttgagatgcatgtcctgagatgcttctgtgaagttaagaatattaattttttgatacgaatctgacaaaactagacatcaaaatatgccatatatggtaattaaaacaatgtggtattagtatagaaagcagacaaatagttaatgaagtagaacaaccaacccagaaatagaaccagatacacctgaaaacttcatatatgaggtttaaaatcagtgtggaaagctggaaatcacccatagtttcgttatccagtcagttgtttttcacattttggtgtgtttccatttagttggtttgccatacttttttaaaaataatgctttaaggctgagcgtggtggctcacacttgtagtctgaagcaggcagatcacttgaggtcaggagttcgagaccagcctggccaatctgatgaaaccccatctctacaaaaaatacaaaaattagcctggtgtggtggtgcttgcctgtagcctcagctacttgggagactgaggtgggaagatggcttgagccagggaagcaaaggttgcagtgtgctgagatggcgccactgcactccagcctgggtgataaagccagaccttgcctcacaaaaaaaaaaaaaatgctgtaaagtaaaagttctgtatacaattctgtgatatgaaccctaccttagtgtgttatgaggattttgatccttatatgatatgatatatataatcaagtgcgggtacgttgtagtttacagaaccattactttgaaacaagacctttaggttactcctaattcatcactgttaaaataatgctgtagggaaaaaattacacataaaagttttctatatttaaagtgatttttgtgagacaaagtttatttattgtaaaaacagttccagcagttcagaattgtaaagagttttacagaattgtaaagagttcagaattgtaaagacattttcttgtctttctccttggtggtaaccactgttaacagtttagtgtgtatcttttttttaagtttagtttttatttttttgtagagacagggtcttgctttgttgcccaggctggggtgcagtggtgtgatcatagctcactgcagcctcatactcctgggctcaagcagtcctcccacctcagcctcccaagtagttgggactaccggcatgtaccaccacgcctggctaatttctgtatcttttgtagagacagggtttcaccatgttgcccaggctggtctggaactcctgggctcaggcgatccccctgcctcggcctcccaaagtgttgggattacaggcatgagccactgcacctggactagtttctttttaatttctgagtagtagtcaattgtatggctctcctataatttcttcattcattcatcttttggtagacattcatgttgtttccatttttaggctattatgagtacagctgttgtgatcatttgtgtgcgagtctttgtgtggatatattttcatttcttttgactaaaaacctaggggtgcacttgttgggtcacattaactttgtagaaactgcattgcatctttgccgatattgaaagttgtcagccttttatatttttctgtgcatgcttttccccccaaaagaccaaaatgggaattgtttttcttttcattataaacttgtaaaggaattttaaagttctaagggatgccaggcaggaggttcatctatgtgaacagttattagtttgagatagataatgtcaaggatatccctaaaggcttttcaagagataactataggacatataagtttaacttatttctaccccatcacttctagtcacatgtgacttcagaattttaacagaaattattattataggaatatgtagcacagagggattccataggcctgaagattagtactgatggcctttcttgcattattctaggctagtgctatccgatgaaactttctgcagtgataaccactagccacaggtggcttttgaaacgtagggctagttcaactgaagaattgaatttaactttaaattaatttgaatagtgaaatatgtctagtgattaccgaacagtgtagttctgaaatgttatttttcaggaaagatcctctagcaagaagtagttgagtgagacctgttagctgagctggccctggggcaggtttgtgttttcagtccttccctttcctgtgggagaaatgaaaccaaagcctagagcaccacagaagaagaaccagtggattcataagggtgacagttcaggtaggggaagctgtttggtaatgagctcttttggtcagatgccacactatttttctttctgtttattttgccctattaaattatttagtaaatagtaaagcgtactttaatccagtttttaaagtggacgtttggatgaaagtatgtgatttaaattccaaaactgtgcagtgttgtccagaagagtcctgattaaatcaccccagtttctttgatgaagataagcaaataattttattttttgctgtaatcccagctactcggaaggctgaggcaggagaatcgcttgtaccagtccggaggctgctgccctctcacagggcttcctcctcttgcacagacgcaccagtgccttcagccccactggtctccctcttctcctttcctggcccctgctggcccagtagatgggccactggaggccactagatgggggctggggaatgtgatgttggcgatctgcggtatcttcagggtgacagccatacccaacgcgtgggacctggcttccacatctatagacctgacctaaggaaatatgtgggcgtgtgcataaggatgccatctcagaactgcatattaataaaaagctgaatcaaacagtgtccaacaagggtggctgttccagctggtcatctacaatctcagctcactgcaacctccgcctcctgggttcaagcaattctgccttagcctcccgagtagctgggactacaggcacacaccgccacacccggctaattttttgtattttagtagagatggggtttcaccatgttgcccatgctggtcttgaactcctgagctcaggcagtcctcccaccttggcctcccaaagtgctgagattataggcgtgagccaccgcacctagcctgtactttcatttcttaataactgcatgactgtagtggttggctttcattattgtttcctaggggcaaggtcaatgttagaaaaattgtggaattttcccttggcattgctgtggtgagtagacagctactatttatagagacttatacttcgttgaaaaaatgagataccatgcctggcttaccataaaaacacagatgtttctggattccagtagggaggccttttgttcacagcatctgttttggttggccagccagatgacttctgtggattttttcactccttttgaaggacacttgacaaataaacaagtttataaatgaaagagttaacagcattttgtaaatttattttattactttagctatatcgttctgtatattttgaactatcagatcattttagctcaattttatcacttcctaaataaccttgagacgatcagtcctttgttacatgttctttggattgtttattctgcagttgagacagatttttattgatctataaatttttgtgttcaacaaacatttaatgagtattcactgtgtactaggccctgtactaacactgggaactacatatgtgagcaagatatagtctcagtctttgagaagtttagtgtcttatatgcagtgcaaacatgtagacagaataaaattatagttgagtccttccatttgaagtttatttcatcagtttagtggggaggggtaggtgtctaggaatgccttccagaaaaagtagtgtctaagtggagaattgtagaatgagtgggagttgtccagggatggaacaggggttagtggcggagattatataaaagaaagaagcttgcaggtgaaaatgaccctgggaaagtgggaaactgaaaaagttcagtacatttctgtcatatggctgatcaagctgtgactgggcaaaatgctgtcagcatttgttgaacacataaatgctgtctcattcacaaaggagacttgtgacctagactttattcatcttgtgctaaattagtgatttccaaacatttgatcatgaatctcataagtaaaaaatgttttgattatgtatcctcatatattgattatatgccaatatttgtttatagatgatatgtagtactaaaagttatatacgcagtagaacatgtatagaaaacaaaaaaaattaaaaggatgagctaaagatggcatgtacaatattctcacagtgttaattttactgaaaatacggaaagtaggctgggtgcagtggctcacgcctgtaatcccagcactttgggaggctgagggaggcagatcacttgaggtcaggagtttgagacaagcctgaccaatatagcgaaatcccatctctactaaaaaatacaaaaattagctgggcatggtggcacacgcccgtaatcccagctactcgggagggtaaggcaggagaattgcttgaacccgggaggcggaggttacaatgagccgagatcatgccactgtactccatcctgggcgacagagcaagactccatctaaaaaaaaaaaaaaaaaaaaaaaaaacccagaaagtaaagtggtacatcattatttaaaatcttcgtttaatattatgtgatacagctgctcagagggctgtttctaaattcagtttattttgatactttaatggcagtcaaagcctggatcaaaatggaagaatttggctgcactttctaaatcatattctttctttctccaaacttattcactatttatggaaatgctttattgaaatgtggctggtaaatatccatctattagtttttcttgcagattaataaaaatatattatacttttattgtgttaataaatgggttccaaaaatcactgttaagtcttcatttggaagatattttaaaaagttttagaatattctgtttctgactttataaagcatgaagatacgagtttttggtgtctttattttttagattttgtatatattgtttcaacagcagaataacttagcaatggaaatgtttccaattatccaattttgaaatgctctattaggaaagatttttttttctctcgctctctttttttttttttttttttttttttaaagatgaagcctctctcttgtccccaaggctggagtacaatggtgccatcttggctcactgtaacctccgcctactgggttcaagcgattctcctgcctcagcctcccgagtagctgggattacaggtgcccgccaccacgcccggctaatttttgtattttaagtagagatggggtttcaccatgttggccaggctagtctcaaactcctgaccttaggtgatccgcctgcctcattctcccagagtgctgggattacaggcgtgagccactgcacccggccgatttttttctctttttcttttttctggaaaagctgaaaataattctgacatgttgctaaacatttttattttgtaggggcagagtgagtttttttgtttttttaatatcttcttggtagcatactacttataacctcctcagaaatatttagcaagtttggaactctagtctttttattttaaaaaaattgtgtaactcatctacatttaacaaatcttttaaatacatttcttgtggtaactagtgaatctgtgtggatttaaaaacaaaaaaaagattatgaggccaaggcaggtggatcacttgaggccaggagtttgagaccagcctggccaacatggtgaaaccccatctctactaaaaatacaaaaattagtcagaagtggtggtacacaactgtagtcccagctactctgagctgagaatgcgccactgcattcaattctgggcgacagagcaagactatctctcaaaaaaaaaaaaaaaaaaaaattcagtggctactctctatctcccagagtataggaagattctatattcatacagttaacctcagtgacatctgaggtaccttgttctgacttaattgcagcaatagtttacctgtgaatgaagccgttaaaggcttttgtatcagatgctatcactgtaactttgttctggaatttttttttttttgagatagggtctcgctctgttgcccagactggagtacagtgacacgatctcagctcactgcaagctccgcctcccgggctcacgcctttctcctgcctcagcctcccaagtagctgggactacaggtgcccgccacaacgcctggctaattttttgttattttttagtagagacggggcttcaccgtgttagccagcatggtctcgatctcctgacctcatgatccacccacctcggcctcccaaagtgctgggattacaggtgtgagccaccgcagctggccagaattcttttttaaaattccagtcaaagcagtcatttcatcagtggttacagttttcccataaagcaccttgtttcatttacagttaagaatacctcccttttaatacattgttccttggtatcttacaaagttgtatttcctgtatatttcataattacccagcaaataccctaagatgaaagaatcatctgtatttttatccaattgtatagcaaaccccacacactgtatttgtcctgatatcttcaagtctttagggttttctaagagcttttgactatacttaccaataaaagaatacatttagtttgtcaccatttttatttctgtgtataatttcagctatggtccttggctttttttagggaaaccttagcagtttcgacactaactttcgtacaattttgtgaagtgtcacattaaatagcctgtgactttagacataggtggaaaaattatagacgtttaactcttgcagtgaacacttaaaagcctggtggattatgaggactttgttcgtgccatcagattatatcttaaggtagagtagacatgtagagtgaggttcatctttaataaaaaatgggctgggtgcagtggctcacacctgtaatctcagcactttgggagaccgaggtgggtggatcacaaggtcaggagatcgagaccagcctggctaacacggtgaaaccctgtctctgatgaaaatacaaaaaaattagccaggcgtggtggtgggtacctgtagtcccagctacttgggaggctgaggcaggagaatggcgtgaacccgggaggcggagcttgcagtaagccgatatcgcaccagggcagtccagcctgggtgacagagtgagactctgtctcaaacaaattaaaataaataaataaatagataaataaatggtgtggctggacgcagtggctcacgcctgtaatcctagcactttgggaggccgaggcgggcggattgcctgagctcaggagttcgagaccagcctgggcaacgtgatgaaacccccgactctaccaaaaattcaaaaattagctggagcatgcctgtaacccagctacttgggatgctgaggcatgagaatcgcttgaaccagggaggcagagattgcagtgagctgagatccaccattgcactccagcctgggcaacagagagagactgtgtcaaaaaacaaaacaacacataaataagaaattgtgtaaagtcaatataaataccagtactaatattttatttttataccccaaaggattatcgtataatacaaacacccttcaagtacacatatcccactttggagactaatgccctaaacaacagggataatgatattgaaactggccttttagttaaaataaaagcaaagccaaaaataattcactttcctctataaatttatatttgggagacacatttaagaataatcgtcctggccaggtgcagtggttcatgcctgtaatcccagcactttgggaggccaaggtgggcggatcgtgaggtcaggagatcaagaccatcctggctaacacggtgaaaccctgactctactaaaaatacaaaaaattagctgggtatggtggcgggcacctgtagtcccagctactcaggaggctgaggcaggagaatgacatgaacccgggaggcggagcttgcagtgagccgagatcacgccactgcactccagcctgggtgacagagtgagactccatctcaaaaaaaaaaaaaaaaaaaaatcagctttggcttgaggtttgaagaatgaacccttcagtcatagactatgactacctgtcatagctcactaggaa

SEQ ID NO: 776 - DNA, 32742 bp, Homo sapiens
  source 1..32742: mol_type = other DNA
cggccgccgccccaccgtaggtccgtagcaggtggtcgaagtcgggcctccccgcgggcgtcacccagcgccgccggctgccccagccctgcgtgaaggcgctggaaaacacgcagggcaggttgggcagcaagaagccccgcacaaagtcggcgtaggagaaggcgcccggctccgagacgaaggctacccggcccggagcctggccgacgccggggacatcgacccccaggcctcggaagtggctgtcggcgagggcgcgcgtctcgcggtccatccagctcagcacgggtcgaaggaccctcctcctcacttccgccggagcggaaacggtgaggaccagcctcggaaccagaagacgcagggcgccgcgtttctgccccgccagcgcctggggctccgggcctgcacgcatgcgcgcggctcgccgcggtcttcactgcgcaggcgccgagcggccgaggcgccgcggtcggctctgggactcgtctggcgtccctcaggtgagcgacggtgttggtctgttgggcgcccggcccaagccaagccgtagcgtccgccctcggctcagtccgcgcgctgtggctgacacagcccgagccctccttcccgcatccccggggggtggggggtatgcgggctgcgctgggagaggggcggggacagaggcggttctgggggcgggagtgcggcggtgcgggggcgcccagggatgatgggacccggagagaacggtgggacccagagggagagctggggggccctgggatggtgggatctagcggagatggtagggtcctggaggagatggtggggacctggagaggacggtggcacttggaggggatggagacgggatctggaggggacggtgggacctggaggggatggggacagtggggacctggagaggacggtgggatctggaggggatgggtacagtggggacctggagaggacggtggggacctggagaggacggtggcacttggaggagatggggacattgaggacctggaggggacagtggggatttggaggggacggtagcacttggaagggatggggacagtgggttcctggagggatcagtggcacctggaggggacatgggatctagagaggatggtggggacctggaggaaaatggtgggagggctggagggggcagggtaacctagatgggcgaatggggcccacaggggacctggagggcatggcaaggggccccaggggatgacgggtgtctggagaagatggtggggaatgagggagggtgtgaaatgaaggtgtggtgggagtgtgggtagggatttggggctgtgtacacatgagcagggctgaagtgggaggacatcggagtagtgacatgaggagtgttttgccaaacttgcaactggagttaccccaaaagtggcggcaagggagttccccacactatcctcaggtgggaccagttgggataccaaagaaagaagtgctaaatgcatggtaagcccagagcagtttttttttttttttttttttttttttttttttttgagacagtatgcagtggcaccatcacagcttactgcagcttccacctcctgggcttgatgaattctttaattctgcttcagcctcccaagtagctgggactacaggcatgagccactatgcccagcttagttttgtttttttgtttttgttttttttttttttttttgtagagacagggtctctgtgttgcccaagccggtgttgaacgtttgggctcaagcaatccttctgccttggcctccctaagtgctgggattacaggtgtgagccactgcgccaggccctgcctagaggttttgttaggggaactttcatatagagtgggctgcggtagtcctcgagacgggcagtaagggaaaagggatgtcctccctaggtatgtctcttggaaggggtgtgggttatggagtttataggaaggtttcaggaatttggctcagggccaaggccgttttctttgtagtaaacctagatactttcttccatgcctggaaatgttaaaggccctggattgggttgaagcctggtggggaaaacctgtggttggggcacagagggatcagggtactctgtgattttcggccaggacacgaaagtggggccatgggggaccctatgtgatgtatgtcttggtgtgctggagaaatcagctcaaagctacccacatggatgcagaaggaaagatagcagatttattgcccccgaagcctggcaggctgtgtgcacataggtgctctgcgagagagtgcagagtctgggcagcatttcccaggcgtcttgacagggaggtggaaggaggaacagttagaaccgctcatctctcccagagaaatgagaggcagcttgtgctggtttgcacacagtgcgaggcctttgagttaggtttggaggtctgatgacattctaggggccatcagaccatgactgtgtcttgtaaaatctggacactgggctatctcattccagaccaaacagaggcatcctaagcgggagaggggcacctgccttccctttatgaagcaatggaaatgttgttttatttactcttataagtggggatatgggaggttctaggagtgctggggctctgagccttgctggaagactctttccaaggggtgtgaggtttacccaggagaacagggaggagcagaagagggaggaccaaggtctgaggagttggagggaggactaggaggaaagtgagttttgggagtctgagtccaggtaaaggtgggatatgagggcagggacaggaggcggagagttgttttggggattgtgtgattcagtgcgtgctatggtcccttcctagtcagccctattgtggcttgtgtgatcacggtatgcaattgtttattggggttttttttacactagagaatcagaatgtctggagaagttacagttgcagagaaagaatcacctccagttccgtccagagatgactggggtttttttgctttggttttttttggtttttttgttttttgttttttgttttgttgtttttgctgttttgagaccgcgtcttattctgtcacccaggctggagtgcaatggcatgatcttggctcactgcaacctccgcctcccaggttcaagtgattctcctgcctcagcctcctgagtagcgaagattacaggcgcgcaccaccacgcccagctaatttttgtatttttagtagagacggggtttcaccatgttggtcaggctggtctcgaactcctgaccttgtgatctgcccgactcggcctcccaaagtgctgggattacaggcgtgagccaccgcacacccagccgagatgaccgttttttattcctggtgtagagccggcttttctacattccttcacacatacattcattcattcattcattctctctctccactcttctctccccccagtccttgcctatacgttcacgcacatgtatgcacacacactcacacatacacagtctctttctccatcgtgtataatatacatatataaacttttgctgcttttagtcttttgttttttatttaacaatatgctgtaacatcttgccacatattgacctcaatattgacaattaattgaccttaattgatcttgccacatattgttccttaattgctagtagtcatttgattttggttgtggtgcatgcagatcatgggaggccaatggggaagatgtggggagcagagtgtttataattgtctcaagatcttggaatatggttccgagtttgcctcatggggaaactgaaattcaggtgggcattgcctggaaggagttcctgcagctccgtggttgagcctgtttcctaagaaaggagcatttgggctagcaggtccacagctccctgagatcactgagcccctaggacttggtgggagatggagctctcgttcttgagatggaactctgtggtttagttcgctggtccgcagggtgccccctcgggtcagtgtcaccactgtatacgcaggaggcctggagtgttatcagctctcatgggactggaacataggcttgtgtcacccagagcccgctagatcagccctggcatcgcttgggaatggcaagaaatccacattcttgggccccacacaatactccattaggatggttttttgtttttgttttaaaacggggtcttcctctgtcactcaggctggaatgcaatagcgctatcttggctcactgcaacctctgccttctgggctgaagtgatcctccacctcagcctcccagagtgctgagattacaggtatgagccactgtgcctggccaggacgggttttaagtcagcactttggagaaaatgcagtacgctttgtgccgaatatgtgctcctctgtcactgtgttgcatgcaaacagccccagtgagggtgtctgcactttgtggctagagttgggaacctctgagggagtggaaagagggtctgaggagcaggggaggggagcctggaaagattggccgcaccctaccgcccctgtgggcacacacagccaccactgttctcacttagcttcttggttgcgaggtagtggaaggtgtgcaagatgtttgttctgtgactgcggaaattaactaaaaataagttgtttactgggtactgagcctcactcaggggacccttgagtgatggaaatgctgaaagagacccattgtacagatcgccctgcgtgctgagccatccctgtgctgcagacttcctccccaagagcgtcacttgtgtgggttggctgcagacacccttgggcccctggccatgacctccctcgaggattcagctgtgtgttctcagggtcagcgcgggtccccaggcccacacctgcactggaggaaggaggttgcagattgcaacaggcagggacaccgtgagggctccaggacctggactgattgcagaactatgtggtacaggagggcataggcacagctctgtttccatgtggtgtggttgtggtcaactcagcacaaattcattgggtgcccatggtgtgtagcgggccttgcggccctcccatgatagtgccttctgtagtgcgacagtcatgaaagcaccaactctctggagttttgcttgggccatggttggtgacagtgccttaggaaggcgaggaagccctccgaacagagacctgcggagtggagccaccaatgagactccctggtgtggaaaggctgctgggagcagagggcaggggaaggccagggcagggaggccgcaggtcctgcagagtccatgaggctgcggtaaggaacttggatctcattccaagtacacagggaaaggctttgggcagagaagtgacatattctaattctgttcaatgactatctcattgactgctggagggggaatgggtgatggggacaggatgaggtcaggaggttgcctgagatgttgtccaggtgtggagggagggaggactgccttggatggtggaactgtggaaagtaactaaaagtagattgtttcctggagattgagtctcattcagggggcacacatataatggaaagactgagagagacccattgtacagattgcagtgtgtgatgagtgagtccctgtgactacaacaccttcccccaagtgtgttgcttgtgctggttggcccagacaatgcctgtgccaggtcagtgatgtggtcttggggtggagggtggggacacagctgccaggacatgctcatggcatgtttcttgagggggaggaagagaggagtcagaagtcctgggcccgtggtgactttactgagagaggaactgactctggtgctgctacactggggtgcccattaggggtgggaggaggtgcccagcaggtgataggggaggagctgaaagctgaaggaggggctgtgaagttggggtgcccgttaggggtgggggcagatgcccagcgggtgacaggaggggctgtgaaattggggtgcctgttagggtcagggacagatgcccagcgggtgataggggagggcctgtgaagttgggttgcccgttagggatgggggcagatacccagcaggtgataggggaggagctgatggaaggaatgtgaagttcaagtgcctgttaggggtgggggcagatcagcgagtgatcagatgtccaagtttgaagcgtgagggagtctggctggagtgggtgtttgggaggcaacggcttgggggtgatgttgagtttctggcctgtgttgtctcacctggaaaaagagggtgcaaggaggagaggttgtgccctgtgcagtcaggtgcatgaggaggctatggccaaggagagtggacgcaggcactcatggaagtggggctggagacctggagagggtagtggccagggagccagggtgcagtgactctcagcaaggccccttggctcatgggccaggtccagctaccacatttttgtaagtgaggtcctgtggggtggcacaccccatgttgatgtcttgtgtgtggccactttcattccaccccagcagagctgtgtagtggtgacggagaccatgcgtggtccttcacggagagtgcagtgcctggcatgggagggccggagaggtctgggggctgagagagagagggtgggatcagggccccgggaggagggtctggccttggaggtgaaaagggaccacgttctcctgtggcctctgtgtggggccaggcgtgtcgtcgggtaggggaatggctggccggcgtgggggccgtgttcaagattgggctgcttctgatgttccatggggtgtcttcacttccgtccttgcactgcatctccgttgactaaggttttctgggaaagaagccctggaaacctgcagttggaaaagggtggctacaagtttctcttcttgcttcttcctgggctgttgtcaaacttgaatactttccttatatttattgtttaaaatgtgataatgagaagagccttggttattcatgtcctaattttttggtcttttttttcttttttttctttttttattttattttattattattatactttaagttttagggtacgtgtgcacaatgtgcaggttagttacatatgtatacatgtgccatgctggtgtgctgcacccactaactcgtcatttagcattaggtatatctcctaatgctatccctcccccctgcccctagcccacaacagtccccagagtgtgatgttctccttcctgtgtccatgtgttctcattgttcaattagacggaatttcactctgttgcccaggctggagtgcagtggtacaatcacgactcactgcagcctggacctcccaggctcaagtgatcctcctacctcagcctcctgagtagctgggaccacaggtgcacaccagcatgcccagctttctttttgaatttgaaagattttagagctggtgaccttaggtcttttagttattttgacggtgggtaaaaaggtccagaaggtgaggtgatgtttccagagctgtaaactgtgctgcaacaccagtaacaggacttctccggggaggttgtgcataatttccctccacactcctgaaatacctcccaaccatgcctgcttagcaatggttagcacacattcactgtccacaccgtgtctagctctctgtatagaggtggtggtggtgaggcgtggtccctcccctcgaaggccaggtatggctgaggtctgggcagcctcttcagccaggagcatgggcacagcaactccagggctgagcagggagggccacagcccctcctgtgggtactggcttgcctgactttgaggagcatgactgagttggtgtagtttatcctcctcctaattctgagaagcagacatctttgtgtccccatagtccagagcctgctgggtggccttgcagctgctgtggcagaacggcatcatgggtcctgtgtgtggcctgccgaccctcgccatggccctggtggggagtgggtggccctggagggggtgggtcctgtgtatggcccactgggcccttgctgtgaccctgggggtgtagctaggttgaccatggtactgaaggtcttggcgccctcttctgtgtctcctgaggggccatgtggggtgctcaggtgagtattccccggttgcagaggaaggtgcagtgagatacctgctgcctagggctccctctggcctcctcctggtggtgagagatggtgtcgcctaggaagggcggctctggcccacccacggatctgcttggccttggtgtgtgctgcaaacccacctgtcaggccctccccagaagaggaggccagccttaaatctcctagagccttcctgggcagggagagtgcgaggtgctttgtgtttgttgatgttggggttccctgcagtctggctgagacaggttctcacaaggcctcccgtgggctccggcctcccatgggctccagcctccctgagccccgcctctcctctgtgactgggtgctgtagtcactgctggcctcggccccttgctgcctctgcattgcgtgttcgagactacagaaggctcaccttcccggcagtcccaggccttgcaggctcttctagaaggttctctgacacctgctcccttcactgctcagtggcagtcacaggccgtgtcatcgttgctggtctttgaatgtcactatctgtctgctcccctggacctcccttggtgcctggactgtgtcctttgtctccttagatacccataccctaagagctgctttcttggagttgggagacggggtcagccaaggtgccctgggttccttgagctttcaccacaataagctgtctacagcatccctcgaaccctgacatttttattatttgtaagtctcgtatcttattgtgtgttgatgatagaattctcttacttaatatagcagcttccttttcagcttctcctaatctcaggtacagccgaccttcagtacctgtggtttggtcccaggacctcctgcagacgccgaggtccctggtgtgaagtggcgtggtatcacgtgtcctctctgtgcgtcctgccatcagccttatgtcatctctgtcacttacaagcctgccacggtggcgtgctgtggttggtgctgtgttgcttagggaataaagacaggaaaaacagtctgtgtatgttcagtgcagggacagctttttttttttttttttagtattttttgacctgtgggttgttgaatccacggatgtggagcccaaggatgtggcgggctggctgtactggtgattagtgatcagttcacacgagcaatgagagctggtgatctggactgatctacagagtggacaccaacagctgattggcatgtatgcatgtctgggaaattcagtcctgacctttctacggagatttaagaggaatactgggaggtatttgtggaatacttaagccacatcagcgtagaagttaaattcattgtgctgtgaaggagtcgggtcatttcgctttaatgtggccccttacttttgtatatattgagcacattgcaagtgaagtttcctccccctcctctcttccccttctccctccctccccctcctctccttcctcctcatccttctgtgtgtgagcttttgtggttaggtgttgtctatggccagctctgttcagatactaaaaacagagagaccaatggcagatcctgggtgtggcaacgccctggcagtcatgaaacaggtggattcaagaaaacggcaggccctaggcgctcctgcctgccaggccaagctagtgcttgtgggtgctcctgggtgctcccagggatagtcctgcctcggggagtggctgtgctgtgccaagcacctgggagcgccctgctgacctcatgaggctgtggggccacacaactgtcagccccactcagggataggggcaggagggaggggctcgctcacttgcctgagcccacagccttgggtggagctggttgccctgactctgcacctgtattgtcggtgagaggaagcgtgccaggatctgtgtggcctgtgtggctgtgctcttctccctgggcttttgcctgaggcagtggtttcaaatgctcttggaattgtagcacccagctgaaatttagttctggtacacctgtcatgcatgcgtttattaattttaatgtgattttctattgtttgttataaacatccaataaacctttaattgaaccattatgtacagaaataccaacgaatcaaaacagagcatgcaaaatcacaagtgcacccagggcaaggggtggacagaagcagccccacagaggcccctgcagggccttcccctctccccaggtgcagccatcttcctgacctcctaatgttgaacttttcatatgcttactttccaaacgaaataaaatttgtagaaagtcttgatgtccccgaatagaaacatcttagggtgttgtgagctgagagcgggtgtgtggcatttgctgcctaaatacttagtggcatcagagagcagtctggtgtgaaggacccacaccccagaatagagtggccttgcagatgtcatacacatcacccaggggctacatgggtctgagacggcttctaccttcctgtaggaggccccagccttgatggtctcagctgtctcggcacagcgggcttcctgtctgcctgggtcccaggtggatgctacacacatggtggatcagtgtcacagctggagagccccgggttcaggaactcccccatgctgtaatgggcatgtcagcaagacaagcctgcttacctctgcccccagaggagacggcatccttagtacccggctcacatcctctctctggccaagagggagaaaccagtcgcagccccaggctgctcgccacgcaggcattctggaaaacagtctgggccaaagctgccacggacactcagggatgtgaggagaggtgcatcccatccacatccacccagtctcatcctgtctaggcttccagcgggatttctcattgattagcctggctgggaccaaatctgtccagtcacagggcattcagtcaaggctgccacctcagccatgccccaggggcccagctgcgcagacatctgaaagccccaaacatccatcccattcactcagtgacaggttgttgccaaggagggtaattaatgaaatggggcccttcccctctcatgacttccagccagatgagcaggcggcaccctccatgtgctgagtgccatgccccagaaggaggacaggtgtgggagaaggtgggtggggctccatctgtggccacatgggtattctgtggactggggacctagccaggcagcccccacagtccagccacacctccttccctgcagtggttgcacaccctgtggtctgcgtgtgacgacatattgtgcgttctcagatggctgtgtcctcatacaattaaggtcccatttgatgcaagctcttccaatgcaggtgtggcttttcagtgtgtcttgtctagacttgtgttgggggcatggtgtccagtgcagcagttacatgaaagacctggctcttaagagtgtaactgcatgagctgcaggaaccagggacggatcagggtaggtggtgcccagcagataatttggcacatagcaggactcatgaacgtgctgccagaatgaggaggaccccacagcctctagctgtgccatggaaagcccacactttttgatgtctggggggattacactggctggctgtcctgtttgtataagtaaagtcacgttacagtgaaattctgtgagagaagtgggagaaatgccaccctacccttggacctttctctgctgtcagaaccttggtgaggcatccccggcctggctctggccctggcagagtcctgcactcgtgcctggatcttgcacaaggccctcttgttttcttaaccttacattatctgtacgatgagacagttgggctgcatgttccatgaggattcgttcaaatctatcatccaagactttccaaactgtactgataaatgtagatgtgaaaacatgataggacaccttcattgcttgcagctatgtaaaactacatacgcacaataagttagtacgcgtacgtgttactactcagttctgtagaacgctataaggttaggtggggttatgagaagggaaaacgcttgtctgcaggattgttttctctatgcaatgaagttgatgaatggaagtttccaaaggggaatgtgcatctagagggaacattatggccaaaagacagcgctccttggaacggtctgagagtacgtcctgggactgaggtccgaggcccagggccctggcaaagtctccagtgatgtcctcctcaagtctcgtccagcagtggacactgatccaagcagggtggctttgctgggtgcaggggcacagagtgtggtgagggggatgacagtgtgaaccctctgcctgggggatgggcataagtctgggactcaggggtcctggttccaaaccagccctcctgctctggctgctcttccttcacctgctgagagggtacatgggcttcgtcatgcagccacaggtggatcgagagtcagccacgtgctgcagcctgtgtgagcccagagccgcaggggaggcagcatccttgtggggttgcttgtgtctccagtccatgggtgacggcagaacgttactgtctcttctccttcagaggcagaagaggcctggaccttggcgcacacagacccaggaacagatgagcagggatgtctgcatccacacctggccgtgcacctactacctggagcccaagaggcgatgggttactggacagctgtccttaacatcgctgtcgctcaggttcatgactgacagcactggagagattctggtcagcttccccctctccagcatagttgagatcaagaaggaggcttcacattttatcttcagctccatcaccatcctggagaagggccatgccaagcactggttcagctccctgcggccaagtcgaaatgtggtcttcagcatcatcgagcatttctggagggagctgctgctgtctcagcctggagccgtggcagacgcatctgtcccaaggacccggggcgaggagctgacgggactcatggctggatcccagaaacgcctggaggacacggcgagggtcctgcaccaccagggccagcagctggacagcgtcatgagaggcctggacaagatggagtcagacctggaggtggcggacaggtgggcttgctgtgtacactttgcaaggcacacacagagtaagatgcacatgtgtggaggctcacaggcactgttccaggccactgcaccatatttgcacacatccagcattctgagatcctggctgtgcacctgctgtacatgcttagtgggtacgcacattaagatccagcactcggaaagcgaggctgtgaatacacggtacactctgctggaaacacaccgtgagatctgagtgagtgctggctcactgggtgcctggcaccactgccgtccactgcaccatgctgagtccacacccagcaagcagagactgtgctgtgacctcctgtacacattcctctgtttctggctcctatgtggtgatggggacaggccctggcctctgaggtcacagaggatggagtgaggtctgtcttgatgacggcctctgttagtgaggtgtctcctgtcagcatctgtggctcctatgtggtaatggggatgggccctggcctctgaggtcacagagggtggagtgaggtctgtcttggtgacagtctctgtgagtgaggtgtctcctgtcagcattggccatttgttcatgagctatgttcttctgttatgtttcttagtatgaaaatcctagtgtatgtccagaaaatttcttcagtttgtttaagaatgcttttctttttccaagtccgatttttgctttctgagtcctgctatcttctgtttgggtactcctttcgtatttggctttcttttagtgttgctattctagtgtgtgtttctggtttttatcttcctaccatttatcatttgtacttgtaatttcttagaactcttttgtgttcctccagtttcctggaaaaaccttcgggtcttgcgtcatggcccgagcatcttctgtgtttggatattattaatagccttgttttgcttatggtttctgggttttcaaggtgcttgtttattgccttttttgtcgcggtcgtttttcctaagatggtgtgtgtggggctgaggtatcacccatgggctgtttactgggaccctcagttcctcgtcctggggtcctgtctggagcgtgagtcttggggggctgctttctggctcaggtagaaagtttactccctctgccctcaggttccatccagtccctcttctgggatccgggggtgcccacttgggtgggtccatctgggagccgaggatctcccagtgcagtgccacatggacttgtgcctgcgtgttgctggttcttcctacctctgctgggagggtgctggtactccctcctcatcaccccatagggctctggcaccctaattgcatggtctctcagcatgccgctgctggcatactatccaccttcctggatttgccagtctgcccgcttttcagtgtcaggctgccactatatttgtctgtttcctttgtctttggagaagtgtgtgttgagtttgccgtccttctctattgctctctaccccttttttaaggacacgtccttgagagcctgtgtgtgtgtctgtgtgtgtctgtgtgtcgtctgtatgtgtatgtgtgtctgtgtgtttctgtttgtgtctgtgtgtatttgtgtgtgtcatctgtgtgtgtgtgtttcagtacacatagctcaggtttttacatgctttcaattacttttattatttcttgaaaagtcattttgaagcgtgttgtttctcgttttgtgattgttcggaggaaagtgagaacttcctcctagcacccacagctgcagtgggcagaacctctgtgtccctggaatcccgccttggcattggccactgtccctcagccctaagctggggtcatattggtgcatcagtattgcatgcaggttagttggactgaggtcacatcttgtacttgactaagaggagatcctttcagtcagagctttgctggcacaaggccggagccggaagatgacagagcccccgacaatcccagctcttctgtgtagatggcaggtgtgtgttttgccctagtcagagtctgcagggggccagcagctggagccccacggacagttgcaggccgaaggccatgactctgtttctcggatcagttcttgttcttttaaggccttcagcaggttgcacggggcctgcccacattacaggccgagctgctttcctgggagtccgccaatttctatttaatctcatggacacacaccatcacagacacgtgcagagtagtgcttgacgactgggccttgtggccctgctatgtggacactaatgtgaccatcacagcctcctgggaggcacatgccctggcaagctgggactggccctctgccctcccgcctgtggggttctggagccctccccatggtgcctccgtcctggcttctccctgccctggctcgctgctgaggggtgtccctgggctggaccctgacagtgtctgcagggggaggcctggggatattcgcagaggactgagccctggccataggcgagggtgctgcggtcctggaggggaggctgtgggtgcacaatgtggctttccctgcttcctggggtgtcatcctcctcccagtcacagaaaaaacaaatgccatggagaaggagcatctttttctgtgcccagccgagtttctgtgtggccacatggcatcagtgccagcgttgggtgcacccagagactgtgtagagggagattgggaggaggctgccaaggcacacgattatccatggcatggacccagagcccccatgtttgctatggactcctgctgggaaatgagccgggcaccaagcgatgggcctgtcccttcttctggaaatgtagtgggtgacccaaagactggccgagccagagaaacaagagttccacccacagtgccggcatctgacccagcccctgggcccctttagtgctccctgaacactgtggctttgattgtgcggtgaagaagagcccgccctgtgtcgcccactctcctgggacaggccgtcctatgttcacctgcgtcggcctgcaccgccacgtctctctcctgctcagcagctgtctcccagaggtagcctgccaccctgcgccagccccaccacctgtcccactacctgtcctggccaccgcaggccccaccgccggccaggtgcactctcagctgatcctcagcacccccattcttgtgtgctgaggagcacagcagagtgaggccctgtgcctgcctgtattcatgtccagttccttcttagtgctggtgctcagagttctttcccgccaggcaggaggattgaggtcgtcagcctggcaggactgcaggtcgcagtgtcggagaccacctggcctttgcccacgccggtcccttcaggtgcaggcagccttggtgccttccccaggcccacaggcagggcgcccagcctccaggacatgcaagaaacagaacagacacaagaaaaagacaaatctgacacaggattttgaaaagcaggtcagaaaaacaatgcgaaggaatggggccaattacataaagacttggtttttttttttttttttttttttttttttttttttttgagacggagtctcgctctgtctcccaggctggagtgcagtggcgcgatctctgctcactgcaaactccgcctcccgggttcctgccattctcctgcctcagcctcccaagtagctgggactgcaggtgcccgctaccgcgcctggctaatttttttgtattttttagtagagatggggtttcaccgtgttaaccaggatggtttcaatctcctgacctcgtgatccacccgcctcagcctcccaaagtgctgggattacaggcgtgaaccaccgcgcccggccaagactttgtttttaagtataattattttttgcagctttattgaggtattgctgagaaaacctgtgtatatttcaggcatgtggcttggtgatgcagtgtttgtacccactgtgaagtcaccaccacagtcatacgcacgaacacatctctcacctcacatgcctgtcattttgttccctttttctttttttccttgagaatgttaagaacacctaagatctgtgttcttggcagatttcaagtgtactattagtatggagagctgcagctaccatgtcattactgcccagagctcattcatcccgtaactgaagctggtgcccttggccactctctccccgcttccccacccgccccacacctgcccttctctctgtttctgtgagtttggcttctttaggtcccacatgcgtcatgcagggtttttctctctatctggtgcctttcactcagcataatgtgctccaggtctgtccatcttggtgaaatggcaggatttccttcttttttgtggctgaataaaattccatggcatatagacactgtatttttgtacccgaactcaggtctcggccactcattgcttgaaagccaaaatccaagagatgagctttggtgaaaggaaagttagctttattaaggaagccagcaacctctgggtggtagacttgttttcaaagatcacctcccctggagttgtgactccagatcaggggtttttaagggaaattaagggagatgattaaagcacccttgtgaaacctgcagagtctcagatgggcagttaatccttgctttcttggtcaatgccttgtggccttctgcaggcaccatcagcctattcttaggctggccagcccattcccagagctgttggttcccagagctgttgagtcccagagtgagttgttggttctcagagttgttggttggtgtattttcttttatttctgttgaaggtcctgttttcccaaggcatttttaataatctgcagactcaagcaaagcaataattgtgttcaagtaaacaagcttttctctaacttggagtcagtactgttccattttctcaatccatccgtctgtggatggacacgtggtttccatgccttggctatagtgaagcatgctgcagtgaacttgggagtgccggtgtcactttgagatactggttttatttcctttggctattgtggaggctaaagcaactccatcttggatactaataggccttgttaacatctgattaaccccatttctggggatgcctctaagatttctacctcacttattgttccttgtgtaagagcaggtacttaaccacatactctgcccttgggcaggttcacggggcattcttatcttttcctgccgggtctgtcctacacatatgtcccctgtggtgcagaaaccctgggtctgggggccatggcatgggatccactgcctcatctcactgctgcctaagacacagacctgcctccctgtccataagtcgctgttagatgcttccttctgagaagcggggtctgtcatcctctttctgcagcctctcagcttcctcacatcggaggcagttttacataggcctgctcaccatggaacaggtgtaaacccacaagcaggattgcaaaatcatggtggttctgaaataggaaaggttcccttgtccccctcacagggcattcaacagggcactgaagccagccactgaagccacggctggcttcagtgccctgctgcccaaacctcctaggggagcatacagacaggcaggctatgggtctccaaccccacgacagcatctaggggtggatgtttactgctcctggagccccagtgggtgtgtgctaccatgtgctcttttagtttagccatctgtaggtggcttgtgttaaccagctcaattagactctctaccctgttgcaaggacagagggctttctgtatcctgggattcttgccttggtgtaccagaagaatcagattgcacatgggcttggaaaataagtgcaaggttttattgagtggaagtagctctcagcagatggggaagcccgaagggagatggttttcccctggagttgggccactcagtggcctgggctctcctccaactgccccagccaaactctgcatcattctgccagttggtggcctacagccgtgctggtgcctgtgtgcattcctcttgacatccagctgcccttgtgtccctttactgatgtgctcctcttgaggtctggccacctgtgtgtctgcctgctagggtctcagggtgtttataggcacaggatgggggtgtggcaggccagggtggtcttgggaagtgcatttgggcaggaaaacaaaaatgcctgtctttaccttcctccatctgtccatccgtaagggtggagccctagccagggaccacgccctcctctacccagcatttcccttcccctcttccatatcatttaaagggaccacgcccttccctttccagcacttccaaaacggttcctccttgattttttgaggagcctccatgctgttttcctcagtggctgtatagagatttttaaagtgtgtgcacccatgtcattgtgtgcttggcaggtcacctcacggcactgtgatcagagctggtggcctgccctgctccttcaggaggcacaggagcattgcaggcctttgaggggaacactgaggaaatgagggggtcacaggaaattgagaggactaaaaccaggacctgtgagagggaatcaaaagtgttttgcctggagaggaaagctgaccaagactgcctaaaataactgatggctgtcacttgagacctttttctttagaacgctaaactaggtcctttagttgtataaaccaaaagtaaaatcctaagcaccccagccaactgaatggatcccatcttggccaaggggattccaaagtaatcctgaaaaactagttcagaccatgaaaagaaggagggggtcagacatgcctcattatgccctcctcctcctgaaggttggaataggaaacacttgccatctgtcatctctaagtgcggccacctataagacctaatcttcataacaaccttggcctccccttatctccagcccagacactcctttcagttgattccaggtttttatttatttactttttgagacaggatcttactccgtcacttgggctggagtgcagtggcgcgatcacagctcattccagcctccaactcctgggcttaagtgatcctcccacctcagcctcccatgtagctggaccacaggcatgcattaccatgtctggctagttttgttttcttttttttctttttttcttttatttgagatggagtctcgctctgtcacccaggcaggaatgcagtggcgtgatctcggctcactgcaacatctgccttccgggttcaatcaattctcccacctcagcctcctgagtagctgggataacaggtgcacaccaccatgcccagctaatttttgaatttttaatagagacagggttttgccatgttggccgggctggtcttgaactcctgggcctcaagtaatccacctcggcctcctgaagtgctgggattataggcgtgagccaccatacccagcctagtttttttatttttttgtagagatggagtctcactttgtgcccatgctgggagtccaggtttttagataataactcttaactaaaggtgacaggaatgcacccacaggcactggctcacctgcaggccaccaaccagcagaatgacgtggagtttgtctgggacaattggaggagaacctgggccactgagtggcccaacgccagggggccacttttaaccaattgccatcttttaaccaatcttttaaccaattgccaatcagaaaatctttgaatctacctgtaacatgtaagcatctgctttgcgttgtcctgtctttccagactgaaccaatgcattgattgatgtcttatgtcccactaaaacatataaacccaagctgtaacccaactaccttgggcacatgttcgcaggacctcctgaggctgtgtcactggtcatggtcctcacatttggctcagaataaatctcttaaaatatattacagagtgtggctttttaaatcaacagtggtaaagtaataggaaagaaaatttggcttaataaaagcaacacttctgactatatacagttgttgaaagcctagtaagttgtcacatgagcagtgcgtctctcatctcttttggattgtgtaacgcgactcacattggaccccagcccagaggaccttcagtcccctttcagttttgagattcctaggtatgagtatgatttttcttctttctttgtcaatatcagtttcctttaagatctaatttgcaaattagtcacctttaagaaaatcccctgtgcgtgaccaggtgccactttgatacacagaatatttctggacccggccccggccatttagatcaggctcctgcctgtccttctgcctgctcagaagcatcctaccatcctcagcagtgccccgatggtggtggctctgcccacgtgtatttccagcaaacagttagggtgctgcctgtctgaaatggggtagatcttggaggggatgtcccaatcatgtggagaggctggcgagggacttttgcctggggtcctggggattgcacctcccatggcgtgttgctgcccaacagcagctctaggtgtctgcttaggccaagttaccgtgcacagcacccagggctgagcgtcctggtcctgccatgccccactgtttctggctgtgctcagggacgtttctcccttggcagtgcttcccatgggttgaggtgggagcaggcctcctgccagggagcccaagaggcagggaagcaggttgttcacctcgatctcactttttccaggttagagactgtgagtcaggggaactttctccagatgagggacgtctcagatgtggaagttcaattcccttagtctctctaggaattgttcctttctctgtggctccaggggccatcccattctcacatttgagttctgggatattgctggtgctgtgcctttgtttctggttttcagctgaaggagtggagccagcttgtgtctatggcatgattttggaaccagaagtctccacgttcatccctagagcttcactatagggctaggagtcatcactgtaaaagaaaacctaaagtcatcactgtaaaagaaaacgtgtgagtgtggctcttggcaactaaaacagaccatcttgggtgcagccagcacagggcaccattttgacatttcacatccatctactgcatcaaaaatcttacagtcacttagagataagtcagggcaaggaagccacggagtgctcactcatctaccttcatcaaaatcccaaacgccagtcagcaaactgtgcaccttttgttttaatttggataatgatacataatcttgactaagaatggcctataagaaatgcaggatgtgtactgtaaactcttgctgaggtcatataatgtcttcccattgatgtatgggatactgaagccaacggcaggtctagtaactgcagttattttaaagcaggggttaatgtgatatattgagatctgcaataactaatgtgatgagacttctgttggtgacagtcaaaggttcaactaatactgaagctgtctacagtcaggatggaaggaaatgccacattcaactggaagttagtgaaagtagccatgattttccccatgtaatcttgctaataattctaataggctggcccatggcagttagcttaggtgcagtgccacaaccatggcagccattccttcaaataagcccctccttctctccccccagcatacccactgattctgttctctggagaacctgactgacgcagtcaccctgctgggcagcatggggaaagaaacaaatgagctcagggtgctccaggaacagcctggacgtttctggatctgccccaagggaagcccttagctcctgtagctgcaggacagagctttgtgaaaacagaatctggagtctcctgctgcagatggctgaattctaactgtgcatggcatctgctgtgacattgagggcatgaccgagaaggaatgggaccctgagaaccccagtgtagacgcatggctgcagtctgcagaagctggggacgctgagtccctgaaggccacagaaacttcctggccagtagaggtagcccttcctcccagtctagggagattcatcctgcaagacgtgccgggttctcctcagcttctgtccccacacctgtagatgctcaactagactccaatcccagcagaggctgaaagacagggtgcagagtgtactctgaggaggaggtgcagtcggcaccaacaggaatctggagcatgcggacgagagtgggtgttgagagtgtgggtggtggggaagcatctaatgctgagtctggctgaggctgggggaaggggcctgctaggcagagcttcagttgtcacgtgtgcctgctacagtatggacagcgcagacgtagaacattccatcactgcagaaaggtctgttagatagctccctagacagtaagtacaggtttcattttgaatcaagatgacccagatcaaggcagcagggtgtgggcagagtgatattctaggcagaaggtgtgcatttttgctgtctttttgctggttggctttgcatctagatgaatgttctcactgctggcccccagctttctcttctcacactggagataaaagtccctgtgcctcctgcttcatggagtgcttgtggaaatgaagtagagtaaaatggcaacatgctttacaaaggttaaaaccgttttccaaaaaaaaaggtattactccttaaaaatgaactgatccagttttccatgttttgtttgctttttcagattgctgacagaactggaatctcctgcttggtggccctttagctccaagctttggaagacaccaccggaaacaaagcccagggaagatgtctccatgaccagttgtgaaccctttgggaaagaagggatactgataaaaattcctgctgttatttcccacagaacagagtctcacgttaaaccagggaggctcaccgtccttgtgtctgggttggaaatacatgactccagttctttgctcatgcacaggtttgaaagagaagacgtggacgacatcaaggtccactcaccttacgaaattagcatccgccagcggtttattggaaagccagacatggcctatcgtttgatatctgccaagatgccagaggttatccccattttagaagtgcagttcagcaagaagatggagctgttagaagatgcattggtgctcagaagcgcaagaacctcttcccccgcagagaagagctgctcagtctggcatgcaggttagtgaccgacaaggcagtgagcgcgtgcacagacttctaaaattacaggcagactcagcacgcctgtgggaaatgcctaacagatgcgtcacctagagcagctgctggcctccagcttgctagagacagctcgtttgtttatacataaaaacaattccagaccattttccttgtacttgacatctgtgaatctgaaatcactgagagttaactgtacacttgataggtgcgtgaattccaaagcggttggtaccatgctttggatacagtttatcctcaccaaagctcatgtggaaatttggtcgccagtgtggcagggctgggaggtgtttggtcacaaggactctgccctctgggtggctcagtgatgttctcatggtagtgagtgagtgctccctctgggaagcctggatgaattctgggaatgcattagttcccaagagtgggttgttaggaggcaggatgcccctctgattctgtctctttgcctgtgtccgcttcccccttgagtgtctctgccacaacacgagagcccttggtggaagccagggcatgcccttggacttcccagcccacagaactgtcagttgactaaaggtctgttcttcgtaaattacccagtctcaggtgctcagttatggtgatgcagaacctgctacgacacagaaagggctttcagaatgagtgcatcagagcaaaaggaagctcctgctgttgtctctgtcatctcccctcattttgatgtgggaaccagcacctcaggattgttactggcaccatctccacttcccctggtggggccattcccatcacccctactttgcccactcttgtttccctgggcatttaatctaggttttcctagcctggcgcccaaacatgctattagggatctgtgtgttggagaactgtgcagcgtggttctgtgtgtttgtggcattctcagatgtgtgtggagtggccatggtaccttcccgcagactccattgtagattgtgaatgctcagctggcctgtcctgggggccgggctgaggggcagacaccctgggtcttggcacgtccaccacgtttggcctacctcctccctagcacaggaccgaggcttatgtgctaggagccgccatggtcctgcccgtctgatgggaggctggtggcctcttggtgttattcttgcctttaccctttccttggttaggaggtggggcctctgatgcgttgtatttgttttggccctgcaggttttgctctatggatggcctgttctgttttcttctttcctcatgtgctttcttcccccacagatgtgcacgactttcctactatcctagtccatcagccttggctggctttagaggctatagccacttcctctagagtctcttcctcccttacagaaatcttttatcttgccatggtaaaatccaccgattttcccctgcagtttgtcttcgagctctgattaagaaatctgaatgtcataaaagactccattttctaatattagcattatagctaatacgcatgcatgtatacatatgtacacatgtgtatcaatgcctatgtattgtgcatgtatgtgacatgtacgtccacactataatgcgtgtctatacgtacagcatgtaaagctgtattcttcaggattttaaatgccaggtgtctgttaaaagtaagagatatttgctaccctttcggtttctctaatttttctcttaagagaaagatttcagttcctataacctgtttctctaacatgaaaatgttttgcttgctattccagatggcttcaagtttcggaaagaaatacacataataatagattgagtcccatgagccccagggctgaatacacaccctaaaaatgaaaggtgcacaccttagatatgcagcacgtagttgaatcacagaaaacctaccacctttctgtatatgtcttaaagtcaggggttgcaaagagaggcattgacccctatggaatggagcatgtggtgtgaaatgtaatgaaatccattgatcaagatgagatcaaaggtcaccatgagctgctgtcactaaagtgcaggcctgaacccgagtgtcctagtgggagacaggctacagaagcataggaagcagaggtcttcacccacattcaaggtaaatggtacaggcgtactcctgcacgtggcttcagggaggaggtatgtgacgtgctgtggactggtggtgtggggactgaagaggggtccctgggtatgtgtggcgtcaggcaggaagtttgtgacattctgtggagttcaggactgctctccagggtcccagtagagaagcactcagtgtgtttagtggccctgccatgttgccgacctggctgcaccgtggtggcgagcactcctgtgttccgcaggctggtgtttgtaagtgggttcctgcaatctgtgccgtttgaggtcagagggctatcaccttttctgggggcctcaacgtgcattcaggattcaggactgatggcgtcaccctccctgctcggctaggagggcccccttagttcaggtcacctgagtgtgggttgtagccacagcgagcaccgtcttttcacttgcacagctgcacccggcccgtggtgttttgagtacctggggcagccatcttgccatgtggcacacacagcacacagtcccacagggacctgctgcatgtgtgagatggactgttgctcctgtgggggactgttgtgccacctttccgtgctcactttcacccccatgggcaacctggcctgtccaggtaagtgctggtctcatgggggcagctgtgcctccagagggtgttcttgaagaggctccatgcaggggttggagcgtgtggtgccctgcctggtgctatgttagcaagaaggcggcgccccgtttgatgggagctcagtagtctgtggggcacttgtggctctgaggccttgcctctgcctgccgcctgctgctgttgtccatgcgtaggcacagggactctgtgccagcttccctgtgtttactgctctcagctggaaactgtgggctccctggaggtggaaaccatgacggatgtctcagaaatccctgcctctgggacgagcgctggtgcacgtgtggccacagggtggcagcctcgcgacaccggatgggcgcttgtcagggagggacacccggggcggggagcctttccagagacctctgcagggctgcgtgccaagtgcacgttttattttattctagacactcgtccttgcgttgaggagcacccaggaccgcacaatcaccctcctcacatgtctctgggccctgtggcttctgacagccttctggaggctgggccagggcttgcacagcagcctctgtctcagattttcttgcagtcggcctgggctgtggtttgggaggaaggccacagggtgaggtttccttcccacacatcctaccaagggacatgcacagtattttctttttctttttatttatttttttcttttagagacagggccttgccctgtcatccaggctggagtgcagaggtgcaatcatagctcactgtaacttcaatctcctgggcccaagacatcctcctgccttggcctctcaagtagctgggactataggcacatatcaccatgcccagctaattttttttttttttaattatggggtcttgccgtgttgcctaggctggtcttgaactcctgggctcaagtgatcctctcacctcagcctcccagagtgctgggatttcaggcgtgagcctctaccctgctgtgcacagcgtatttgaaggctgtttgatcactgagatttttctttgtcactcactgcctgtcttgggggtaaggcctgcctgggcttccagctccctgatgacagccttgcctgtacctctgcttccccgggccgtgtgtctgtctgcacagcagcaccagcagcaggacagggcaggaggcaggcggatgcagtgggcagttagtaaaggaccagagcattggggtggctgaggttgtctctgcagttcgttagtgccaggcgtcttttgaggcagggaagttcccactggagctgaagcacccaggagcctgctgtggcaccgcgggctcgggttgggctgactggggagcctgggggtactgcatcagctggcctggagcctatcagaggatgccgctcagcccccacctgcgcgtgcgtattggttgagtgggagatggagcacacaagctgctgtctcctccattcagctccctacgctgtccttacctgtgcgctagcttcacaggcccactaggcccagcagaggcctttcctgggtgacaggtgagtgttggaggccagggctgagggaaggggcttgctggagacagacaggctggtggcccaggtccccgctcccaggcaggtgcaggcagcccctcctcagcactggcagtgaagacagagctgtgtcttgcacaggggcctgtggcctcagggcactctctttccagatgaccaagacattctgcagccagcagtgtgccctgggctcttcctgggctggcttcctgcacccccaggccagcaaggctgtgcataggtgtctggaacacttcctactcccggacagtcgagtcaccccacccttcttgctgtgaaccacctgtgatgcttttgtttaattgcagtcactcatgaccccaaggcagaaaccatccttacagaaccaaattaagctttcctggaagaaatgttaaaaagagtgactcagcagctccacgagcactgtggctctggagatggcagcatgcagcctcaccaggatcccagccaccgcgcccagcagaaacatccatggcttgaggcgtaagaattctgtccagccttctgagtgtttaagcaaagtcctatttgttaaaattccagaacggcctgagtgtctctgtcacgcagcctcaggtgctgaaatgaaagccatgtcgtaggtagggaggcccaggggctctgccctgaagagcctgtgtcggctgggcacggtggttcatgcctgcagcccagcactttgggaagccaatgtgggaggatcacttgggtgcaggaggacgagaccagcctgggtaacatattaagacccccgtctctataaaaaaatacaaaaattaagccaggcgcggtggctcacacctgcaatcccagcagttggggaggcagaggcgggcgaatcacgaggtcaggagttcaagaccagcctgaccgatatggtgaagccccatgttactaaaaataaaaaaaattagccgggtgtggtggtgtgcacctgtactcccagctgctcgggaggctgaggcaggagaatcccttgaacctgggaggcggaggttgtggtgagccgcgatcacaccactgcactccagcctgggcgacagagcaagactctgtctcaaaacaaacaaaaacacaaaaattagcaggtcgtagtgctgcatgcctgtgttctcagctactcgggaggctgaagcaagaggatcactcgagccaggagtttgagaccaacctaggtgacatgctatctctacaaaataaatagttgttgttttttaaagcccacattgtagccaaggaattgcagcttgagaagatgctgaggaaagcacacagtccttcagctcccaacacccagcaagtcaaagggcaccagcacatagcaggcttatagaccatcacacagcacattgcagacagcacactgcagaccagactacgagagccttgggcagggcggggtggggtatggggctcttggaggaaggaggcactggtgcagcgcaggctgggcagtttgtgcccctccattcctgtggcctaggctgtgctggtgctgcgaggtggacgggggccaccctgtgatctcaggtcaccagaggcacacatcctctgagtttgtggctgtgtcttccagcctagcttggcctgtgcactgtggctcagtgtttcagagaagggctcctcagtgagcagcttcatgtgagggcctgcaggctcctatgggtaatgcacaaattcagagaagcacagtagtgggccgcagcttcccagagagcacccacatacagcttgggtgttgcaaacctaggttgtgaaattgttgttggttgtaaccagagtttgtttctgaagagtgggataggaaaacagcccactgggcaatctgtcccgctggtgctatctgtgaagggagccccttacttcccacctgagtctcaccccacttccccacttgcactcgcacccatctgctgggcctggagctgctccctctttagggccatccctgtgctcagtcccctgtggccctgggcaaggctggtccttctctgctcagccgggtgctgtcagggagggtgagcttgtcaggatcatttgggggttgataggctggcgggggtggcatcttggaggtggcatctctcctgtggagggtggggttggaaggtgagcttgtcaagatcatttagggagtgataggctagagggggtatgcccttggccccagcaagagtgcacccccaggtatcccccctttcctctccttttctgatgtcacgctcagccactgctcccgggctgcatccatcaggattgaggagggtacgggctctgctggctgaggtaggaacctgggagggatgctgaggccacccacctgcctgcctgccccatcaggagctggcactgcagctgcactctccctgcctgtttcctgacatcctcgtaaatgacggctgcaccagacgtaggggagctgcgtgtgctgcagaagagcaaacaacattgcgcccttatctgggccccggggtgtcaaggctgctgttgaagctgctctgtaaataaagggcaggtggcctctgcaggaggcacactgggccaccttctgcggagcgagactgcctctggcaggtggcttggagccctgaggctcaccacagggtggaaacacccaggtcctctctgagcctgaccacgggcagctctgactcacctcccacctcggtggcgcagacgtgtggcagtgcttggcctgggctgtgggccacttcctgtgctctccagaacctcagccttctgcagagtagctcagatgtcgctgcagttccccagtcgtgtgtgatgtgcatttcaccagagttcaatgattcttgtgttttttactccaaatcttcagcctttctcaaaaataaaataaaataaaaccacttgggatgtagggcttttactctgagaggtacagagtggccaccgtctgtttgcagtgttgcagaccctaatccttcggggccgggtggcaaggcaaggctcacagaggtcgagagaggaagcagtcctgcgtgtggtggcgggaggaacaccgcctcaaagaccacgctctgccatccagagcacacgagggttgttgcaactccgagagatgtcactgctgaccatctgctctccttgcagcatctgggctgatgggccgtaccctgcaccgtgagccacccgcaggagaccaggagggcacagcactgcacctgcagacaagcctgccagccctttctgaggcagatacccaggaactaacccaggtaagatgtccccagtgccatgccagccagcgctgtgtcccagtcttcccgcaggctgctcctcttgcctttctgatcacaaacaagctctgggtcatccatccgtattggcctcgcaccaaggaggagctgctggcctccactcggcagctgcagggagggaggaagggcagtgtccgtcccaggtccacacacttcctggaacacaacatgcaccacattcagacacattcctatgcacacacagctgccctggctaccacctgcacccattgtacatgtccgtgtgtgtgtgtgcacaggtgtgtatgtttaccgtgcatgtacatgtgcatgctgtgtgtagtgtgcatgtactgtacacattgtgcatttgtgtgtagtatgtgtgctatgtgtacatatgttatgcatgtacttgtactgtgtatgtgcatgtgcatgtgtgtgtacttgtgagtacatgtgtgtgttgtgtgtgttgtgtgtgtatgcacatgtgtgtgctgtgcatgtggtgtatgtgttgcatgtactatgcatgtatatgtgctgtatgtgtaccttgtgtgtactgtgcatgggcatgtgtatatgtgcatgtcttgtgtgtggagcgtgcatgtactgtacatgtatgtgtactctgtgtgtg

SEQ ID NO: 777 - DNA, 3828 bp, Homo sapiens
  source 1..3828: mol_type = other DNA
atctttccgtcccgggcagccagcgccagtcggagccagcgcgagccgccgccgccatcactgccgctgccaagtcctccacccgctgcccccgccatgtgagtcggccgcccgccaccctcaccgcgcttccctgcgccggccgccgcccttggcaaccggccgtcgggagtgcccggggtctctcctgcgttccccgcgccccggggccaggcccaagccggtgactgcgcgcgggcggccgaggagccccgcgtcccgggctggccggctcgggcgatggccgcgggaaggagcggacccagtgtcctcctgcccctccccgcccctgtcaccgcggccgcctgtcttttcgggtcgacccggatcgcatctgtgaggtcgccctcagttgacaggcggggaaactgaggccgggggggcctcgctcaaggtcacgcagctcatcggcggcagggctggaccgagaccagggcttacatcgggtggccttcctcccgaaaaggaggactggagggacgaggatggacaggtggatgggcggagccctggctgcggggccgggaggctgcaggccctgggtcttaatccgtccctgctcctcaggtctgctaccgctgccacggccccccctgctgccccggctggggagggtggtccccctgcaccccctccaaacctcaccagtaacaggagactgcagcagacccaggcccaggtggatgaggtgagtgtggggggagtcaaaagcagtaggagggaccctgggggttggcgtataggtgtaggggcccatgttggtttgggagtgatgacagttcacgcctgtgggtttgcggacaaagataccatgccccatccctgtctccctgtcagcacgcacttggaagggcgctgggggtgttaatcagctttgctagcctggggtgtgccagcctgggcaggtgtgctctggtgatggacagagcgcctgaggttccatagagggagggtgttgctatgacatctgagatgtcaccagcatgcccctgatgtgtgctccttgcatgtccccaggtgtgctaggcatgttctgtgtgtccttggcatgttaacctggcagtatcagggtgcatgttccatgtgtggcacggtgggcacatgtttgaggattgccctcactgaggtgggccttggcacacccccctgcctcgtgggcccttctcccaggtggtggacatcatgagggtgaacgtggacaaggtcctggagcgagaccagaagctgtcggagctggacgaccgtgcagatgcactccaggcgggggcctcccagtttgaaacaagcgcagccaagctcaagcgcaaatactggtggaaaaacctcaaggtaagggtggggacaggaaggaggacaggtgggtgaatggggtatcatagtttgtcttactgatcctcgcctctcacccccagatgatgatcatcttgggagtgatttgcgccatcatcctcatcatcatcataggtgagtagggtgagaatggccggggccctttccctggagaggtttccccagtggattctaggttttgaaggtcattaatctagtttttactcttcagccaaaaacacatatagctgctaatggcaattctgattcatctagagccaaaaactttgatgttatttagcctgcattttgcctagttcttggcagtcttgttaacatttggaaataggaaagctggtgtatccattgaggaccctttaggcctaagagcccagtctgagaaccctggaattgaggagtgggagaaaggaaaggaccaggggcttgagacatgaccaggaagccaaccaccccattatttgagagcttgcggtctcagaggctcagaggattagggtctgtggcttcaaggccataccatggagcggaagggacctcagaacctacctgtctagccccttgctttgtagatggaaaaactgagtccaagagagggtgtcagccagctggggagtggggaggattggagcagggccaggcctgacacactgctttcttgttctctctctttctctcccctctccctcttcctcatcttcttcccctctctccacagtttacttcagcacttaaatccccgaggagtctgccctgcctagagaagggcctctcccccaaccctcagccgttcctccacctctcagccatatctttcagcccccactcccctggatccgtgtgtgtgtgtgtccgtgtgtgtgtccccctgtaaatagccagctgttatttatacatatataatattatatatatttggtctgtttgtagttttattactagatgatttttccggttgtccttaacaccccttcctgaggttcccttcacccctctctcttgccttccttccctttccctttcttcctgactagccccaagtcccttcatttgcatctgctatgcaatagtccctctcctttccttcttcttccctcagatttagctgatccttcctcccaccctggccttcctttcctctttcctcctcactctccccgtcatgctccctctgccccgccctcaaaaaaaaaaaaaaaaaaaaaaaaacaacagcacctgtccaggcttccttaggtacatcttctttgtatccattgggaggctctgagactggccccacttggtcctaagaatcccaaggtctttgggagcgtccagcatgttaattagcgtatcattacatactgctatccctttccatttctttttgttccatcactcttctctcaacctgtgtttctttttttactgaggagttagtccccattagttcttgtatcacattttcatttgcacgacattactcgcaggtggtggggagcctgggcttttggggaaccaggctgctctggtccccagcattgcctcctcctagcccctctagtccagtttgcctcccttaccctcattttccaaacctcttgtaccctcctctccctcccccagctggtatgtaagtgtcttgaagttcagtatgttatgatggaccaataattctgccacttcgggtttctccctacattcctgctccccagttttcatgtggggtactcaactgacattcccatggggtttccctcccatctgcctgatccacctcctcctcccaccaggagagttgggggttggccacaattgatctcttgtgagaggggtggctaccagtgtgtgtgtgggggtcatcactgccttggggaggagtggggcagggcagagaatccccccaattcctgcctgaaatctctggcctcacccctgctgggggttggactgaaaaccctcctccccaatttggggggtgttgccccatcactgcccagctcctctgactgccccccctgaatttagggtgggggtactagtcactgccaatgtgtgtatgggacttgctggaaaacggggatgcttgcccctctccaggactattgagcccagagagagctgtcctctcattgggtgaactgattgaggaagggtctattgtctttttaaatggcacaattttaagggtttgagggtacagtcccttaacctgccacgggagggggcccccaaactttcttccccccacacttctggttttctgtgtggagggggagcagggatatctaagctgtggtgtgaaagggtaggagagatgctggaggtgggggtgctgtgttttagaccccccatattatcccagtgtcccctgcccccctcttcccccaccccatgcccccaattctgtggcgcatccagattgtgaaaatgtacaataaatgtgtaatgagtaaccag

SEQ ID NO: 778 - DNA, 32742 bp, Homo sapiens
  source 1..32742: mol_type = other DNA
ggaggagggagagcacaggctttgaccgatagtaacctctgcgctcggtgcagccgaatctataaaaggaactagtcccggcaaaaaccccgtaattgcgagcgagagtgagtggggccgggacccgcagagccgagccgacccttctctcccgggctgcggcagggcagggcggggagctccgcgcaccaacagagccggttctcagggcgctttgctccttgttttttccccggttctgttttctccccttctccggaaggcttgtcaaggggtaggagaaagagacgcaaacacaaaagtggaaaacaggtaagaggctctccagtgacttacttgggcgttattgttttgtttcgaggccaaggaggcttcgggaagtgctcggtttcggggactttgatccggagccccacatccccaccacttgcaactcagatgggaccggaggcggtgttaaatggggagacgatgtcctagtacgagctctggtgaccccaggactctgcgctgctgcgcttggggcttgcccgacggtggagaccggggagcatctctgggcgtggagacccgggcgcagtaccccgggctcagaggggtcgggggttcccgggcgtgctgagggcgctgctgccgggtggggagagctgcaggtccggcaccgagcgctgctttgttcggagggccctgagctggctagaaacccttctggttgcaggtcggccagtacctacggagacaaatgccagcactgagtcttcactcggttcttaagaagctggtctgttctgacctgggaattggctatatgctccccgggactggagcggcacagtcccggactgtgaatccgggaactcgagttggaggtgtcccaaacggtccgtggtgctattgctcactagaggccttgggtctttgtttgacctgaggggtagggaggtcctgcctacagtctccgtgcgctcagctgagctggtgtccctggcgcagagcgcggacgagttttgtttccttttctttttcttttttttctttcctttaagtctcggtctgtcgcccaggctggagtgcaatggaacgatctccgctcactgcaacctccgcctcccgggttcaagcgattctcctgcctcagcctcctgagtagctgggattacaggcgcgtcaccacatccagctaatttttgtatttttagtagagacggggtttcaacttgttggccaggctggtctcgaaccctcgacctcaggtgatccaccggcctcggcctccccaagtgctgggattataggcgtgagccaccgcgcgcggccgagttttgtttcttttaaaaacaagacttaggagagcctgcggagacccggaggtggggtgcccaatcctccctctcccacgttccctgcagccccatcttccagaccgttgctgctggtctctcggggcagcttctgcctgggcgcagatggggaagctgggccgaggtggtgccgtggaatgaccgggagtaaccccggcgggcggcgcagaactcggagctccgccgcggggctgggctgggctctgccgtgagggtgggggtgctgggcgcgcgggctgcggtggcccccggagactggcccgcagcgcctcctggccggaggacctaggaatcggccggctctactaggtgtctttgctcgcggttccgactgtgaatccggtgaagaccggtggttgcagacggggaggaactatgaggttgaggcgaaagcccgttttgtttttttttttttgtttttttggtttttttttttgttagcgtgtttgccaactcccaggccattggtaaagcaggaaggttcttggggcggcggacggtgccagggttatgtgtaggtgcctctttaggtatatcttttatcaaaaagaagcaaagaaataagattaaaaataaacaaagaaaaaagttgtctggcactggcagtaattggcctgcctttgcagcactgataccattagcttttaaaatccgacttttcattgacacttcaagaagagaatgggtagtatatacacattcatctcatagtggacaaatttcatatttaaaaaaaccttctgggtactgaaatcagcaagtcacttgccctccatggccgaatccctgcttcccacgaagagaacctcacaaaaatttcccccaagttaaagagtggaattttcttgatttttttttcttttttttttaacggccgtagtttagaacccagacttaaattatgatcttcttttcaaacaaaacttaaagtccttaagttttcatctccccttttatttcaacctattcttctcatacctaccacaaaaataatggaggctttctgttgagaaactttccgtttctgttgagagtatcattctcttgagaaactttctcctaaatcagagaaagtatggaagcatggaaagtattcctgagtagaacctctacagatattacaatatttttcaaatacaaagtttccattgtcagcctgtttcccaagtgcttccacaaaccattaaataattccacaaaccattaaaataattaatgctagggaattttaggaaaacattggtttacaatcagaaggaccggggaagtgggtcttcagccttcacgatgactacaagccatttaagggactagaattgctactgttgtcagagcaatttaggagtctgtatttgagcacccgcatagtgttccagaatgacatatctgactgtaacctggacacgtgtgatatgttgtctcccctgcagatgagcatttgaaatctcaaccctcgtatttctacgagtgcaggcctataatggaccctgggcacattttttttttttttgagatgcagtctcgctctgtttcccaggctggagtgcagtggcacgatatggctcactgcaacctccacctcctgggttcaagagattctcctgcctcagcctcctgagtagctgggactataggcgcacgccaccatgcctggctagtttttgcattttcagtagagacagagtttcaccatgttggccaggatggtctcgatttcctgacctcttgatccacccgcctcggcctcccaaagtgctgggattacaggcgtgaggcaccgcgcccgacccctggacacattttgacttagaacatattttcggtttgtgtgagacagtgcattagtgcaggattggaaaagagtgatcaggaattgattgttttcaaggattggttccttctgctcaaggaagtcccattgtaaacataaaaaaatgaatgaaactgaagaagttcagtgacttagctttttattatcttctgtagtacttacctttttggagaggagttggttgggatatttttccatttaaattttttttttaaagggatcttctctcccgtaagccgggatacttaagctatatatgtagtggctacaaattaaggtcttcactgttttcatttttagctgctagaataagtgaacattaccttagatagactcttctaattatgaagatatctagatgtctagaaaatatcaaaatgcatgtggtttttgcatttctaaaatacttttaaaaccaaatactttttcttttttttttttttctgagatggagtcttgctcttttgcctaggctggagcgcagtagaatgatcttggctcactgcaacttccgcctctcaggttcaggtgattctcctgcctcaacctcctgagtagctgggattacaggtgcgtgccaccacacccggctagtttttgtgtttttagtagggacagggtttcaccatgttggccaggctggtctcaagctcctgacctcaagtgatctgccagcctcagcctcccaaagtgctgggattacaggcatgagccaccacacctggcctcaaatacatttttttaagtatccagatattaaataaataataccattatagtagttgttatggtcatttactctagcatcaaatgttaaaagatcattctgaacacttgttttgtttatgctgagagaaggcctactccaaaaaatgcaaccatcttcgtatctgcatgtggatacaaccatgaatggccaaagttattgcagtgttgaatagacacttatatagcactgtgtggcaagtactgtttgaaatgtttttcacgtgtttattcattgtatttattttgagatagggtcttgctctgttgcacagggtggagtgcagctgcacagacaaggctcactgcaacctcagcctcctgcgctcacgtgatcctcatacatcagcctcttaaggagctggggccacaggcacgcaccactgctcctggctaaatttttacaattttttgtaaagacaaggtctcactatcttgctcagactggtcttgaactcctgggctcaagtgatcctcccacatcagcctcccaaagtgctgggattacaggcataagccactgtgcaggtcatcaaatgctaattgaattttcacaacaaaaccatttattgtccctagtttacaagattaagtaaatgagaagctaatttttctctggctatataccttgcaagaggcagagctaagacttgaacccagccagagttctttaactccagcactaacatttcagctgctgcaaccagggagcttttcaaggatgatcaccacattctctacattcatctgctataatccttatcagaatctacagcctgtatcatattttccttgttgctgtgagtgggtcagccaaattctctttaacttgaaaccttggttgcgtagggattgcaacatcctggaaagaatagaataaaatttactcaactcaattttttacttggttcataatgaaaactatactattgcttcagtcagatgtttgcgaatagctgtgtgatctcaaaatgttttcctatgtgatctatagaaaatggaatgatagagtattaggctgtaagggcctaagaaacaaaggaaaaagagaagtgaactgttagtttagttgtaaaacctaactttggtgaattgtaaaaatttgttataatacaatatgattcttgcttgtcctgtccttgatgaagttgtggaccttttgaaataagctatttctctgttactgctgttactgtttagaaatcaaatttagttttttcttaagatatacgtatttttggaagataaacacagtttcaaagtctgccttgttggctgggtgcactggctcattgttgtattcccagcactttgggaggccaaagcaggaggatcacttgaggtcaggagttcaagaccagcctggcaaatatggtgaaaccccgtctctactaacaatacaaaaattagctgggcgtggtggtgggtgcttgtaatcccagctactgggattgggaggctgaagtagaagaattgcttgaacctgggaggcggaggttgcactgagtcgagatcgtgccactttactccaacctgggcgacagagtgagactccgtcttgaaaaaaaatgtctgccttgtaaaagtgaaataggatgagaaagtgcctttcttattaattggtgtaatgaattagaaataaactctttgaagacacctcttggtaaaaatagttacatttactgttgatttatggtatgttggatatgtttttaagttttccgtgtaataactcagttcattctcatgagtgaaataggtgcttttattgtctttatagatgggaaactgaggtataggcaggctaggtacattattatggagttcgtaagtagtggagctgaagtcgcatcccagacagtttggcttccgtgagtttaccaatctcatggtaaagactttgtcagactatcaaagttttgacaaatgaaatattagcaaaaggccaaaagggattctctattttcatttgagtatcttcacctgaaaatagttgcctgaataagtagcctgcatagaaaggtacattttagaaatacttgaggccagagaatgaaaagcttacataaaattgatttccggtggggccttcagttactctccattctacgaagaccacaaatagcattcaggcaaagagcatttattccaacaatggaggagcactggatttggttcctaaaacaaaataaagtttgaaatcctgtctttcccatgttgaaaacaaagttggtacaaaaccctttagcttttgcaaacctcctttaagacccgatttaaatgcttccctcctcatgaagctcttctggatccactccttcccatcactaagttgaaagtaagatccccttctctttacttccattagacttggattacagcactctttgtatcatgtatttaattctgttttttaattacagttaacatttatttgtcttcctcttgagtgtatgcttctctagaggaaggtctttgattcattctcccctggccttaattcatcccacttaatatggaaaaaatttaataaatgctgacttgaataagtccaacaaggagaatgggaagctcatgtttgcttcctgtcttctaaaagactacttaagataacagggtaatcacagaaaagcattagaaatagagttatatgagaaacaactgtagttaaggctaggtttatgttagactgagaaattttagtgcatacttaagttatttaggccaggttactttttgtagaacaaacatttcagtttcgctcagtttcatttccgtttctgaggcagctgtgatttaagaaaatgctctagtctgtggcattccatattcaagtactttgagttgtatattaatttatttttgttaataagagtgacatgactcactaagtaatttagagatttaaacacttttttaaaaaacagtaacttcatatgcattggatctattcttctataaagtcttttcttggggggtgtttgtttaaaattccccggtgttttctctgccaaatccaacttccaagaagcatttggaagtcaaaacattttatctggttagtcttaaagtccagatattttgtgatagctggtatttagtttatgatatttcccaggaagaactttttagtagttgaaccatttatgaaagacttccttgaagctaccttagagagttgatttagttcttctaaataagtaaatagaatattagtattaggacatcttggagtatagatgcaaatattggtgaaaaagaacatggatatcagagtcaaattaatgtagattggaattctggttattactaatggatatctgacattaggcaagttgctgatcactctttgcctcagtttcatcatctgtaaaataggtatttgtgtttgtgtataatgtgaaccgtataatataatgcttggcctatagtgaaatttattcatacgagtgttttcagtgattttaaaagcttgctttaggccgggcgcgatggcttctgcctataattccagcactttgggaggccaaggtgggcggatcatgaggtcaggagttcgagaccagcctgaccagcatggtgaaaccccgtctctactaaaaatacaaaaattagctgggcgtggtggtgcaagcctgtaatcccagctactcaggaggcttaggcagaagaatcgcttgaacccaggaggcagagattgcagtgagccgagatggtgccactgcacagagcgagactccatctcaaaaaaacaaaacaaaacaaaacaaaaatcttgctttatagtttacttccacatcaaattgtctttatcccatgttacttgcattgatatcccagacatgaaaagaaaaaaagatgataacaatgacagttattaaattaggttccactcttattctagatcaccaattcatattactattcagacttggaacattaaattttagttaaactttttttcaaatatgcatataattgtcagtggttactatattttggggaagagattgttgacttctttgaagaaagatacggattttctcttcagaaaaaatacacatgggctcatataatccaaattttatgtgtaattacagggtgttcatgaatgcccacaaatccattaagccatgtgaccttggacaagtcattttacttttctgttttttaggttgttggtctgtaaaatgatactacttgacttttaaagagcccttcaagctcttatgtcctctaaccccaggtctgtattcagaagaaggggtggtcctttaattagagccatctagagatctgaggaacatgctgggcattagtgtaacataccatgtggattttgagaggtaaagaaaaaataaccagggaatgcctcagagcattcctgatcagatcgatgacagaagaaaggaatgagagggaggagaggaagctgttgaaatttcctatttacctgctttgagtgaatgaagatttgaatcatagaaccagaaggggttctcatctgaaatgcaaaggaaggaggagttggtttaattcaataagtttcagttgagtaaacatgatttagtgagatactgttcttgcttctgactcaccatttggaaaatctctctaaaataaaattggactctccatctcggacatcattttgggtgtaggttttgcttttttttttgagatggagtctcgttatgttgcccaggctggagtgcagtggcgcaatctcggctcactgcaacttccgcctcccagattcaagcagttctcctgcctcaacctcctgagtagctgggactacaggcgtatgccaccatgtccggctaatttttgtatttttttaatagagacggggttttactatggtggctaggctggtctttaactcctgaccttgtgatctgcccaccttggcttcccagagtgctgggattacagatgtgagccacagtgcccggcctaagttttacttcttataatggactcctgttaagccaataggtgatgaaaggaaaccataaccaactcttcaggctcattcatccttcaagaatagcatgctagtacccatcctaggaggagaattggactatacctcatgaggatagtttgaagtatctcagaagaccctcactgggggtaggtcggtaagacacaaagctttctaaagcactgtaccaaatttgttgtttgagagatcataacaaattagaagtggaaagaagaaggagtaaaaggaagaagaggtttctggccaggagcagggagggggaaggagctgctaggaagatgtttggttgtcatatccctgttcacccttgctttgcaaaattcttgtaggatgccaggttgggagtaattgtttttcacaagagtcaaaccacgcttgttttcttgaagaagcaagtctttggagggtggtggcttgaaatctgttggatctggtatttaggtgatacactttgacataaaggcaacactgatgcaagcagcagctttccttggaaaggcagggagaaagtgaaggcccagactgatgagcttacactgacctgcagacccttctccattcccaggcatgtttggtggcagagtttaccttagttggggttaggctgttgtctggtactgtgagagagaaggaagaagaagatatgatattaacaacaacaatacatatttatatttgaaaattaaatgcactaatacacctatagtgctattaaacaaatttatttgttcagcaaatgtttgttaaacaccatgtactgtggaaagtactaggtgctggacagaggtcaaaagacttttaagaatctgccaccattaatgatctctttctgcttggcattcaaggctctttgaaataagactgtgacccactttgatagttttgtcctggattataagacacatgctcgaaggaactatagctggttttctcaccagactgattaacatatagtatggtttggtacctgttaaatgagtctctctctacaggttttcatcttctactttaagaaccccttcctggcattgtttggctcctcattgttctggaatctcatgtccatctcatgtatttgccttggttcacacttgatcttctgctcatattcctcacctactgaaattttacccatcaaccagaccgtgggtgatggaacacagcatgggctagttcttcttatatatgatctcatttaattttcactggaactctgagataggtagcatttcagcccactcaagttgactcaaatttttgtaatcatcaatatattttaaaataactttatatttgacctgtaattggaaaaccaatatgagttatcataaatgaaaggtaattttaaaaataattaggatgaagacaaattatttttctcacagtctatgtataagataaactattggttcccaaaggccccagctgacaatgagacttctcttactttgttgaaaagggaattagcaagcattaaagaggtgtcaaaaagaagactaaacaaaagcttactcctttttttttttgagacgagtcttgctctgttgcccaggctggagtgcagtggcaccacctcggctcactgcaacctcttcctcctgggttcaagcgattctcctgcctcagcctccctagtagctgggattacaggtgcatgccaccacacccggctaatttttgtatttttagcagagatggggttcgtcatgttggccaggctggtctccaactcctgacctcaggtgatccacccacctcggcctcccaaagtgctagaatcacaggtgtgagccgccgcacccggccgcttactccttaatgtactaagaatgttatatataggctgaagaagtgctgaaaagaaccatattttctcatgatgtggttcaatgtttaatactgtgcttgttcatctcctaaaatcctctgaatatcacttaaattcatcctgtgtaactctcccacatttggggaaatactgagcttgcctattattatattagccccatatttcagatgatgcacctgagccgaggagaagttaaataacttgttcatggttccatatttggctaatggcagagccagggattcaaactcttgtctctctgactcccaggtttgtgcttttcccacttggctgaatttctcatgctacctcctccataacacctttcctagaacttttaaggaatgcttcccctgttctctcatagcattttaatgtaagttgccaaagtgtcccagtttgcacccctaccagcaatgtgggagaaaatagcaacatatttttgatgttggggtctagtgttacggtttcttctgctctttgggatgtatattccatggctactgaatacccaagtcccaaacagttttcttagactcagaaggtcatccacttcagcttcttcatcaaaaagacatattttctggctgggcacggtggctcacacctgtaatcacagcactttgggaggtggaggcaggagaattgcttgaacccaggaggctgaagttgcagtgagcccagatcgtgccactgccctccagcctgggtgacagagcgaaactctgtgtcaagaaacaaaaaaaaggacttgttttctgttccattacccacagtggtagaatggcgtgctaaatttattctccagctgccattaactgcaaattaaaatcttagtctcttgcctctttaatccaggcttcttcatactataccagaatttaggataactattacagtgccctttataggagagaaagaagaaattgtgtctgtagatgtctgttcctttcagcttaaaatggacactgaaatgttaaatattggactggcctcatttatttctcctgtctgttggtccaatttgaatcttaaggcgtctttcaactggaattttttgtttctctcaactaaaaattgttctttgtaagtttgaatcagaacaaaatcctgaatgttgagggtttcctaaaggctgtttctttatgcaaaagcctgaaacccgatgttgatgttggctgcttaaaattaactgtgaatcaaggcagggtttttatttttattttttttttactttaatgattgtgttaattatagtgaaaaccttgagttcacgagaaagaaagcctttggtcaagtattgtttattaagttgtcagtcttgttgcaggatttgcaaatttagtggaattagtgccatttttcagtttacaattccagtcacatttcacatgatcagagcatggctttcttctctgtggagcaaatagagggctgtctgacacttggttccagtggcttccattaagcagagtggatatgtccctggagtctgcagagaagggcatggcactctgaccccagatggcactccgttttgggacattgtccaattctagttcatagcatatgtgaccaacaccagctctcacctgatgtaaacacttagcgcgttgttgcttgggggattggattgtgtgaatttttcaaaactacagttgacagaaggaggctaccaaaaatgaaacccaataattccatttttgggaattattcccacttttgttccatttttcccactttgttctttggcacacagaatgtttgatttgtgaaaatcttaataacagtagttttttctataaggaacactcagaatcttgataatattggaataatacagatccttttgtaggatcctctcagacctcatataatagagttcatgtagtcaatatttaaagaaaaacacccttaagtttttgtttttcagaatcacaagtaagtggatttaaacttgtgatcttattcccctttcttctcttaatttagtgaggcagccagcgagagggtttgttttggttattctaaagaaggagtttgcttgtaagttttggagggcaagacttagactctgtgtctctgtgcttgccctggaactttgattaaattgtcactaaccgagttagctggccctcgccgggctgcagaaatagaagtgtcttgcacacatgacatatgactgtctcaagagctggctggtgaaaggacgttctggagaaggctgccgatactgtatgaactagaactggacaagagcctggagattggataactcagtttggcgcaagtaaagggaataaaagtgttaaggtggcaaaattgtatccaggtgtttataggctccctgagttcctgacttgagcctatctatgggtttagagttcaaggctctttaccagtgctgacaatcttatactctaggttgaacctccggggaaggtgcccttgcttgatggcatgtttaccaggggttctagagcctcaatcacagattctctctagctcacatgaagttaatgaaaatgaatgtgcttccctacaaattagagaggctttgaggaaaaatcagattaaatgcactcctgcttgaacttatgtttcttagaacacagctggaaattttgtcacacaaacctttactttcagtgacatttcttgactggtttgttactgtagtgaatctgctttaactatcttttcttatcgctgaggttttacttccattctacatgtgattgtggagcgctgcgtcattgtgggttcagtgtagtggagagtaggaagatggtgagacacagtagcttgttgcacattgcttaatttatcagggatcactgatgagttagtacactagagaagattgtaggtagagctgaaaagatggaggaattataaggctcagatttctctctttttttttttttttaagatggagtttcactcttgttgtccaggctggaattcaatggcatgatctcggctcactgcaacctctgcctcccgggttcaagtgagacttgatggtctcacttgatggtttcctggctcagcctcctgagtagctgagattacaggcacccactaccatgcccagctacttttttgtatttttagtggagatggggttttatcatgttgaccaggctggtctcgaacttctgacctcaggtgatcacctgcctcagcctcccaaagtgcagggattacaggcatgagccactgcgtctggccaaggctcagatttctaatagagatttctaatggacatagaggctggaggaaatgggatggacaggaaaactgagtcaggtgccaaaaacttgtagggggccgggtgcggtggctcacgcctgtaatcccagcactttgggaggctgaggcgggtggatcacgaggtcaggagatcgagaccatcctggctaacacggcgaaaccccgtctctactaaaaatacaaaaaattagccgggcgtgttggcaggcggctgtcggtagtcccagctactcgggaggctgaggcaggagaatggcgtgaagccgggaggcggagcttgcagtgagccgagatcgcgccactgcactccagcctgggcgacagagccagactccatctaaataaataaatagataaataaataaaataaaataaaaacttgtagggaggtggcagtgtgctatggaggataggtgcaacctctgtgagaatgtagagaaaatagtataagtgagtggtgaggacccccaagagggggttttatagtaaaacaatggtcagaagtggcaacaggataccgtataatgctttcacctctaccaatgcactgggtactggagagcgctccagtttgctctggaaaggccctttctgtggacaaagaatacagaaaagagattcctttaataaaccacccactctgtgtcccacccttgatgaatacttcactgtgaaattgccagaattaatcatggtaatagctactgtacacttactttgttccaggaactggataaatgttttacatacattatcagttctattttttggagaagatacaggggctcagagtccctagggttccagagctggtgagtagcagagtcaggattcaaacccagctttctctgactctaaaacctcctttcttcctgctgaaacaattaactcaagacaacaaaggagttaaggatttggggagttttctgcatggtagaatagacccaaaggaaaagaaagaaagacagtgactaagatttgggtttgtctgccccaccaaatgctttgagcactttcataaatataaatccttcaggttgggagaaggttgaacatctgaagacactgattcttcagagatgtaatccaaacaaagtgatctttggtgatatggtcactaaaccatttatcccaaaattctcttggaaaaccgtcctataacagcagggaacattatccagccaagtttttctgcaaataaagggttgctgatagaggcttgcctgcttgtgtttctgtagctcagggtgtttatgaattcactaatcccttcccttcagatcccttttattctggtgttatgattgtgactgaaaaaaattgattttttttctatgacatagaatgttgaaaggttgatttcttttctagaggaaagattctttttttctatgtgctacataccccccgaccagggaaaaggcaaatagtggtattgtttgctgaagtcttcctttgaaggttgcttggtgtttgcttagtggaaatcagcaggggaagagaggctatctctaacattttgttagagtttcttcgtagttctatagtgatgaaacaaggacttggggtacaggacagatctgctttcagaaatcctggctcttgtgaggtttagaagccctgagaccatttagctggtggcaacgggaatgttgagggtgataaataggatctttggttgtccaagtatcagtgacatgatatagatggagttaaacctttaggatctccttatttatttgtttgtttatttttgagacagggtcttgcactgtagcccaggttggagtatggtggcatgatcataactcactgcagcctcaaactcctgggctcaagcgatcctgctgcctcagcctcccaaggtgttaggattacaggcatgagccgccacacccggtcaggatctcctgtaaaattatattgttgacaacatgaagaattatgcttctcaaaagctagttatagatttgtacaatattcatagatttcttgtttcagtttttacaaattcatagcccttattttgaaaattagctattagcaataattttgtctaggaaattggatgtgtattcaagtgaaagaaggaagtacagttacctattatcttattgtaactaacaatcaagtaagtgtgatgcatttggtactttaaaaactgcacccaagttacagattattggaattaataaaattcactggatctatatatttttaaacggacagtgtgatagcagaacctcttatagaatgatagaattcctctggaatgattggataacttcatttcatccttgacttttaccttggaggatttcttaccccttttggcttctcaaatttgactattaaaatgttgcctttaaaaataggaacacagtttcaggggggagtaccagcccatgacccttctgcaaggccccctaactcaaggtagtttccctggaactgtggtttatggaatgtttcaggagtgtgaggaggtataatttaaggctgtcctagcaaggatacccttaaggatagagggcccagtagcatctggaggccagaaaagttaaactgaggcagtcagattagcttcaggctcaattaagctgatgggtcagcctgggagaaattgcaggatgactctcaatatcccctcccacccccacagcagccacgatctgtctgtctttaatcatgggtgcagtgaacctgttctttccaggtgtcttggccttcagtaaccttgttaggcttgtccctgaacgtggctaccgatccaaagacacatgatcagagaggcaattagagaacagaccttttccaaagcaagcatgttctgttgggcttagaagtttcatgtcctaatattataggaccctgtgcatctctctggagatgaggcacatgagtcatatctgtgattcttgcttttgtgtcaacatctcatgaataggcaatcagagctttggcaccaatgtattttcagttcatatctgatgtagttaaatccacctcctgctttgtagtttactggcaagctgtttttgatataagacatctagaacactgtaaatatataacatttttatttgtctattatacctcaattacgaaaaagacatctagaagcaacctcatcaagagagatactgaggccgggcatggtagctcacacttgcaatcccattactttgggaggctgaggcaggtagatcacttgaggtcaagagtttgaaaccagcctggccaacatgttgaaaccctgtctctattaaaaatacaaaaaagttagctgggcttggtggtgggcacctgtaatcccagctactccggaggctgaggcaggagaatcacttgaacctgggaggcagaggttgcagtgagctgagatcacaccactgcactccaacctgggcaccagagtgagattacatctaaaaaataaaataaagtaataaaaaagagagatattgatagctgttgttggaaatttcaacttccatctcacttctggtaactttttggaagtttgttgaacaaagtggaatacacgcacatacacacacacacatactctcttgtttgtttaaggtttaatgaaatagctgtcatataatcactgtttttgaaagaggagaattagttgctatctgtacattttgggtatgtgaactatttggatagaactctgagaaatgcattcagaacaacaaacaaaatcataggagaaatagctaagtgggaaggggcatataagagttgttgaaaaagttatttcttgagaaaccagctctaatgctaggcaagtcacttgctttgggggaggcctcagcttctctgtctataagattgcagcaggggtgtagtgggaatgagtcttcaacattccaagagattttatctactaatacgacagtcaaatggagcatgactttgtggaagcctctcctcttccacccagaggggccaatttctctgtcccagtgagatgttgacacttgtatgatccctgcttggagacttccctcttctggaacctgccctggctcaggcatgagggctgactgtcacccttcgataggagcccagcactaaagctcatgtgttggcagtgttcttgcgggaaggaaaaagaccagccagcccatttgttactgcacaagcaaacagcttctggtagctgtacagatacatgcactttctttcctcactgtgtttccatagacagatttagtgctgtagaagagtagagggcagtcacgggaaggagttcctgtttttcttttggctatgccaaatggggaaaaatcctcctatcttgtctttttagtgtcatcctctctccccttttcttcttctttataattctcatctctcatctctcctggaaatgtgcatgtcaagttcaaaagggcacaatgttttggtgaggaagaggtgggagaacacgtgccaggtgctaactagggtcatcatttcccccttcacagccagcttcctgtgaatgtgtgtgtgtgtgtgtgtgtgtgtgtgtgtgtgtgtgtgtgtgtgtatttcttttgccagcatcactgaatctgtctgctgtctggtattccaggttttggtttagggaaaagtaaaagtaattttataatcccagctgtcatttaagccacccctttgtgggtagcatatggtccactctctcagttcattgtcctaaagatgcttcatcagaaaggaataacttccaccccgttactctctgtccccttactctgctttatttttcttcgtcaatcctaccaccaccacccactgtttgaacaacccactattatttgtctgtttcccatccctggtagaataggagccccatgaatgaaggaactttgcttctgttgttcaccactgaatctctaaggtatggaacacacctggcatgtgataggcactcgataaatatttgttgtggctcatgggcaccttgcagagttaaggctgcagttgtttgtggaatttataagtggtaatgaatatttatctactattcctcttccaaggcgatcacacaataatcaggctttacactatccagttcttaggtcttccaagttatgacttgtgaggtatgttaattatgataatagaaggcagtttatttggttcagatttattgatgtgtaatttaccacagtaagacttcccctttacaaaagtatgatgagttttgacaaatggatacacatgtgtatctaccactgccatgctccttttcagtctgtcgtcccctccacccatgaccactggtcaccactgcagtgatttctgtccccttcatttcaccttttccagaatgtcatataaatggaatcatgcagtatgtagttttttgtgtctggcttatttttcttagcattaggcttttgggattcatccaggttgtcgcatgtaacagtagcttattcctttttatggctgagtaagtgtcccagttttatttatatatttatttatgaggaggtgtctcactctgtcacccaggctggagtgcggtagcgcgatctcagctcactgcaacctccgcctcccaggttcaagcaattctcctgcctcctgagtagctgggattacaggcacccaccgccacgcccaactaatttttatatttttagtagagatggggtttcaccatgttggccaggctgatctcaaactcttgacctcaggtgatccgcccacctctggctcccaaagtgctaggattacaggcatgagccactgtgcccagccccagttttatttattcaccagttgatggtcttttcgacaactaattgtttccagtttttggctattctgtataaggcttctataaatattcacaaatacctaggatgggatgactgggtcatataatagtactgtataaccttagcagaaactgtcaaactattttccaaagtggctcttccattttacaattccacagtgtattgagtcccagtgtctccatacacatgctagcacttttaatatttaatttagtgggtatgtaatgatatctcattgtggttttaatttgcatttctctgcagctaatgatgagtgtttctgcttatttgggaaggttttaatttagcagtctgttgtattctgtagatattaataacttcaaaatatcagtggcatttgcagttaaaatttccttaaaaaattggccaaaggtttccagcagtcacttctgccatgcccaaactgtatgaaacaaggctgaggtgtggagattgtcacattttggcaaggagtgatccacttgggtgactgatgagacccagagagcgtacgcctcgggcttgagggtgaggacgggcgggaagtcgactgcatggccctgctggccttgggaggctgcccagtccttagctaaagctggcagttatgggaaacagacttagattctattacgtttttcaggatgtcccaggagtcacctgggaagctcagcagtcctttgtgactttcaagcatatggtagaagctgctgaacacagagctccctctttggggataatttgcccaaatcatttaatcaggcttgagaaatgagttaccacaggtccaggagtgctgccacccttgaattctgacaccctatttctcctatccgtctcttaattaattaagcagacatccccaagtgcttacgacaagccaggacccttttgcatactaaggaaaacagggatgaaggaaacagaaatggtctctgctctgactcagaaggtagaaatcctctttcccagccaagtcttcctagggagcacgtaggaagggctctgaacccacgtgtcagttgcaggggaggatatcaggaaaggacattgaagaagtggagacctaagtttgagacctaggcattagccaggctagcagtgcttgaaaaagtgtcttaggacaagagaactcaccagtgaagtcccagtggtaggagagcgtgcagcatattctgagcctgtatacacatctccagggcattgcttagcaggtggggagtggcaagagagtaggctggagtcacagaagggaggccaggtagaccttggtgagcactggactctatgttcaggtgctgaggagctggcaaaaggttttaagtcggggagaggcatgttcagatatttggtctagctgagtaactttgggtgctctgtgacaaatggttgggagaccagtgaggtggcagttgcggtcatctaggagcaggatcagagtggcctattgactgggatgactgtgaagtgggatcctttccagccagtaactggaaatgtgtatgagggcagaagtgagtgtactgcatttgaaacattgagaaatctagtacatagtactgtctcttttatatcttttttttttttttttttgattttggtttgtttgttcactaacttggaaaactgatgtggaaatgtccctttggcttcagttacctgagcagaaggggccgggcattgccaaactctcctcttaggacagaattgctcccagtattgatcattgtgttctgagttgggggagcaaattgtgcaggaggccaggtcagtgccaaggtgggtgggaggaattggagcaggaagcttgcctaagtgtgcccagcaaagccacggtagaactttctactgtggctctatgctacttcttagcaaccttctccatgtgcttcctggagagtccttggagtcagaacctttttcttgaaacccagacactttacttccaagaaaatgctgtccaagaaaactcatccttcccttcttctcatgaacgttgtgtagaggtgtgtcttctcttcctttgagcttttccactcagggtttaggggaggtgatattctatatttgggtttggctctgggtactgcaacactaggctattaagatttcatccttactgctttgcccctcctatctttccagaaacccacaatggatttgctagaaataatggaacgtcctgtttggacaggatataaccatttctcagctagaggatattgttggaatgaagaaagataaatggggagaagggaactcacattgctttggcacttaaattaagccatgtactgtgttgggaaattatttatattatctcgttgaatccacagtagaacacagttgaacaccatacaaggtaagtattgtcatccttattttaccatgaggaaattgatgcttagagagcataaagccttggccaggggcacatagttgggaagccggggctaattcatgcctgggctctttctgatagttttccttttttaattgtcccctcctcattgttaccttggggatttcaagagattcatgtagcttctaaatcaacgaactgattcctggagagcagcttctgtatgagaaaaatctagctaattatttatttcagtgtctctggaatgcaagctctgtcctgagccacttagaaaacaatttgggatgacaagcatgtgtctcacaatgctgctctggttgccagtgctgtgctgccagttgtcatctttgaacaaactgatgcagtgctggtttaactcttcctctttttggagtaagaaactttggaggcctgtgtccttctagaagtttgctgagcaaatggtaaggaaaagaaataggtcctaaggcttgactatttcagagaatttcttgatttattggactgtcaatgaatgaattggaatacatagtggtaggctgtcttttcttctcagacactgcaatttcctccaatctcttgacttttctagaagttttaatccaagtccttgttgggtggtagataaaagggtattgttctactagagactgaccttggcatggagatctcatttggactcacagatttctagtctagcgcttggttttgtatccatacctcgctactgcattcttagttccttctgctccttgttcctcatgcccagtgtcccaccctacccttgcccctactcctctagaggccacagtgattcactgagccatttcataagcacagctaggagagttcatggctaccaagtgccagcagggccgaattttcacctgtgtgtcctcccttccatttttcatcttctgccccctccccagctttaactttaatataactacttgggactattccagcattaaataagggtaactgctggatgggtggctgggatacacagaatgtagtatcccttgttcacgagaagaccttcttgccctagcatggcaaacagtcctccaaggaggcacctgtgacacccaacggagtaggggggcggtgtgttcaggtgcaggtggaacaaggccagaagtgtgcatatgtgctgaccatgggagcttgtttgtcggtttcacagttgatgccctgagcctgccatagcagacttgtttctccatgggatgctgttttctttccagagacacagcgctagggttgtcctcattacctgagagccaggtgtcggtagcattttcttggtgtttactcacactcatctaaggcacgttgtggttttccagattaggaaactgctttattgatggtgctttttttttttttttttgagacagagtctcgctctgtcgccatgctggagtgtagtggcacaatcttggctcactgcacctccgcctgccaggttcagcgattctcctgcctcagcctcccaagtagctgggactacaggtgcctgccaccatgcccagctaatttttgtatttttagtagagacggggtttcaccgtattggctaggatggtctcgatttcttgacctcgtgatccgcctgcctcggcctcccaaagtgctgggattataggcttgagccaccacgcctggccgatggtgctttttatcatttgaaggactcagttgtataacccactgaaaattagtatgtaaggaagttcagggaatagtataagtcactccaggcttgaggcaaaatttacaaatgctgctgactttgtatgtaaggggaggcattttcttagaaaagagaggtaggtctctgggattccagtatgccatttccatcctcagtgtttttggccacctgagagaggtctattttcagaaatgcattcttcattcccagatgataacatctatagaactaaaatgattaggaccataacacgtagctcctagcctgctgtcggaacacctcccgagtccctctttgtgggtgaacccagaggctgggagctggtgactcatgatccattgagaagcagtcatgatgcagagctgtgtgttggaggtctcagctgagagggctggattagcagtcctcattggtgtatggctttgcagcaataactgatggctgtttcccctcctgctttatctttcagttaatgaccagccacggcgtccctgctgtgagctctggccgctgccttccagggctcccgagccacacgctgggggtgctggctgagggaacatggcttgttggcctcagctgaggttgctgctgtggaagaacctcactttcagaagaagacaaacagtaagcttgggtttttcagcagcggggggttctctcattttttctttgtggttttgagttggggattggaggagggagggagggaaggaagctgtgttggttttcacacagggattgatggaatctggctcttatggacacaggactgtgtggtccggatatggcatgtggcttatcatagagggcagatttgcagccaggtagaaatagtagctttggtttgtgctactgcccaggcatgagttctgatccctaggacctggctccgaatcgcccctgagcaccccactttttccttttgctgcagccctgggagccacctggctctccaaaagcccctaatgggcccctgtatttctggaagctgtgggtgaagtgagttagtggccccactcttagagatcaatactgggtatcttggtgtcaatctggattctttccttcaggcctggaggaatataataactgagacttgttttatttctgcagagggttctaagccattcacttcccagatgggccaataatgctttgagtaatctggagatcatctttaatgcgcaggtgaatggaactcttccacagagggatgtgagggctgtagagcagagtgaactccctgaaactcagacgtcagctctttgtctctctatctctgaacacccttccttagagatcccatctctaggatgcatttctctgtagttagtttctaagtctcttgttcctgttctgcctttatttttttttcctggattctaagccagtatccccacttggctgtcttaatgtagcttaacatgtctgtaatcaaaatgatcatctttctgagattcaaagggctataagggactttggagagaatttcattcagttttcctcaaactagaataatgcttgcactgtctgtaaaagaacaaaagtgtcaaagcatccttttgttcactaaatttccttttttattatagtgttacttaaatattaggaagtaaaagtaggtataaacttcttataggctgttattatacaactatatgacccatacatatttacaaattaagtgcagccaaaattgcaaaatcaataccattcaaattaataccttaaatgtggtgaggcagctgttgttcaactgaaaccaaattataagttgcatggcagtaaatgctatcatgctgatcattttgagtttggccagtctatattatcatgtgctaatgattgaattctccacccatttttctacttgtatgaccttaatttgatggcacctgttccatcctcatgagtttgctacaattatactggtgccaacacaatcataaacacaaatataaacttgggctttgaaatcttgtgccagaacttggctttaaagtaagcatttaaaaaatccatatgtgtttattagactttgtttagatgactgttgaaatgaaaacaaagtgtttaaaatcctcttagagaacttaaatataatccctcagcaatatgtatacagatcttcctttgagaaaaactgattgtgttcagcctctcatgttacaaatggggaacctgaattctgaggtctctagtgagagaacagggactggaatctgtggatcctatctgttttaataataattgtaaagtataatagataatattatattaataaaataaaagcaaacacttagaatgagcttccatgtgtgaggcactaactgattaggcattattaactagatttattccttttaaggccccgcgatgtactgttatttccacatgttgtagctggggaacgtgctactcagagaggttaagtaacttgtctgaggtccacaccactaacaaggagcacaggtagggttcaaatccagataatctgactttggagctggcactctaactcaatgtgcctaatcgcttttcagtggtgtcattattttgcctattctccatctgagaatattgaagtttctgactccttccttgcctttctccctgcctcccgtggttatccccaggtcttggtgttccagtcctctatgtccgtccttactcttattcctttgctacagtgtgatccagggctcctgccccttcttatcctggtagagggggcccacttgctgggaaattgtctccgccatggtttatccatgttgtgtgtccattagtgagtagtgggaagaatcatatcatgttggcaatgaaaggggggctatggctctggggtagtctagtctgaacctcttattttacggatgagaaagctgaggtacaaagcagggaagggatttcttgaggtcacccagccagcaactgagctgcaaccagaagctgagatccccaggactagggccgagcctcattctgtcccatcacagtgacttttcttccctcctccaaactatttttattttttatttttttgcagctgcttagcagcttgaagttagaagaaagggcagggaaaaggttttccgtgcttagccagggaaggaatcctgcaacaggatgtggggttgggtcattcaaattgggccagactccactggtcttgttgcttcttgcttggtattgcagatgggtttaaaagtgttaggattagagagataggcaggtttagccaaaggcagtttgtagccttgtggcagagttctttttaaagaaggaagtgggatgcaacaccctgacacaaaggggcttaagttgttataccactgcctgctaacctgttttccttaactctcttcctgatttctaaaggaagtatattttgctgaatcagaaagaaaagtgatttatttcaggttgctgatgcttagattgttagagttggaaagatctggcttgcatcttgtacagctgacagaactggggctcaggggggcacaggtgcccagagttggtcagtcaggaaagtagcaccagaaccagtctcctggtggccctacagttgcagacccttttttgctttgctctctgtgtatactaaagcttctatgtctctgaatctcaagttctgactggtagctactttccaatccacctggcttagatttctagattatattgtttagacgtcagaacctcttaagggttttggggccacttgttagctcacatagtgagaaccagccctgcccattaggtaggggaagaagttagcagtccatgatagctgttgcctgcagcgtatggatgttcattgcacagttcctgtctcctgagatcctggagtgtatacgcttggcctcagagcccagcacagagcctggcccttgggacatgcttagtaagtatttactgaatgagtgggaaatgtcttaaggcccattagtttgcaggtcttgaggaggctcccttgcactaggaagaatagaaagcatacataaagcctgtgtgctgccgccaggaagactagaaacgctatgttcagcctggagctgaatggtataccccagagcaaccctgttgaaaggcagtgcttgccttttcattctgtgtcctggtttgctggtaactcctgggtcccctgcctctcctgtacccccattgtgcagactgaggggggaccatcagccagggttagttttccgctgtttctgttaggcaaagaataaattgaattgagttgtgaaagttgggtgcaaagctcagtttgggtccaaagtaacagttaacttgtgtgggtggcaggtattcagtacaaacagggctggggacaggaaggggaagagaacttcagagctttcacgatcctcatctggttttaggctgatccagaggccaaggtccccatggaacaaactggacaaagtgagggtggccacatggcctcttttcttttgcctttattattaattttctcaaatagatctgactagtcatgtggctgggaaaatagttaattgtgatttttttttttttaaactgagtctcactctattgcccaggctggagtgcagtggtatgatctcagctcgccgcaacctctgcctcccgggatcaagcaattgtcatgcctcagcctcccgggtagctgggattatgggcacacagcaccacgcctggctaatttttgtatttttagtagagacatggttttagcatgttggccaggctggtcttgaactcctgacctcaagtgatccacccacctcagccttccaatctgctgggattacaggcatgagccactgcacccagccagagtaccactatttgggcattctttaatgaaaaagaatgaactatccaaaaattaaaactcctcatttatgagcttttagagaattttacagagtagatggaaactctctgcatcctttccccacttctagtttcacctgacacatttcttccctgtccttactcctgggccggcagcagtggtcatgattccaatcccagcttggccaccatctgcctcagtggcctaggaaaactcctttctccagagctttagttttctcttctacggaatgaagaaagttaaaacaaatagacatttattgtttcatttggataaatatctattaagcatctattacttgtggtatggttagctgggtatatagtggtgaagcagctgggcatgagtactgctttcgtagagcttacagttcagtgaggccagcagatgtgaaacatatcatcacacaaataaaaatataactatcaactgtgatgaggattatgaaggaaaaaatccggcaaactatggtactggtgttagatactagcaggtgtgggtagggatttcatttagattgacaggttgtcacattaaagctgagagccctgaagttcaagcaatggttagccaggcaaagatcagaggcttagagatagggaaatccattccaggcagagagactgggggtgcctgtcccctaggtcagggaacagaagaaagccagtggcactggtggagtgaataagactggcgggggatgagttggtagtagacatgaccagatcatttagggccaattctcctggggaaggagaatttaatttaatatttatttatttatttatttatttatttatttatttatttatttatttttcaagacggagtctagttctgtcgcccaggctggagtgcagtggagcaatctcggctcactgcaacttttgcctcctggtttcaagcgattctcctgcctcagcctcctagtagctgggattacagacgcccaccaccatgcccagctaatttttgtatttttatagagatgcggtttcaccatattggccaggctggtctgaaactcctgaccttgtgatcctcctacctcggcttcccaaagtgctgggattacaggcgtgacccacagtgccccctgagaatttaattttattttatgtgcaagaggattccctgaggtagtcaggccacattgtctggtgactcttgggatagagggaacttgaatgacaaaggcccaagaaagcaattgtaatcattacatatacatggaccattttatgctgttttcttctttcatttaacattatttagtgtgcgtgttcacatatttctaaatcatcttctgatttagaataatgatttctgatgtgtaggctgtgttttatagttttgaaagtaatactttgatatccattactttcttgattctcacagcaattctgaggtgtatgcgttgcaatttctgtttcacagatgaagagagtattgttaataagttaatggccgggcatggtggctcacacctataattccagcactttgggagaccaaggtgggcggatcacttgaggccaggaatttgagaccagcctggtcaatgtggtgacacccatctctactaaaaatacaaaaattagccaggcgtggtagcacttgcctgtaatcccagctatttgggagggtgaggcaggagaatttgcttgaacctggcaggtggaagttgcagtgagccaagattgcaccactgtactcctgcctgggtgacagagcgagactctgtctcaaaaaataaaaagttgctaagaggagggctgggatcttttggctccaaatctactgtgggatgatgcctttgacattcctgatagctgtgcagtaatccattaacacagtttttataagttcaaaccctgttgccaacatttagattgttccatgtgtgctgttacaaataaattactataaagattctatacatttaatcttttattatttttgtattatttctgtaggccaaaatctgaggaacaggattactaggttgaagggaaatggcccttgaagtgtctgatcagatgtctttccagaggatccaaccaatttaaatagccaccatcaatgcatgagactttgtagttcagggaaggcaggcctggttttaaaaatcatttcccctctctagcatttttctgatgtgatccttaagatttcactttagttttcccaggtctcattggcatgtatgctgttagggatgggtctaaaattaatttttcttcacattcatatcatgtcatcccagtgattatttaataaataatcacttgattaaatagtgattccttttctagttatttttgggacatttattaaaacctggatatggtggctcatgcctgtattcccagcactttgggaggctgaggtggggggattgcttgagactaggagttcaacaccagcctgggcagcatagcaagactccatctctataaaaataaggaaattagtcaggcatggtggtacttgcctggagtcccagctacttggaaggctgaggtaggagaattgcttgagtccaggtggtcaaggctgcagtgagctatgaccatactactgtactccagcctgggcaacagagtgaaactctgtctgaaaaaaaaaaaaaaaaaaaaaaaaaaaaaaaaaaaaagatgtgtagggagcaattttggagttattcatttggtcatttgatatgtagttttagttttggtgctgatagagcccagaatgtaccctgaatttgatgaacattctgatatatgggggagctcattgtcccccacttacctttttgcctctcagaatatcttttgatatttttatctgttttttccccattgaatgttattaccttatcaagctcaaaaaagtaccctatcgctattttaagttcagttgtgttaaatctataaattagcttgggaaatttggatattaaatgaactcatgaagaagcagagtttagctctccttaattctcatcttcctttatttatcctactacagttctgtggttttcttttatgtaagaagcacatgtttggctaagttaatgcctaggtttttttgtttatgtgtccattctcactgtggatagtattctcttttccccacattatattaatttaactggttttcagagactaatagcaatgctattatttaggagaatttaccttggttctgattaacttacccatacttgcaaatcatttgcagctttttagttaactttgtgagttctcttagatttacgaccatgccagaaacagaaaggatattttcatctcttcctttctgatgtttattcttcttgtttcctttttttatcccccattatattctcaagaatctctcaatactaagaaatagcgacttcatttttcagcgcggagtgcattattttggctaccatgattcagaagcctcttgcctaaggcccaattttattctgctagttttctctgttctttgtacatggcccttgcgctgccctaaccttgaattaacgtggctaaatctcaagaatttaagagcaccgtgactgtgtcctcaggctagggagggaaatgggttcacagagtgactggattgtggtctatgaacttcggcagccagcagcaaaagtcaggcatgaataatcaagtggacagtgaacatctgtagtgtgggagatgttggcataactatgaatgatgattcaagagtggtttgatgcatattgaataacatgatgataagtactagactctgtgctaagccttctatgtgaaatacatttaattctcataataactctagagcagtggttctcgaccggggccggttatccccctaccccaccccaccctcac

SEQ ID NO: 779 - DNA, 32744 bp, Homo sapiens
  source 1..32744: mol_type = other DNA
gctcctccctgcgagcgtgtgtgtgtgtcgggggtccctcccctcctggctctggggtcgggcgcgcaccccgccccgtagcgcggcccctccctggcgagcgcaaccccatccagcgggagcgcggagccgcggccgcggggaagcattaagtttattcgcctcaaagtgacgcaaaaattcttcaagagctctttggcggcggctatctagagatcagaccatgtgagggcccgcgggtacaaatacggccgcgccggcgcccctccgcacagccagcgccgccgggtgcctcgagggcgcgaggccagcccgcctgcccagcccgggaccagcctccccgcgcagcctggcaggtgggtccgcttttcctctccgcctcgaacccacgtttctttccagaccttcttccccgcctcggggagggggatagaaccgctgcgccccaccgccctgcgaggaggcgaggaggtgcatgcgccccagcggtgggcgccggatcctgcccctgcgccctccacgctcagcaagagccagagctgaagctgaccggccagagtgggagacgaggaacgtggagtgctcgaagtgggcgggcgtagggggctcctttgtctattgttgcaggggctttgcaacctcttgaggacccgtgaaagaccccttaaagagggtcttgagcaaagtgctgtcctgcgctttgggaagagttgcttgctttcgtttcaacccatggtttatgtttgatctttactttgctgtcatcgcgtgcaggtggctttatgcaaagggagagttctggttgacacaaatgcccagacagctagagaaatctctgagtggcgcctaagtgggccgagtctccgtgcgcttgggtggtttcactgtcagagctgaggcgctctcagacacctcacaggccattcagaatgtatgtgaaactccaactccaacgactgtgctacgtggttgaaggatataaccatcatttgcttgaaaattgtgtacattcaaacttgttcttgaaaaaaagctctctggagctcaagagtggatttgggtcttgggctaaggagcagattttcttctgaactggggcttttgcatattgaattgttccttttccatttgggactctgaagaatttgagaggggtagaatttctgaatcagacattacaaagactttgtgtatgtatttttaccatcagttttgtccagaaaagtgaacctggtcaatggattatttatgagcctgctagctaactctcatcataggaagacgagagcaaatatttaatgtgttttgccttcagttacataggaaaaatgtctaagaaggtgacattgggacttgtgtttaatgaaacagagaactgtgggcagcgtcagtgttgggtttttaggagcgtagggagcacacagctttgactctttgtcccattacttgcttctgtgtgaagccactgaggccccagggttcgggttttcctgccacgcactctggggtggcagtgaccgttccaatatggatgagtgagaagcaggttcttatgaggtttgtgcaaattgagcaagccacttggggcatgggtttttcctcttttctttctttctttctttttcccactaaagaacagattgaaagtgcttcacaattaatcaaaagtcccctcaacactctggtgatccatctaagacctctcagagatataaccaccagcacagatattcaaacccatttttttcaatctccttgtttaagaaatatatatatactaggagtgggatgggggaataatgttgatgttttaatggaatctgaaagacctcagaaattcctctcgggggatgtttagagtcgtctgagcattttgatgaaacttggagaggcatgttgaagagtttcgcaaataggtgaggtgcctgaggaatggggatgcttggctggaggggggttaggagcatggatcagtctgtttcttacagcaggtgcttgcttcccaaacaccctggatgtccgctgccaaacagaaacacaggtaactccagacattaagccaatacgtggcagctccttctccttcctagttgtggaatgaatggtataattggagagaatatagaaggcagggcttcctgaagaagcttaattttaatttggcttcatgaatcaacaggatatggtcatgacttgactttttctaaagatgtctggacagccagagcaaaaattatacagtcacttttggttgttgttgagaaggtaactcagaccttagttattcccagtaacatatcagctcctcgtggtcctcagctctaaatgaggggctgtggagaggactgcctaacacgatgtccgagtcccctccaactcactctgcaaccatgaccctaacctctccactttaagaaaacatgagttgaaatgatggtgcaaaaatgccggagggccggtactctctacccagatatcaccttcaaatcagggtctcctggggatcccctcaggtttcactctaaggcagaggctttgcacactctgacacatgtaagtaagttaacccctgcaccttaaccacagccaaccaacaggggcccaataacccgactccccagctgcccaaatgccctttgcaagatgcccagggtgtggtgcggtagaaatagcccccaggcagcacaaatttgggctgcaccgattttcctgtccagtccctgggctattaacagccacctccactccctgatgtttgcggtgttccatggaacatacgtgggtgtggagcgaaacatctcataaaagcgcctgtttctccacacttgggacaagtgaggcagactcccttgctcttacagggaatctgtttctgggcttaaccaggcaaaatgacattccaagggaagaaaactcccatctttctaggagggacccaggggaaaacagatgaaactagcctttcacagaaacctggcatcaatgatcttccctgagcagaaaggcaaattgctcttccaggtgggcacgggctccaccattggcctgcacagccccgtacttccaggtggagctcacggtgctgactttggttcacattcagaaatgttgccctgtgagaaacgtctctgcaggggctgctcccttcagcctgacttttgtttgctctgggtgactgggaagacgaatgctcatttactgaatgtcaacaacgcgcttttaaatgggagcaagtgttttcccagccctgtgtctaatgaggtgacaaaatgagtagcgataaagtggatgtgaggcagtctgactgccttattattatttccatctttcctttggcccctctggaacctggcagcagctccccagcttccatcccaaccctgaaccaaggggatttgttaatgggatttaagccacaggctctttagcacccaggactggatggacctccattaatcccagaagcccctgggctgcaaaaggagagacgcaacccagtgatgtggagacagagaggcaatgtcccaggtcttcaggtactgacgagtgacagacagcaaggggagggtctcctgggatgctgatgtccagttcttcaggtcattctttgaggtagggagggaagaggtgacaggaggggttatgatgagaccaggtggtgatctgggcgagcacttctcagcaaagctggggacacagcgaacccattgtgtgctttgggagagcccagagccccagactgggtgggcagctagcaggagggggcaagtacgtgggcctttgccgtcttgggttttggtgtgacctttctgtgtgtatacaggaaaaaagagcatttcatttcctttgttactgaactgttgaataaaataagctgatttgtcttctctaagggaactttttcctctaaggggccaagaattagtgagtgggagacctggaaggaccagggaggggttctgctccccgtagctctgtgcatggctggctctagctcacccacggctcttgaggacaaagccaggcctagaacttgagtctcttctactttcgctctcttctcttccctccgtaatgatgggcatgtcttctttaaaaggcgaaccaaattagctggccctttctcttgtttcagagttggggagctgggccgaaggaacagggagggaagagcctggaggggagaggggaggtaagctgttctggtcagcagggagctttggctgactggaagtttcccagcactggctgagggctagaattattttttcttttgaaaattttcaactgaaaaatcagagatatggtccattttcaccagttaacattttgccaatttgtgtacaaagtcactctaattatgcatatatctaatttttgcatatgcagtatatatatgatttgatatattatgtgtaatatataagatcattaatataattatgccatttatgtatctgtatgtatacatacagatatatatacacactatatatacacatatgtacatacagatacatacagatatatatatacatatgtacatacagatacatacagtgtatatatgtgtctgtatacactatatgtatatataaactatatgtatctgtatgtatacctacagatatatatagtgtgtatatatatatctgtaggtatacatacaggtatatatatactatatatataggttcaactaatatatatagttgaacctttgagagtttgcagacttccagatacttcttccttaaatacttcaacacagatttccaacaaacaaggaccttcttgtacgtaaccacagcgccattttcatgctggggaaactggagatagatacaatactattatcgcacatacagctcatattcccatttcccccgctgtctcaatgatgtcctttttagcatacagtgttactctgtgagactgtaaactaggggtcagaaagtttttcttgctctcatctcagtgcatatctgagaactagactggtgcaatgatgtgtaaggatgaactgatttttcatgagtgtctccaactgtgtgactcacactaaagcacatctcagaaattgttgacctaagagtataggcacctttgagcagcaacagccaaactccaaacaccttgtggctgaagaggtggttgcacgtgtcctccgcgccccctctccacctggatgcacccgtctcctccagcagcctcacctcacctgacctcacctctccttctcccctccatgccccacccagagaaatgggccagtttcccctctcttttctcttctccactcccattttattttgtagttccacttcaaacccccttttccccacttccctcttccgccttgctcagcagccacaggtgaatccacccttatttcatagcaccctctccctggggttgttttttcctctcttctctctgttttgggtccctttgtggacccaatcatgtctgttttacacaaaggtaatcttagtaacatacctgtataaaggaaaagaaaagctgtgtgtggacatgttcccatgtgttctatctcgatttttacttattgcataaattgtatttatcacaacagtaaaggagtgtttggaaggtgaagtgacactcctaatcctgattaatctaacacatcatctgttttgagtttctcaagtctctttcccagcctcgtccacatttaaatatactatggtaacagagtaaaagcagttttgttttctgcaaaaagttgtaagttgtgaaattatgtgtcacaagcaattcatgtcaccaacttcttcttcttcctcttcctcttcctcctcctcctcctcctcctcctcctcttcctcttcctcttcctcttcctcctcttcttcttcttcttcttcttcttcttcttcttcttcttcttcttcttctttcttctttttcttcttcttcttttttgagatggagtttcgctcctgttgtccaggctggagtgcaatggcccgatctcagctcaccacaacctctgcctcctgggttcaagctattctcctgcctcagcctctaaaaggctggtattacaggcatgcgccaccatgcctggctaatttttgtatttttagtagagacagggtttctccatgttgatcaggctggtctcgaactctgacctcaggtgatccgcccaccttggcctcccaaagtgctgggattacaggcatgtgacactgcgcccagcccatgtcatcaacttctaaagaacttggaccaggcgcagtggctcatgctgtaatctcagcactttgggaggctgaggcaggaggatcgctggagtccaggagttcaagaccagcctgggcaacatagcgagatctcatctctactgtgtattttaaaattgaacaacaaacaaaactaaagacctcaaaagtgcctaaaagacacctccgtggaatctgtacaaggatctccctgctccttgttcttctttccttaaatttagttttccttaagaaccaaaaagaaggttaaaataaagaaagaacttcgaatcagtctcattgtcagccccctccccacccctaagccgtcgtgtagcacttaacaacgctgtgttctacagctttcgtttcagatgttttagtttatcacatttatttctgtgggttaggaaatatattctaagttccaaaccaccagctcacagatgaacatttggagcccagaccgctgatgggtgtgcctgccagtacttgtttcaaagtctgaaagcccatcccgggctctttaatcctgggcatgtcagtctcttcctgtccatagtccatgaaaatgactgttaaggcagccctcctcctctgcccacaagatgcacagccaatcttcccgatgggtgaggcagggagggacagggccccttagaatagaaccctgatcccatttgacttaactccagggaggagagaaagagcagcacctcacatggagctcagatctgttggcaccctcgcccagtcaggaaacccaaaacaagccctccatgctgagagctgtacagggcgtgctccagtctgcaagtatttggactcagggacgtgtagccatagcccctgcttccaggggcacacgaagcaaatgtatataaaaggataactaatgatgcctggtaatcaatggcgagtgacaaatgagaattgagtagaaagagtgtatcttgggctggagtgctgagaggaggtggatagaagcttatgccaggccttggagggtgcaggataattagaggaagggaagctacaggtggggacgcacacggcactgttggtgcctactggcccctgaataacctgcggtatttgttaaaaactgcagatccctgagtgcccacgtggatctcttgaattagaatctctgggagagcagcccaggagtctgtttcccaggtgaccccaagcactgattgagagcagcaagcatgacccagtgaggcccgtgctgggagccacagatcacttaagtcccaagtcttgtgggcctcagtttccctgctagggtatgaagtagaaaggcacaatgggttgcggatgtatggtggtgatagtgacatcaactcactgtcatttattgatgcttccctgtgctagacactgagataagcatgtgtcatactttaattcccacgacagcctttaggaagtagcggttttaacagtctgcttttacacaggaggaaatggaagctaagagaggttaagtgacctactcaaagtcacacagccattaagtggtggaccagggattccagtgcagacctgaaacagaaaggagagctatgggttgtgaacagaggaactaatgaaagatgactctggaaggaagttagtctgggcttggctgtttatattcactggaggagggctgttcacatctgctatgctaaattcatttctttctagtaaagtcaaaataaataatccagtatccttttggccagcctctcagggggaccttgaccccatcacaaggggcatatcctctagattttatactctgtgtagagagaagcccagggctatcctctcccaggcagggaaagttctggacagaaattctttttctttctcatgataactggcccaaatggccctgaggattttatcctatttaattcctctccaaaaaattaaaccaggctgggtgcagtggatcatgcctgtaatcccagcactttgggaggccaaggcgggaggattgctcataggccaggagttcaagaccaacctgggcaacatggtgaaaccccatctctgaaaaaaatacaaaaaattagctgggtgtggtggcacacacctgtaatctcagctactcgggagcctgaggtgggaggattccttgagcccgggaggttgaggctgcagagagccatgatcatgccactgcactccagcctggatgacagtgcaagactctgtctcttaaaaaaacaacacacacacacacacaaacacacacacaaaggaacagaaaaaacactaaactgactctgtcatatgaggaatcctttggataaggagatggctgtgatagtggagttcatttctaccctttttgtccaaaaaaaaaacaagcagattttctctattctcttcatttctatcatgaaatctcttcaattcattggaaaggcaaggcaggagtccctatggcttccgacctgtgcccccatgaccctgcacacttcgggaacacagcagtgccttcagcagatgcaaacgtgagcccccattttacactgcagagcctgcaaggaaggatcagccaacagccaaggtcctgtgagagaaactgtgcaatagcagcaaaggaagacttaaagcctgggggcaactgtggtgcaaaacatgtgagctatctaaacacgccgcggcgagccagcggcagcctctgttcaccacgggatgtgtggcagcaccagcctctccagaagcatcgtgtttttcctagcagttggttttctttttcagattttaggcttggcctgtggactccatgcaggcaggactgtgcctgccttgtttcttttttctttctttttcttttttttttgagacagagtctcactctatcgcccaggctggagcgcagtttggctgactgtaacctctgcctcccaggttcaggcgattctcatgcatcagtcttctgagtagctgggattacagacatgcaccaccacgcccggctcattttttgtatttttatttttatttatttatttgagacagagtttcactcttgtcactcaggctgaagtgtagtggctcaatctcagctcactgcaacctccgcttcctgggttcaggcaattctcctgcctcagcctcacaagtagctgagattacaggcacccgccaccacacccagctactttttgtatttttagtagagacaggatttcaccatgctggccacgctggtctcaaactcctgacctcaggtgatccgcccgccttggcttcccaaagtgctgggattacaggcgtgagccagctggcccggcttgcctgccttgtttctgaggagccgagcacatgtgggcctacgcacatctttgctgagggagtgcttctccatgaagaaggccagattccatgtttactgcttcgggcggcaccagcgttccataattcccatcactcttgggagatgccctgggaacttcagcctccctctgaatagaggatacgaactgccagttggctctatgacctgtaactaatcctatctcaacgttaaacccacagttcatttgtttttgtttgttttgagaaagaaagttgagtttcctgagaaatgaactcactttgatcttgacacatgaagtcaaagttcaacatttctgtagtgtctttctgcttagaaggcactgataggcatcaagtagatggagcgtcacaggcatttccaaagggctgggtgtttatgaccaatcgggataattacatgcttgttcaggtacgggttgctcctggctatagagacaaagtgtgtggaaagaggaatggagattcgatcagaagtttaaatagaaacagtccttttttacttggagtcagggattgggggaatggagtgcattagcttcaggagagttaagagaaagtcaaccactcccattggctggtcaactgcacccctcatgtgcagagacctagggggacgaagcttctgtctgccagctgtcattccacagcagaggtggggtccacggcaccaccctcagcctgtcaccagctcagcctggaacaacagcacacatccaagatgcaaaggaaggcttccttctggggctttttctggacatggagaaactcaaagactgcctggagaaggtcacagctgtaatattgacctcgtttgcaatctttccacccagcaggataaaaataccttttaaaaaaagaaagcttagaagagggcattctcagaaaccaaccttcttaacaactcacacttctctattcctgggccagcttgttttcagccattgttatgtgcaagtcttgatagaaaaagccagccagggctctgcagaatcagaaaaaataggaagagagtctggggctccacaggcaggagcttgcaggcagaaagggccccgggcacatggcatcttctcctggcagacccgattagtcaccgagaggagttttcctctacctggcagaggcagaggagtaagttaagaaaaggagatgtgtgtctcctctgagtggctgtaactttgtgtttgcaccccagattctatgatgagggtgggggttcagtaggagaaccccagaaagcacagctggatagagagagacagcctgtggggagaggctgcccggtcatgagttgtctgagggatgctctgggttttcttgcactggggccatttcagcctgttgatgtaaaattttttaattaaaaaattaagaagaactaggggatatttcaggaaacaagacctctgtaatggctcagaacacaaatagaaacagcgtattactcttccaggagctgcttaccatagttgccaggaattcaggactggatgccttcggggctgaacccctgaggactcctgagaacacacgttgccctcaaaaatctacctacctgcacacattttctaccctctctgcaggacgcctcaaggaagaaagtaaacaaaatccagaacaaatcatttggcccctgaggcaggagggtaactgctcactgctgctgctaaatgtctatttcctctccccaaagtattgcttctgagatggaccgcatttcccttccgtagaccctctgggcctgggtagagaggccagggaacgcttgggtgatgcaattggagcttctatttaagtgagaggaaagtggcagtacagaaaatagaagaggttcttgcagaaaattgtggggccaggccaggcatggtgtctcacacctgtgatctcagctctttgggaggccaaggcgggtggatcatgtgaggtcaggagttcaagaccatcctggccaacatagtgaaaccccatctctactaaaaatataaaaattagccgggcatggtggagcacgcctgtagtcccagctactcggaggctgaggcacaagaatcgcttgaacccgggaggcagaggttgcagtgagccaaaattgtgccactgcacaccagcctgggcaacagagcaagactgtttcaaaaaaaaaaaaacaaaactgtggggccagtgggaggaagagcaagggaaggagcagctctgtcaactcggtgccctccagccgcacagggaaaagctcttcctccctgccatttggccttcaagttcgtcagttgtttaacgtacaaaacatgtcattgatataggccggagggaagtacagaggcctttttaaacaacacaaccactgactaccaagttcaggtttaatttagctgaatatttaaatatgttgacatctcatcatgtaataaaataataatatcccttggcctggtaaatggttacctatggtgggtgagaggatgtgtggttattttaaaagcctatcaagcctagttgagggccgaaggaagggggaagtggggggaggccaaggccaggcagtagcataaatggtgagcagggtgaggttatggagaccgctcttgtcagaattcatatccttctgagtggtgtttgcattcttgagcctggggtgggtggcggagggcccaacaagtgcggtacagcccaagacgtctacctccccttacacacacacagcccctagctacatgaagctgatttatctcttgttgctgtagatatttttggcaacaatcgatccctttaaaatttttattttccactttacagaaaaaatgcagcaaacgccaaaccctagtgactgacattgcctggtgttcatgtctaatccttgctcatgtttatagccatagtcattcttgtgaagctactattttgtgtcctgatttttcacttactatgtttttgtcttcacatgtgtaggtagctaagttgcagtcaccaaaaaccccaaataggtaggagacatccatgcgccatttctattagccagttcctagccatcctcctaactgttggatctggagggttagcctcagatcattgcagttataaacagtccatccctggctatcttttctagaagggtccagtgtcatctcagctaggcagaaacgtatttcaactcccaaactgtttcaagagtttgaaaagctcaggcccagaagaaacagagtgagcagttgaacagtcttacaactgctgcttacaactttataacaggccataggtttaaagtccaaaagggctcaaatttctaccccacgtttgacgactcagacctcaagccagagctgagctgacttccctgcgcccaggccacggcggtgaaatgaaggcacagcagccccggccaggccctcccagtggaggcacagggggacggcgacaccaaccaccccagcatcagtaacctgcacactcttctccctaggtctcctggaggcaaggcgaccttgcttgccctctcttgcagaataacaaggggcttagccacaggagttgctggcaagtggaaagaagaacaaatggtgagcagcagtgccgtttaaggaccagtcgggcttgcaaatgcataatgggaacgcagaaaggccatgtgcagatagactggacacagccggaggcagctcaaatctgccccaaccttcctaggggctaaaagacgagtgacagaatctgtagctgatgagctggggtgcctcacgaagggtggcctttttacctctgtcctttgcttttttccttttaaaatcatagctgtagttgatataaaatataactttgggtgtgcagcttaaatgatggtgaggactgtcctgcctgctgaaaggcagaaacgcctttgcttgtcattgtttccccaacatagcatccaagacaaagggggtgctctgtgacgctttggagcctctctcacattcttctgagctgctggcaaaccacaagatgagagtccagtggctcaaagggaagcgagtgctttgctctccagtccagcctgtgcaaaccttggtgatttgctgtctatttgtgttggttttattgtttccttttgaaattacttgattgtcatttgatgccctgtataggttgagaaatttagttgaatttatggactgccatgtagcaaataggatgtctcacatttaacagatgcatttgtaatcccgttaactaatgtagtttaagatgtatgatgagttaataccaaagatgagtaaaatgtctaacttttttctccttcctctgtgtgtctttccaacagagtcaatcccgacgtgtcaatcccgacgatagagagctcggaggtgatccacaaatccaagcacccagagatcaattgggatccttggcagatggacatcagtgtcatttactaaccagcaggatggagacgacgcccttgaattctcagaagcagctatcagcgtgtgaagatggagaagattgtcaggaaaacggagttctacagaaggttgttcccaccccaggggacaaagtggagtccgggcaaatatccaatgggtactcagcagttccaagtcctggtgcgggagatgacacacggcactctatcccagcgaccaccaccaccctagtggctgagcttcatcaaggggaacgggagacctggggcaagaaggtggatttccttctctcagtgattggctatgctgtggacctgggcaatgtctggcgcttcccctacatatgttaccagaatggagggggtcagtatcacaggctgcgagtagaggctgtgacccagggtgggctgtgacccggagtgggctgtgacccggggtgggctgtgacccgggtgggctgcgacctggggtgggctgtgacctgggatgggctgtgacccgggtgggctgtgacctggggtgggctgtgacccgggtgggctgtgacctggggtgggctgtgacccgggtgggctgtgacctgggatgggctgtaggtcctcttgagaggccagaagacagattatgtcttttcagtcttcactggcgtaagactaggaacatgatgacttagactttcgagctggtagaaaagtcaaatctcgccaggcgtggtggctcacacctgtaatcccagcactttgggaggctgaggcaggtggatcacctgaggtcaggagttcaagaccagcctgaccaacatggcaaaaccccgtctccactaaaaatataaaaattagctgggtatggtggtgggcgcctgtagtcccagctacttgggaggctgaggcaggagaatcacttgaacctgggaggtggaggttgcagtgagccgagatggcaccactgcactccagcctaggcgacagagcgagactctgtctcaaaaaaaaaaaaaaaaaaaaaaagtcaaatctccagcaagccaaaagctgaagacagcgtgtctgaggctctccgggttgtgaagctgggtgaagccctcccaaacctgacctcacagatctccagcatcattagcgctccatttattgaagggcctccttctcatcctgcattctccaggctctgtcctcccccagccagaagtgagggaatggccgtcagccctgtgctgagtcccttcactcctgctggcaagttctgctgggaagagtccacgagggtaggcctgcgtaagggaaaatttggaggtggcttcagagtcccagatgcttctgatcctttggacctgtgtgaggtcagagaagggcatcagcgttaagtcctaaatcttaattaccagtctgggcagaatttaagctggattagatccacagcatgacattaataccaacctcaaaccacgcatggctggccctcctatctcctcctgggatgttagatttttgaggccagaggccctatcttgttccttgtacccctaaagcctctcaagtagttaacttgtagattataaaaaatagtagctgactgtaggcatgaagatgggaacctgggggagagcagagcagtggggaaaagtgaatgggtttggggcctctggacttgttatcagcacaagaaaataacaagaagtgggtgtcagatgcgtcaagcttgattttcatgggaactctgacaacagatttgggagggcagctacaaagaggtttggggatcatccatttgtgtcaccctcacttctcccgtgacctaacacagagtggcctggatttactctcttttaaagatttctgtccatgtagttgcaaaggtagttccagggggcccctgggaagctcagcgcttcctgcctaggaggagcaaaagtcataatcaccttatctcctgctccagaggactcacctttagcctgggcattatgtaaggggctgggtcactggtgacatttccccgacactcattccccagcgtaaagctgatcaagcaaactctttggaggaaggccatcacgagaacacatggttttattctcgagccgggtttacccagtgtgactgtaaattacatggacctttctgatttgcacagacctcaggtttctgggttcagagcattttacagcagggaaaattagggaaaatcacagctgatccaccctttaggctaaaaactcaggctgcaggttagcattccccaacttggtatttttaaattcagcctcagccacaagatccaggagacaccagcatctccagttaggtagcagctctgtgcttgcttgttctgtgaaaaactaccctgtccagccactcctgcaaacggcgcttgtcagggagcattctggctcaatggaattatggaagtgtagccaaatatcaataatcatgtgtctggagccatagataatactgatgaacaaagatactgatttggtgactcacagagagttgcagctgttgctacagattgtcacaggtgatctgttccaagggtcccaggtactggctgcatcggaatcacctagggagcttgaacacaatttttgtgttgtgcccatgcttggagattccgcttcaggaggtctggggtagacccaggaatctaggtgactatgatgtgtggctacatttgggaaactcagctctcctcaactgtgttcttttatagggaggaaattggggctcagagaggggaagtggcccagcgttctccaggtagtcataagtggatgtgatcctgcctgttctgtcgactcccaaaccaggctttcttcccaattgctctcttggcctcctctgaaacctcattttagtcatggtgctccccctacgactgcttctagcaaagcactgagaccagaggagcacagcatgaggccactcagcccagggtggctcctgacactcacatcatccggcgactgtgattctcagtcacagattggttgggctatcctgggacagacgtgggcagggagtgaaattgtctttcatctgcctcaggggcattcctcctcccctacaccatcatggccatttttgggggaatcccgctcttttacatggagctcgcactgggacagtaccaccgaaatggatgcatttcaatatggaggaaaatctgcccgattttcaaaggtaactgaagggctcggtggggtgggtaagtggagcctctcaggaagggatttccatcagtgggtgggagctggggaccttcttctggaatcagtcaggccttaggcatccctgggagactgcttgagtaattaaggttttgactgcgtaagtggtgtgaaattgtcaaagagaaacagaataaacggcaatgagaagtaaactaatgtaaacattttaaagcattaacaggacatgtacacattttctaaaacatgttaccttgcaaatacatatgagtgactaacggcagggccacttttcccacggtggcctggagtccttggaatggaatggagggcagcacccacgtgtacccctctgctgggctgcggggctctccagtgccccgtttcagccttttgccgttgggccacccttaaactcggcctctgtctctccatctcacccactgcccagggattggttatgccatctgcatcattgccttttacattgcttcctactacaacaccatcatggcctgggcgctatactacctcatctcctccttcacggaccagctgccctggaccagctgcaagaactcctggaacactggcaactgcaccaattacttctccgaggacaacatcacctggaccctccattccacgtcccctgctgaagaattttacacgtaagtgcacgtaagtgaggggttggcctgttaggggcaggccacacccctggggtttggcttcttaaaaagaaggccagggccaagggctcctcacccctttctgagagatgaagctatcaggggtgggagtagcagaatttggagctgggaaactctacctcaagtgctccacggcctggccctgctgtgcctccttgcactttctcatgcgccaagtcagtttgctccaatgcgcccaagcccgtccctcccttcacattccaaaattactccccttcttccggggtcctcctctcagccaaatgtcatggaggcgaagcatcctagtactttgatagttcaaaactattcaaatggtttaatgtgtcaacttcgtaagtgggatctaccctttggaagaagatgcttgaggaaggtagttttctttaatgctggaatttcaggcaatggcagcccaaagagagagctactttggggtagggaagggagccaactccccacacttacacatccctcatgttcccaaaagccagtcacattggtcaaaggagttcaggtcccatccagcaaaggagaatccaggaagtctgcctttaggttgaacactcttcccagggtgttggccaaatgtgctttgtggtccttcaggacaggcagggccaatcccagctcttcctgggcctcagtgaccacttggtcctagcagcaccgtgtccatttgtcccgggcaccctcaaaggagcagcacagatgtgtgcccaggtcactctacagagcctctcaggggcctttctttctccttcaccccaggcgccacgtcctgcagatccaccggtctaaggggctccaggacctggggggcatcagctggcagctggccctctgcatcatgctgatcttcactgttatctacttcagcatctggaaaggcgtcaagacctctggcaaggtgaggaaggctctggctgctgacccaggcctgcccaggggcccacaggctctcaaactcaaaacccagtagcctggacagacagcactgtttccttccacaccaaacacattccatgatgcaccctctctctcttcaccgcatttgttagaaaattctagaagtgggttgggcatggtggctcacgtctctaatcccagcactttgggaggctgaggtgggtggatcatttgaggccaggagttcaagaccagcctggccaacacatcgaaacctcatctctacttaaacaaacaaacaaacaaacaaacaaacaaacaaaaaaaaacaatagccaggtgtggtggcaggtgcctgtaatcccagctactcgggaggctgaggcaagagaatcacttgaacctgggaggtggagatttctgtgagccaagatcatgccattacactcctgggcagcagagtgaaattctgtctcactaaaaaaaaaaaggaaaagaaaaaagaatattttctagaaatgggccaatgccaagaaccattacatgatttttttttttcaagattccttcaacccactggtagtaccacaattaataatcgtggcaatgacttactggaaacccatcatggaccatgttcagtgctttttatacactggccagtgctattgtttcctgctagatactccctcaaccttacagatgcatagtgggctcagaggtagttctcctggccaacctgaatccgatccctgtgtgactccaagggttgtgatctttctgccacaccacctcgccctcctttctcaaggtcttcaagaataaaagacactgacatccattcacccacctccctcccctcccctcccctcccccgctcccttctccttctcccctcccctcccctcccctccctggaacagcatggtgataacccttcttccttacaggtggtgtgggtgacagccaccttcccttatatcatcctttctgtcctgctggtgaggggtgccaccctccctggagcctggaggggtgttctcttctacttgaaacccaattggcagaaactcctggagacaggggtaagatgatgagggaaatatgtgtacctgtctgtcattttactaaacgaagctggtcctcctccaaataggacagtagggacaactgaaatgtggcttcagtgtgcaagtctgcaatgatactttaaccaagaaatacaagcattaaagtacagttgaggccactggatgggtttatgcctgaatcataggaagagaaatcacatttgttggcacttggtttatggctatgcctggaatgagccttaaaagctgtttttctgcctctgcacttagccacatggaggcaggagtggcgaccctgttggtgccagggtaagcctgtgtctccccctcaccccatgcccttacccctgctgtgttccaggtgtggatagatgcagccgctcagatcttcttctctcttggtccgggctttggggtcctgctggcttttgctagctacaacaagttcaacaacaactgctaccagtgagtatctggggtccccaagcaaagcttgaaagtggcgtgagtgaaagtcagctagtgtggaggaaggtgattggaccgacggcctcgaatctggccaggcttaggccttgataccactgcccctcaggggtgctgcaggcccctgaccagctcacccatggccagagcactcatccaggccgtggcttcacctgggccactcaggctgagaggggccccatgcccttcggttttgtcagcgctcctgtatataaaaataataagaggctggacatggtggctcacgcctgtaatcccagcactttgggaggccaaggcaggtggatcacctgaggtcaggagttccaggctaacctggccaacatggcgaaaccctgtctgtactaaaaatacaaagattagccaggcatggtgttgcacacctgtaagcacagccacttgggaggctgaggcacgagaagttgcagtgagctgagatcttgccactacactccagcctgagtgacagagcaagattccagaaagaaagaaagagagagagagaaagagagagagagaaataaagaaagaaagaaagaaagaaaaaagaaagaaagaaagaaagaaaggaaggaaggaaagaaaaagaaagaaagaagaaagaaggaaggaaagaaagaaagaaagaaagagagagacggggtgcggtggctcccacctgtaatctcaacactttgggaggccgaggcgggtggatcacgaggtcaggagatcgataccatcctggctaacacggtgaaaccccatctctactaaaaatacaaacaaattagccgggcgtggtggcgggcgcctgtagtcccagctactcaggaggctgagacaggagaatggcgtgaacccaggaggtggagtttgcggtgagccgagattgtgccactgcactccagcctgggcgacagagtgagattccatcaaaaaaaaaaaaaaaaaagaaagaaagaaagagaaattgcaaagcaagtttacaaaaagctgcaacatacaattaagtagttaggtttaactagtcaatgtgtttaacaataaaaattgtaatgtgattatttgtattatgtataaacaaaaagtatgatgatcacattattttgactaacacaaaataccataatttttcttttcttttctttttttttttttttttttgagacggagtttcgctcttgttgtccaggctggagtgcaatggcgcaatctcagctcaccacaacctctgcctcccgggttcaagcgattctcctgcctcagcctcccgagtagctgggatgacaggcatgcgccaccacgactggctaaatttgtatttttagtagagatggggtttctccatgttggtcaggctggtctccaactcccgacctcaggtgatccacctgcctcagcctcccaaagtgctgggattacaggcgtgagccactgtgcccagccaaaatgccataatttttgcaacaaaatcctatttcagaaattttaacagaacaggaaatgttacaccaattatggttttaaatatcacccactgggccaggtgcagttgctcaaacctgtaatcttagccctttgggaggctgaggcaggaggatcacttgagcctaagagtttgagtccagcctgggcaacatggtgagatcccatctctacaaaaaatttaaaaattagctgagtgtggtggtgcatgcctatggtcccagctcttcaggaggctgaagcaggaggattgcttgagcccgggaggttaaggctgcagtgagctgtgttcatgccactgcacttcagcctgtgcaacagagggagaccctatctcaaaaataaataaataaataaataaataaatgtcacccatcatctttagacttaattttaattgatcacagatggcagcatccatcaatctctttgtgctatgcataagataattgtaaaactgatttttttaaaggtgggagggagattcacatgtaccctaagcaatgtggccttgcactgggacaccaccctgcagttgtatgatgaggctgtcatttaaaagtgtgagatcaggagtttgagaccagcctggccaacatggggaaaccccatctctactaaaaatacaaaaattagccaggcgtggtcgtgggcgcctgtaatcccagctacttgggaggcggaagcaggagaatcacctgaacccgggaggcagagggtacagtgagctgagatcaagccactgcactccagcctgggcaatagagcaaggctctgtctcaaaaaaaaaaaaaaaaaagaaaaaaaaatgagggtatctctctggctggcagtctgtgacttagtttgaagataaagcctaaatctgaggatctcacaaatgtgaggctcaggccctgtcctggcccccactccaacctgggccctgctccagaacaaggctggtttgaaatggagaggtctgtgctagcaggattgccttttaaagcacccctgactgctcttctccctccaccatgtgtggtggtcatggcagtcagagcttcaggcctcggcagctgggttctgggagaaggcgaagggactccgggacaggcttgaggttccttgagttcagcctgcttgtccttgctgtggccgccctgtctaaggcagggcaggcacacggacagatgctccttagacccctgatcttggaactgtctcaggcggccccttgggttttcccctccagagatgccctggtgaccagcgtggtgaactgcatgacgagcttcgtttcgggatttgtcatcttcacagtgctcggttacatggctgagatgaggaatgaagatgtgtctgaggtggccaaagacgcaggtaggacctcgggttctatgcaggtcccttgctcctactgagttgctttgctttgaatctttgtaaagatctaacttttgatttatttctaaatgttcctgaaattttccaaagaaggctgggcatggtggagttcaagaccagcctgggcaacatagtgagaccctgcctctataaaaaaataaatgagctgggcatggtagtgcacacctatagtcccagctactcaggaggctgaggtgggaagattgcttgagcctgggaggtcaaggctacagtgagccatgatcacaccactgtacttcagcctgggtgacagaataagaccctgtttccaaaacattttttattcaaagatttgagagaagctcgatgccttagagatctttccatgtgttcaggccatgcagggacagggcaactcccttggcacccagttctggggcctccaaaatctatgggcttgaaatgatgactctgatgatggctttaaaaccagtgggtttgcttcctgtgatggtcttgtgatggctcaaagtctagtaagcaaatatcatttatccttagaactgccccttgcagaaaaagaaaatctagccaatatgaccactctattttaccgtgaagtttttgtggaaaaagaaaagagcaacagagggagaaaaaacagatgatggcatctagtgggcgaggtcccagggccttcttgttacaagcatgttagcatgcttgtatctttggcctgattcggtgctttgaccaaccccataccccaaacgagggcacccctagctaacccatgagaggctgaagacatgtccctcacactttcaaaagggactttaaaatagaaagaggtctttattccaaagcctctgtgactctacggaaatcaatttaacatttcctactgttctgaagctgaagacatcagagggggctaactgtcatggactttagaaatatcaatcctggtcctgagaaatcccatggaattgttatatggtggaaactcttattctcatgtgcagctttgccagtctctgggtcttggatctgttacccacccccagggttaatggagggcacacagttttcaagatggaagccccacccttcctgcctcccaggaactggggtggccacgtcagacggagtagagtgtgaggacgcacttggtgtgtgtcaaaacctgattcacacataaggtcttgtgatgagaattgtaactgttgttgtggctgagttttcctctgtgacatctttgtaggacaggtcttgtcaaccacctcctcctctctcccctctgtctcaggtcccagcctcctcttcatcacgtatgcagaagcgatagccaacatgccagcgtccactttctttgccatcatcttctttctgatgttaatcacgctgggcttggacagcacggtgaggaaatgggaaggggaaatgggctgtgggaggatgaagaggaaaggaggaggactcagctggactcaattccctcccatccctggccatcccaggcagctttggctactcccttctggtgctccagacccccggctgactcctcggcatttaccaccctctggtacattcgagtcattaatgggataaagtgggtcaagcgccaggcgcttatgaggcccaaggctcacatatgtgaactgttattaagcactgtcccttggcccaattatggcgcctacaggccggggcgaggtctctcctgggtctctgctttgccaagggttcagttcagggcctggaattattagtgtggagtgagtctcagctttgagttggcctttctggtgcaaacggagtctccccgagagacctcatatattgaagttctgtccacgtgtgctattttgtttcctggctctccttagtgatgggctttaaatgacagtgtaaaacagggaaatactctttgagatgcttacatggtccagcgagccggggaactggtgatgatcagcttgaccagtcacttagcaaccttacccctccctcctgttcactgtcctgaaggccacagccttgtcccaaagcctccaccgtgactgcttgcctgtacctctcagtttgcaggcttggagggggtgatcacggctgtgctggatgagttcccacacgtctgggccaagcgccgggagcggttcgtgctcgccgtggtcatcacctgcttctttggatccctggtcaccctgacttttgtgagtatcatgcccctcagctttgagttggcctcccctagggcagcagaacgctacaggaagctgttcgtctccttccatctcacacagtgccctggctttgggaccaaaggaggggaggttgttactcccattaaaaggtttgtcatcaaggagaagaaaagttgtttcttgtgcatctacttgcagattccgtgcatagtatccaggggctgtcagcattttaccgcagatcccactagatttcaggcttcaaaaactatctggagaaaattaggatttgcttttccagcctatttccactctttagagctgctttcttgaggatactgccctgacgttcttcacgtcatgtgtgtaatgccgcttggtctcctccagaatttgcaatggtaaagaagtcacaccctctctagagatcctttttttttttttttggtagctgaagtaaatactctaaggcagattttgcaaatgtgcatctttaagccgtgaccccgatggccctggagtgggggtcaaggggactgagtggaaccccagtgagtcatgatttaggacagaaaggcaaaactgtgaccaaggcccttaatgtgtctggtatcctgggcccttctggattcagtctttagaggcagggattctccagggtcgtgtccacagcaggtgttcaataagttgaagaaagtttaaaatagatcccaaggccctttggagtttgtctcttaaaatttagtggggtgaagaaatgagaagaatgaactacataggatgggaagaggcgtctgagtgggtaaaacctgcccacactgccactgcaaaggccagtccaagaacagtccaagaaacagtttcttttttttttttttttggacagagtcttgctctgtcccccaggctggagtgcaatggtgctatctcagctcactgcaacctctgcctctcgttcaagcaattctcccgcctcagcctcctgagtagctgggattaaaggcgtgtgccaccacgcctggctaattttcaccatattggccaggctggtctcaaactcctgacctcaggtgatacgcccgcctcagcctcccaaagtgctgggatgacaggcatgagccaccgcacctggcctaagaggcagtttctggggtactcacgttcggtcccaggtgggatttttccagaatgattctaagtgaggaagcccctgcaggtctctgtagttgggaggggtggctccttggagggccctcacccaggctctgctctcccctccagggaggggcctacgtggtgaagctgctggaggagtatgccacggggcccgcagtgctcactgtcgcgctgatcgaagcagtcgctgtgtcttggttctatggtaagacgcttccttcagccagctgggtcccttctacaccatcagccagcacagtagcaaagggctgatttcaccaaaaaaggctgtgaggggcagtttacaagatgtgacctcccgatgatgggtctgtaaaagagtctcggccaggcgcggtggctcacgcctgtaatcccagcattttgggaggctgacacaggtggatcacctgagatcaggagttcgagaccagcctggccaacatggtgaaactccatctctactaaaaatacaaaaaaaaaaaaaaattagccgggcatgatggcgcaagcctgtaatctcagctactcaggaggctgaggcaggagaattgcttgaatctgggaggcagaggttgcagtgagccaagatcgcgccactgcactccagtctggacaacagagtgagagtctgtctcgaaacaaacaaaaaacccaaaaacaaacaaaaataaaccacttttgcatgttatttgttacacatattatcaaggagggggcacattttgggttgcacacagggctgcttttgttttgttttgttttgttttttaaagaagaaatcttcccacctccttggcaattcagacgaccaagttcaagtgtgtgaatctccatagacctgccctaggaactgctgggacctctcggggaagcaaccacagagcaccttccccttctcaatttctcactcttctttgggagttctcagttctcacttccttaccagttactttttatagaagaaccttgatcttgatctggcatatgaatgggcaatattgtggttaaaaatttcccttgaaagtttccagtgtcatggtcaaagtcagtgtctgtcaggcgggttcaccattcctggacaaaattcaactgttttataataacaatgaaatcagatacacactcagctctcaggaaggcggtgtggcaccaagaagggggtgtgtgtctcttcccagatgcccatccatcctcccaaatgtccatccatccttccagatgcccatccgtcctcccaccctatgtagaaagagtcttgcttgctataaaaatgcagttttgtgacaagtcccccagccccactttcggaccagattgttgtcgctgtactcctcctagagagaaattccagagctaccctgtgtgtccggggtaggaattccggcttgtcatttccccttgtcattcccagtgctgatcctgtgactctgactctcccagagaatcagggcacagcagcacagcccatgtcctttcttagtctctgcctctcttccccttgggcggttccaggcatcactcagttctgcagggacgtgaaggaaatgctcggcttcagcccggggtggttctggaggatctgctgggtggccatcagccctctgtttctcctggtgagttgccatttcccttctcctccttgccctggcgaaagacttcccccagacacataaaaaatgaattgtaatggctgggcacggtggctcatccttgtaatcccaacactttgggagtctgaggcaggcggccaacatggcaaaaccccgtctctacttaaaaaaatacaaaaattagccgggtgtggtgatgggcacctgtaatcccagctactcaggaagctgaggcaggagaatggcttgaacccaggaggcggaggttgcagtgagctgaaattgcgccactgcactccagcctgggtgacaaagtgagactctatttcagaaaagaaataaatagtattgaagaataacatatacagaaaagtattaatatacagctcgtaagtgtacatctcaaagaaatgttataaattgagcacacctatgtagccaaaaccataccaggagacaaaaacatgaccagcacttcagaagcccctcttgtgccccctcccagccactatgcccaccatggttccccacccttctgactcctaacaccatggagtagtctgggcttcagtcactctggcagtgatagtgatgcataacatttatggagcgctaaatgccaggccagacttcaggctcaacttacactcacttttctataaatcctcacaatagttctatgaagtggttatagttctggcactcccattttacatttaaggagattgaggctgggtgcagtggctcatgcctgttatcccagcactttgggaggctgaggtggttggatcacctgaggtcaggagttcaagaccagcctggccaacatggtgaaaccccgtctctactaaaaatataaaaattagctgggcatggtactaggtgctactcaggaggctgaggcaggagaattgcttgaacctgggaggcggaggttgcagtgagctgagatcgcgccattgcactccagcctgggcgatagagcaagactctgtctcaaaaaaaaaaaaaaaaaaaaaaaagaaaagaaaagaaaaaaggagattgaggcttagcaatgtaaagtgaagggtccaaagtcacataacaaaaagaactgttcaagaccagggaaggatctgctatgctcttcatgggggccctggatggggtactagtacttctgtgtttacaattttgtatgcatcttcttcaagatgatacaaagctctctaagcaaaaatccacgtcaaaagtagaatccatttattaccaaaggacctgggtgagaaagttgagtcccaagggttgtccacgtgttgagatgtgttcaatattcactttgtccttggttcacgtgcccctgtccaagatggataacagcctgctggcctgccaagtgtgtgctgaagtagcctggggtaaactgatgtcatgcacaccagcaggcactattcttcagttctttcatttatctgtaactttgttttttttgtgtttttttttttttttttgtcttttagagccagaaatgttgttagattcttccttcagtccacctccagcctattaggagtatatgggctatcccattttgttttaggacatctctttggcatccagctgttctgtgtcccctttcaaaacagctgggtgcagtggttcacacctgtaatcccagcattttgggaggccgaggcaggtggatcccttgaggtcaggagttcaagaccagcctgggcaacatggcgaaaccctgtctttactaaaaatacaaaaattagcaggacgtgaacaagactcagtctaaacaaacaaacaaacaaacaaaaaacaaacatgaaaacagccctttttgtattctgtgttttgactttcttggggtaaccctttattttttgtacttcttttgtacccacacatcttgacattaacttatctatgatggacaacatgcttgttcttgtctctgtgacactgcatgtgtctctctgtaccccagaattcctctttgacttcctttcccccagaccctggaggtttccaaaatcaaagccagtgtttgcaccaagcagcacatgttcccaggctgcagtgactctggtgcaagctctgggctcctgagatgttggcctcggagctccttatgaccttatcagcttgctgatgcatttaggcacatttaaaatgcgtgtgtttttaaatccagaagttttagttgttttcagtgagagggttgttggaaatcgcctagcccatcctaccagaagcagaagccctgacataaatgggttattaatttatattattaccagtacttctcaataatctacttaaatatttttatttgtttttcaaaggaagaagagtcattggattaattccttgagggcagaaagatgtttgtttgtttgtttgtttacttccatatttattccccacgcagtgaggaaatgatgtctaggggagacttgaaggcaagtgaaacattcactgtgggtataaaatttaagaaggcaccaaagagctcaggactcaggataaatattattttcacacaatattttttaaaaataaaaattaattcaaaaagatccatgattaacaaagtatcaacattttcaataaacacaggagccagccctgtacttgtacatcgtacttcactcgctttaccctcatctggccctgttagatcctgtcttttaaaaaattgtaataaaatattatttattttgattttggctcctgctgaaatgtcgtgcctgaggtgagtgcctccatgtgccctggggcttggggctgttcgtttctgtcaatttcctgctgtcagactgggtacactcttgatgcacagtcattgagtttctttgcccaggaaaacccacgtgcagctttggatgtgggcgcactactcataattcccatgatgtttgccatactcacccctctacagccaagtgccctagtgcctgagagaggcaaatctgtcttccacttctacgttcacttaacagatcccctgctctgggcttcttaaggctgctttaggtaaacaacaagtagcttactaaaaatattctttttcactgcagccaagttaaaaaaaagaaaatattgtgtacgagtagaggccaggatgtgtgagggggtttctgaagtagcacttgccccaaccggaggttgagtcccccaatgactgagtgggatttcacacacctgacattaagagacaagcagccgggatggctcctaaccagatcttctttccctgttcccaaaccatctttcttcatagccggctctggggatgaggagcctgggttaggaggaaggtttgcaattgaccaggttcctgttttgaaggcttccacctagacttaagatagcaccgctcagaagatggatgtgtgtttagcaatttcccattttattacctgcagacaaagaaaaaaaaagatataaatagatgtttaaccacacaaataattcacattactgtcttctttatgactgtgaaataataaaataaaattaaatcaacagcaataacaatttcggcacagtggttactaggcaaaatctggaaaccaaattgaaataagaaaactcataaactgggtgttgggagcacactgtggaatttttcttggtcaaaattctcacagagtgttcaagtgaaaggtgtattaagctgctatttttccttccataattcctttcatgatgaggacctgtggcaggcagacattcattgttgagatgcctagtggcagagccatccttgttgaaactccaggcgatgcagcttaatgcagaaggcagagagctcaggaaaatgggagaaggacacacccccaggagcctgagtcctctctgggtcttgagaaccttcttatctttcctggacatcaggcaccttccgtctgaccaaaaacaaccacagccagaaacgcaaggcaatgaaaacaaagcagagagaaatatgaagcctggggcctggcggggggctgcggagaggtcacccagtttattcctctgccttctggcaagacaaggcccaaattactctcaaggttgccagtctctttgcctgggcagaggcctgtgctgaagtgggagctgcaggcttcagccccgactgtaggggcagctgtagggctgctgcaacatccccctataggaagtgagggctggggaggaaaatcagggaaagcacctggctggtgtagtcttgcagcttgggtacagaagttggtaattctgtgtgtcagagttcaatccaggatatatcacatcttgggaatttcctgaaagtatcttagctttagcatttggtgtttgtggtatcggaaacatctctatctgagtggatattgttaaggtttttaatgtttcttggaatttctgttttagttcatcatttgcagttttctgatgagcccgccacaactacgacttttccaatataattatccttactggagtatcatcttgggttactgcataggaacctcatctttcatttgca

SEQ ID NO: 780 - DNA, 18541 bp, Homo sapiens
  source 1..18541: mol_type = other DNA
aggtggggaagccatcggacgtcggcggtgaggtacgtgcagcggcggccggtgggcgagactatttgagagtgtgcgggccgggatgttctcggcctgtggggaaatcacgccaactccccgcgtgggccgggggctgtctggggatatgcgcatgcgcgggcgtgcctcgcggcttgagggcgcgcggggcgtgggtggctgcgcgcgcggggggcgcacgtggggcctgaggggcgggggcggtgccgggagtcccgccacgtcagtctccggccctgagccaatcccgcgcccggcctgccgcgagggggccggttgtgccgggaagtggctccagggagaagaggcctcttccctcacccgctgtgggagctgcgccccgaaagcctgccccggcacgtcgggctctcctgacccgccaagaccagagagccgttggcgccctccgcccgggcctgccggtccgtttattttaagaagctttgtgcgcctgctgtggggatttctgatccaggctgcgaagaatttcgaagtctggaaaatagcaactgtgtttgtttctaaaggatcttctcctgacccagcatcgctcatcacaatgaagaaccaagacaaaaagaacggggctgccaaacaatccaatccaaaaagcagcccaggacaaccggaagcaggacccgagggagcccaggagcggcccagccaggcggctcctgcagtagaagcagaaggtcccggcagcagccaggctcctcggaagccggagggtgtgtgccagctctgcgttgccagcgggcagggggaggagctgtggggtcggcctcgcttctggacttacaggccgaggccaggttgtccgggaggaggagatgtagaatgagaggacagtgctgggggccgcggtcccccctgcgctctggcgagttggcggagctgccccctctaagcacaggaacagagttctggagagaagctccgacgggattaagtcaggtggcagccaaacgaggcacccagtcaggaaatccaggtcccgttagaaacacctcagccaccagcagctaactgcccttcctgtttgaggcatttctagaatgatctgaatggcaagaaatggttttgtgggggggaaggagatggactagaagttgctccgtgccatccctgtgtgctgatgctttacatacttttatgatctaacaaatatgttcgggtggtagtgagaaatagttgtgtcattttacaagtaaacagacttaaagaagttaggcaacgattactataatttcttgatttaaaagatgtttcgaatctaaattctgacaggaactagatttgctgaatgatactccattcttgcttctcagtttccataaaaaaaaaagttaggcaacatttaactcaaactgatgagtttggctgggcctgaaaaatcccaaccagtggtataatcgtcttctttctcactctacccctcatcctctcctgctgtaggggctcaagccagaacggctcagtctggggcccttcgtgatgtctctgaggagctgagccgccaactggaagacatactgagcacatactgtgtggacaataaccaggggggccccggcgaggatggggcacagggtgagccggctgaacccgaagatgcagagaagtcccggacctatgtggcaaggaatggggagcctgaaccaactccagtagtcaatggagagaaggaaccctccaagggggatccaaacacagaagagatccggcagagtgacgaggtcggagaccgagaccatcgaaggccacaggagaagaaaaaagccaagggtttgggtgagcagagggcggctctttgtgaagctggtgaggagagggagtttggacttgacgttctctgggccagtctgttctgccaggattcaaaggaaaacggtacttctcagagcagcaagtcactctagtctaatcaaagccagggatgtgggggccacggcatagagagatgcaggagttaccagcacaaagccttctgggttttggagcaactggagcttggcatgggacctgttctctctttgagaaaatggagacgggaggctagggtaggctcctgtgccagccagtactacctgctgtgtgaccttgggtgtgtcccttctcctctctgggtcttagtttatatttctctttacagtaagaaaattagactaggccagagttgaaaacccaaatatctgcataagctgggctggccatggggccacctgaagatggaggctttactgcttcctgattagttgctctcagctagccaactgagagcaggcaaaactacaggctgggtgcagtcaggctttttttttttttttttttttttaaataaagaaaagccagaaatctagagttatgtgagaactctagattttttcatagttagcagctaaaatggtaagagccaaacaaaacccatccgtgggttggatttggcacacatgcctgcgaattgcagtctccatgctgatctcttgggcccttctggggaggcagagggaaggctccctgactcagtcacaggcaatggggaataggcagtgacagtcattttacagcagggtatgtatgtttaagagtctaggccgggtgtggtggctcacgcctgtaattgcagcactttgggaggccgaggcgggtggatcacctgagggtcaggagttcgagaacagcctggccaacatgatgaaatcccgtctctactaaaaatacaaaaattagctggacatgctggcacacgcctgtaatcccagctacttgggaggctgaggcaggagaatggcttgaacccgggaggcagaggttgcagtgaactgagattgtgccactacatccagcctgggtgacaagagtgaaactctgtctcaaaaaaaaaaaaaaagaatctagaatctaagtcgagtgtcattatatccatgttttattcctattcccttttccccttatgtatcctcttactttaaagaggaactttaaaaaatcttagggacgactaggcagagtggctcacacctgtaactccagcactttgggaggccaaggcaggcagattatgaggtcaggagttcgagaccagcctggccaacatggtgaaaccccagttctactaaagatacaaaaaatcagccgggcgtggtggcacgtgcctataatcccagatactcgggaggctgaggcaggagaatcacttgaacccgtgaggcagagttttcagtgagctgagatcatgccattgcactccagcctgggtgacagggtgagactccatctcaaaaaaagaaaaaggaaaaaatcttaacgtcacatacatggaaagtatcatcttcttcaccccccacccccaactgagatggagtcttgctctgtcacccaagctggagtgcactggcgcgatctcagctccctgcaagctccgcctcccgggttcacaccattctcctgcctcagcctcccgagtagctgggactacaggcgcctgccaccatgcccggctaatttttgtatttttttagtagtgacagggtttcactgtgttagccaggatagtctcgatctcctgacctcatgatccgcccacctgggcctcccaaagtgctgggattacaggcgtgggccaccgtaccctgccttttttttttttttttttttttgagatggagcctcgctctgtccctaggttggagtgcagtggcgcgatctcggctcactgcaagctccacctcctgggttcacgccattctcctgcctcagcctcccgagtagctgggactacaggctcctgctaccatgcccggctaatttttttgtattttttttagtagagacggggtttcactgtgttagccaggatggttttgatctcctgacctcgtgatccgcccgcctcagcctcccaaagtgctgggattacaggcgtaagccactgtaccctgccttttttttttaattaattaatttttttagacagagtctcgctctgtcaccaagctggagtgcagtggcgcgatctgggctcactgcaacctccgcctcctgggttcaagcgattctcctacctcagcctccggagtaactgggactacaggcgcgtgccaccacaccaagctaatttttttgtgtatgtctttagtagagatggggtttcaccatgttaggatggtctcgatctcttgacctcgtgatccgcctgcctcggcctcccaaagtgctgggattacaggcatgagccaccttgcctggccgaaagtatcttcattttaaagttcactgtttggctactctgttgacaagagtttagtatttctcaaggaggctaagatacctattcctttttggatcctacctctatcaggagggtgggccttccttgcattgaaacagtatgaaacagtagccctgaattcataagtgggacacctttcttctattggtagagcaggcagtttttttctcctgccaatggtgcctactaaggagatttcactagggtacagtcgttcatttgataagcatttgttgagcatatcctctgtgatggtactatggacagtactggggctatagtgagggcaggattgagttggtccttatggcaaggaaggcagctaatcaacaagcaaaatataaagtatgatggggagggctgtcttcagcactcatgagtgtgagcccaggcctggaggggacacctggagaagagggtgcatgtctttgctcctgtgcttttcagggaaggagatcacgttgctgatgcagacattgaatactctgagtaccccagaggagaagctggctgctctgtgcaagaagtatgctgaactggtcagttcccccctccgcgggcaccttccctgcgttgggaaaatcagcatgccacctggtgtaaggttgggggtgcagagtcaagtaggtggcttaattcctgttcagcttttctctgaactatctgttaaatggggaatcacttccagccagcctcttcagggctgtgcagcaagaggagaaactgcatattccttgaaagaaatttctcaaagaatgattccaaggtggtagagcccttgttcctggcctgagtccaagacaccttgtgatcttgatgcttcttcctcaaatacagatgcatagagccattatcacagttaataaaactaacactagtcacttgatactttttccttttactccagagcagtcttcttgtcactgcctcctcatattccccatgacattgacttttaacagaaactagactagctgtcttgtaggatgcccccttctagctttgtcatctctgtggtatcattttacttctttacctcctggtacatgtaagtgaagtagaagttagctctaaagcttgatccaattcagcttcaactttttgacaagaattcttcataagtacttcatgttccatcacaataaatgcaaagcatgctcttcccactttgttgtaacattgttcagtgggttgggggtggggcagccagattcttccatcatcaggtcccttgtcagaatttgaactaacagatttatccattgatggtcacagcctgtgtatgtatgtatgtatgtatgtatgtatgtatttatttatttatttattttttgagacggggtcttgctctgtcgcccaggctggggtgcagtggcacgatctcggctcgctgcaagctccgccttctgggttcatgccattctcctgcctcagcctcccgagtagctgggtctacaggcgcccgccaccatgctaggctatttttttttttttttttttttttagtagagacggggtttcaccgtgttagccaggatggtctcgatctcttgacctcgtgatccgcccgcctcggcctcccaaagtgctgggattacaggcttgagccaccacgcctggcctatttatttatttattcagagtcagagtctcgctctgtcaccaggctggagtgcagtggcgcgatctcggctcattgcaacctccacctcccaggttcaagcgagtctcctgcctcagcctcccgagtagctgggattacaggtgcatgtcaccatgcctggctaaattttgtatgttttagtagagacagagtttcagtatgttggccaggatggtcttgatctcttggcctcgtgatccgcccgtctcagcctcccaaagtgctgggattacaggtgtgagccactgtgcctggcctctaagtatttattttaaaattaattcattccacacacatttattaatattttcctgtaaggaactttactcatctttaaaatggggaatgtcatacctgcctaatgacattcttgtaaggattaaataaaaggtataaggaagataagcacccttttggagtgatccagccaggggaaaattgctgatgcaagagaggaaatgagttgctagagtggtgttgtgagtagaggaggggagctgaggcctgcccaagaagggggcttggctgtggtaaccacatggctaggtctgtgtgactggaggagaggacggggcaggtggactggtagatgtgcagcttgtgcccctgattctctagtttcttctgtgttttgagatttgatgagaacgatgaaatagttgtctggaaggagaggagtgtgaatagcatatgcattgtattgggattgctggtcttcctgaaattggtggccatgaatttaaagtgagactcttcaagtagggttgttatagtactggtgtaaagcaggaaggtgctttactagggttgcagtactactggggaagggccaagagagttgagggtgtaagaaatccaagccaggtaatgtagttattttaaaggagagtggaaggatggttgagtcaatggattggaggtcctatagggtaagagactttctgaggatcacagatactgattggaatgagctaaaaagataggtgatggtagtcctggactgggatgctggaaattgagatagtgggtgtgctctctggtagtgacaaagtctagatctgcgctgtccaagataaattcgtctctagctaattgacatgtggccagtttgaatttgaacatgctataaatgtaagatacacatcagcttttgaagacttaagcaaaaacaaagaatataaaacatctttttgtgagagagtgtctcagtcacccaggctggagtgcagtggcgtgatgtcctgcttccaggttcaaacgattctcctgcctcacagcctcctgagtaactgagattacaggcgcatgccaccaaactggctacttttttgtattttttttttagtagaaacggtttcaccatgttggccaggctggtcttgaactcctgacctcaagtgatctgcctgcctcagcctcccaaagtgctgggattacaggcatgagccaccactcccggcctcacttttttacattgattccgtgttgaaattgtaatgttttggatattaggttaaatacatatattactaaaattaatttcacctgttttttacttttttagtgcggccagtagaatatttttaattacttatgtggtttgcattatatttctgttgtacaggcctggatagggtcatgggaggggaactgagctggggaaaggagtgggtttgtggaagaggtgatggactgtgaggccagggagttagaaggattatctgttgatactgaagtggccacaaatgagaaaagtaattgtgttggggagagcgctgatgaacgcagcgctaacgttttgaaggaatgcgagggagcgatgggggtctgtctgttaataggcacaaggtacggtagcaggtggtctcatcctcgggcatgagtgtccagcaagttggggaaatgcaacagcttgaagtggctctagtggcccagagtcagagctggaataggaattggcatctgctggctgtgtggcccctgcttgccctagtgagttaccatttctctgtccctacggtggagcctttggggttattgtgagttcatgggaggagcgtgtaagcaccggcacagcatcagcccatgagagtgctcctggcctgagagggtaagggtcagggcagctcaggagaccctagacctgcatagtgatccccccaccaggaaggccccacaagatgctcacctgccctccctatccctgtccccagctggaggagcaccggaattcacagaagcagatgaagctcctacagaaaaagcagagccagctggtgcaagagaaggaccacctgcgcggtgagcacagcaaggccgtcctggcccgcagcaagcttgagagcctatgccgtgagctgcagcggcacaaccgctccctcaaggtaggcctgggccccctggaacaggtgactctggtttccttgacttccacttaatgtttctttcatgggctttcctcttaaaaagtagtgcaggctagggccaggcgcagtggcacacataagtgattaaaaatcttctggccactaaaaaacagaaattaattttagtaatatacttaacccaatatccaaaacattacaatttcaacatgaaatcagtgtaaaaaagcaaggctgggtgtggtggctcacacctgtaatcccaacactttgggaggctgaggtggatggatcacttgaggccaggagtttgagaccaacctggtcaacgcagtgaaaccccattctactaaaaatacaaaaattagccgagtgtgctggcaaatgcctataatcccagctactcaggtggctcaggcatgagaattgcttgcacctgggaggctgaggttgcagtgagccgagattgcatcactgcattacagcctgggcaacagagtgagactcagtgtccaaaaaaaaaaaaaagtagtgcaggcttgtggcatagaaatacactttctcaataatgccttacgttaagagagtactgcttgtaatcatttgacatgtattagataaggtgaaggataaagtactaagagaatccataatgcactggcgttagtatttctcaatgaaatgacagtcccctggtaagcggaggcctggctctgacaagcagctcttgtcccagacgttggtcagtcaggaacctgggtccttcccatgttctgctgcttctatggtgaggtcagtctgtggttacaccaagtttaaatacagccttttaactttcttttttatatgtaaaatcttacatgtagtttttagaatgaaattattatacatgtaccatttcatatcctgtgcctttttttcactttacataacatttttccctatcagtatgtgtagggctatcttctcattatatggatatattatatcagtgccctagttaaagcattttgggggttgtttacaatttttcattattacatatagaactatagtgaaaattcttgttatatttatcactggtcagttatatagaacttatctgtaggataagtcatggaattgaaatggctaggtcacagtatatgcagatttttcattttaatagattttgctggattgccttccagtgagggggcagtgtgccttccccatcaaaagtgttgagtgcctaattctgcacaactttgcaaaccctgggtgttactaaattttaacagcttggtctctgggggtacagaggggacaaatgcacattaatctgaaatctggaagaataggccttaggagatccgacttgcttcagaatggcacttagcacttacatgtgtgcatgtgtgcctgcattttttcttcctttttttttttttggggacggagtcttgctctgtggcccatcgcccaggctggagtgcagtggcgcgatcatagctcaccacaacctccgcctcccaggttcaaatgactcctctgcctcagcctcccaagcagctgggaccacaggtgcacaccatcacgccggctaatttttgtattttagtagaaacggggtttcaccatattggccaggctggtctcaaactcctgacctcgtgatccgcccacctcagcctcccaaagtgctgggattacaggcgtgagccaccgcgcctgccatgtgcctgcatttttctagggggagaatctcacttgatgtcacctgatatacagaggggcccattggaacccgcattgcacaacatcctggagtctggctactccacgctttgggagcagggagggctgttggcagagaccatctgtggactagctgggggacccttgtgaggtagcagtggatgatggctctcgggctgacttctttgcccaggaagaaggtgtgcagcgggcccgggaggaggaggagaagcgcaaggaggtgacctcgcacttccaggtgacactgaatgacattcagctgcagatggaacagcacaatgagcgcaactccaagctgcgccaagagaacatggagctggctgagaggctcaagaagctgattgagcagtatgagctgcgcgaggaggtaagggtatcacggacagcagtcatggcccagaaattgtgaggttttgagtgtgtgctaggcactgggacagtaccttttcaggcttcatcccattctccctttcttcctcctcctcctccttgggaggagagtaatgttattcctcatagataaaaaacaggtgtggagaagagactcacttacagccacacagccccaggtccacagtgccttgtcccaaatgactgggccaggcatcttttggaattagaactatccacattttagaatggaggtacatgtatggactgtgtgttatatagcaccctcagcagggccttggggaagccagacacattaatgtatttatgcagtagaacttccaaatactcacctacattatgggcttacaatgatgcaggtcaagtctggctgccagcttatgacaatttccattttcagaactttgtagaatttggaattgcaggggaggggtgtacctgtgatcagtgatggactccagagactgtgtccactgattccttgctgctcctgccactcaaaaggcagaatttatcaggctgggcgtggtggctcatgcctgtaatcccaacactttgggaggccaaagcgggcggatcacctgaggtcaggagttcaagaccagcctggccaacatggtgaaaccctgtctctactaaaaatacaaaaaattagccaggtgtggtggtgcacggctgtagtcccagctactcaggaggctgaggcaggagaattgcttgaacccaggaggcagaggttgcaatgagccaagattgtgctactgcactctagcctgggtgatataccgagactccatctcaaaaaaaaaaaaaaaaaaaagcaggatgtcactccctttgtcactgcgttggctgccaccccaggcacttgaatctttggatcttccctgccagtcacctggctgttctgggcgcgttctcatcatgagaagggagacctgcagcccccttacagggctggcagaggacctgctctggattaggccctttcctagcccctggggtgtggcagtgggtgagaccgggaagatctgccctcttaggttcataggccaaagtgatgatcgtgtgtgcaggacctagagggcgctcccctgacccacccctttccttgccatacttcatcctctgggaacaaagctgcttgtttggtttgaggggagttggtttggttcttatccctcagcgctgagacatagaggcttcctgggccactacagtgagacacgaacttcaagaatctgaatacccccgttttctctccccgccaaggcaaaaaaggacttagtactacctgtggagaaggaggtgcaggactaccaggccctgctgctttgcatttacagccctccccagacagacacaggcaccctcatcatacccaaactggacttacctgctaggcaccttcccttccccatccaaaaaaatggagttattttcccttatttcagcaagtccagttgattttacctttgaagtagcacctgagtccttcaccttctctccatcccttctctctcacctgacacaggtctgcagcgctcctctagtaggcaggacagccattccttggggatgcacatgtctagtctttgcctagatatggcaagtctttgccaactgagctaggctgttatgttcttagaggcattgtttttgcccattcttcccatttacaagagaatcagggacacagaagtgagggcttccagccccataggtgatcaatcctggggtcagagatttgagtgtgtttattgcttgccttcttgggagcagattccatccataaaccatgtgcttaccaaggtctgactcactgggagagaaacgacgtgaggttggaaagctgaccttccagagacttggggcccatgttgtgtggtacacatgggagtccatcatatcagattgagatggggggctgggcaaagtgccctggtctgtggctgtggggctaccctgagaaagggagcgcctgacaagccgactgctcccaccatctttgttgcagcatatcgacaaagtcttcaaacacaaggacctacaacagcagctggtggatgccaagctccagcaggcccaggagatgctaaaggaggcagaagagcggcaccagcgggagaaggattttgtgaggctcaggccccagggttggggtgggggtgggaggagacaggctgggctctggctcagctcatagccgggttatatgggagaagtctggccagaccaggcacagattccttgagtaccagtctgagagcaggaagcctcagtgggtctggtgcttgtggctaaaaaccaaacatagcccctgggggcttctgacaggatctggggttctgtcttggaaatagctcctgaaagaggcagtagagtcccagaggatgtgtgagctgatgaagcagcaagagacccacctgaagcaacaggtgagagcatataacctgaccctgtgccttcaagtttccctcactgggccccatcctgggggtagtgaaatgggaccctcattctaggactggctgtgtcctggctgctatgacgccttggttgagcctttgttctctccggacctgcacagtacctatgtggtggtgaccaggtagttaggtgggctcagaggacttcatttgtagctcagaaatgtattgcttttgaggaggtaggaacagaagagtttgaaaatcaacataaaggcaaaataaaagtcaccctaagtctcctactttccaggcttagcattttggattatatccttccaaatatatagctttgctttgttttaaggaaaaatagtatctcaatagaattactggtcagagagtcaaggacgggtctgagtgtgttgaccagagtgcctcccagagaaacccagtcttatctgtgggctgctttctccccacagcttgccctatacacagagaagtttgaggagttccagaacacactttccaaaagcagcgaggtattcaccacattcaagcaggagatggaaaaggtaactgtggtccaggccaggcatggctgctggggcataagctgcttcattcaaaattgttgggcctgccttcaggaagctcccatctggggtgtctcaagggcagggctgttaggaaggttcacagcctttcccctcttgaggcagtatcagtggtatgtatacactccaggttgtcccagggaatggggcagtcttttctgtttgtttggtttttttggggggtttgttgttgttgttgttgttgttgttgttgtttgagatggagactcacctattgcccaggctggagtgcagtggcatgatctcagctcattgcagcctttgccccccgggttcaagtgattctcctgcctcagcctcctgactagctggaattacaggcgcgtgccaccatgcctggctaattttttctttcttttttttttgtatttttagtagagacggggtttcaccatgttggccaggctggtctcgaactcttggcctcaagtgatctgcccgccttggcctcccaaagtgctgggattataggcgtgagccaccatgcctggccccttaccattccttgttattggtggtggacacctctgacttcctggtggtgaggtggcacagagggcattgactgcatcctgtaatgccttgcgccttgggatcaatcattccccaccttggagacacaggtgcagtccccaccttggagacacagaccttggagaggccagctctgaccatttccttctgtctgtcacataacctagatgactaagaagatcaagaagctggagaaagaaaccaccatgtaccggtcccggtgggagagcagcaacaaggccctgcttgagatggctgaggaggtgggctgtctgtgatctgcagccagggtgggggtgtgcacttagcgcatatcaggccctttcctgtatgttctacccatcagtgacacagctagcatgaggtagaggtgagatttgcacacaatgtccaagtccaaagttaatgctgttctctccccatgggaggtggtgagcccagtggtaggtctccagtgggagtgaagggagcaaatggaagaaaggaataaaagagcagaaaaaaacgggtgccagtgatgtgcctggtttacatgtaaagcagcccaggtagtttgtgatttcacagcttgtaatgtagaagaaaggaactaacgatggagcagcaactgcaagccagaccttgctgaaagtttttgggttttttttgtcttttttgctgctgaatgtttttaggtacgttgttcattgaaccttctcttgagctctgaggatggtattagtagtcctgttttatagatgagacaggctcaaaagtcaagtcctttgccaaggtcacgtggtagataaatggaggaatacgttatctccaagccgtgccccttttctgcaccatgctgccccacctgacagcctagtcatggcttcaactaggactgtttcctagagggggccagctttggactcggtctgctctcagccttgttaaagtgtttgccgccaagtggtgatggtaagtgggaggttgatggggcacggcactgaaggtctcatttctttccctagaaaacagtccgggataaagaactggagggcctgcaggtaaaaatccaacggctggagaagctgtgccgggcactgcagacagagcgcaatgacctgaacaagagggtacaggacctgagtgctggtggccagggctccctcactgacagtggccctgagaggaggccagaggggcctggggctcaagcacccagctcccccagggtcacagaagcgccttgctacccaggagcaccgagcacagaagcatcaggccagactgggcctcaagagcccacctccgccagggcctagagagcctggtgttgggtcatgctgggaagggagcggcagcccagccaggcctggcccataaaaggctcccatgctgagcagcccattgctgaagccaggatgttctgacctggctggcatctggcacttgcaattttggattttgtgggtcagttttacgtacatagggcattttgcaaggccttgcaaatgcatttatacctgtaagtgtacagtgggcttgcattggggatgggggtgtgtacagatgaagtcagtggcttgtctgtgagctgaagagtcttgagaggggctgtcatctgtagctgccatcacagtgagttggcagaagtgacttgagcatttctctgtctgatttgaggctcagacccctccctgcccttcagagctcaagacaagtaatacacccaggtcttgactgcatttgtcttgtgagcagggcttgcttggtcagctcaggccctcctagctgctctggaggctcctttgattctctagacctggaaaaggtgtccctaggcagagccctggcagggcgctcagagctggggatttcctgcctggaacaagggacctggagaatgtttttgcgtgggatgatgtgctggtcaggagccccttgggcatcgcttcccctgccctttggtagtgccaggaccaggccaatgatgcttctcagtagccttatcattcacaggtgcctctctagcctgcacaaatgattgacaagagatcacccaaaggattatttctgaaggtgtttttttctttatttctttttctttttttttttttttctttttcttttttttttgcacatgacagtgtttgtattgaggaccttccaaggaagagggatgctgtagcagtggtgcctgggtgcctggcctccagtgtcccacctccttcaccaccccacttggctcctttgccatcttgatgctgaggtttcctgtttggtgagatcaggttgtttgtggtaaaagaaaggaaagggcttctgatggctttgccacaagcttacctgtgggtttcagtcctgagaggccaccaccagttcccatcagcactgtctccatgcagcagttgctgggtcccatgtccagctgcctctttggcttcatgggtttttctgcttcctgcccccacccccacatgtgcaatcctcaagatttgtcctgattctatttcctggcacctccctgcctgtccttggggattctacttcttcctgtgtgggagcccatagctgttgtctaacaggtaagaaatgaaattgaactattgactgggccccagaaatccataaaatggctgcagacagttgtttctgtgtcctgttctacccccactccagtacataactactatgtactgtgtagagccattctatatgctgaatgttctgctgttgcaaacttgccagggtattagccagtgtttgtgccaagcagttttctgggacaacagaatgactcagaccaagatggataggatggttagggctttgcttcttgctgtttttctttgaagctagttcattgtcctgcaggtcccttcatcttccatacctagcccactcttttagcccttaccttaaatctctcagataagttggttcacaaagaatgttaagtactgaatcatgtgtgactgagaccagagatggcaaatgaatggcacaccatttctccttctcctgccccagggcaggtaccactgatctgcatcagagttgcctgctattctctggtgtatccttcacatctaggtgccctcaagcagctgtgtgagtgttgagatctctgccatctctggctgagatactgctgtcctgtgaagtgtttcccatgacctttttcttcccctttgaatccctctgtctggagtagtccttgcctcttcctgctccagtagggccttttccctaccccagcccctgtgccaggctaagctggtacaagagctgccaacctcacagagtgtttgctaggcgagagaggtgcagggaagaggcagaggtatgcaccttcccccttgaagagaggggaaaggcctacagtggcccacataattgcctgactcacacttcagctacctcttaatgcctgtggagggactggagctgctggatcccagtgtggtggtgtaggaggccacagtgagcaggtggccccagctgggtttcccaggtcaggaatgtgggccccaggcaaggtgcagcctttgctcacagctccatccatgtctagaccttcaggccagtctgcagatgaggttccctacctttttcttctcttcattgaccaaatcaaccaatcactacagctgctctgcttctgctttccaaagtagcccaggtcctgggccagatgcaggggaggtgcctatccatgagtgaaggccagtgtcttcctcacctgggtgggtcccacacttgtgacctcagttttaggaccaagatctgtgttggtttcttagattgctagcttttcctccaggggaccacagcaggtgaagctcaagagcgcatggctctgctaatagtaaattgttttcagggccttgtccagctgagagcttcatgtccaccagattctgagaggtgtcagcagcactttttttttttatttgttgtttgttttccatgaggttatcggaccatgggctgagctcaggcactttctgtaggagactgttatttctgtaaagatggttatttaaccctcctccaccccatcacggtggccctgagggctgacccggaggccagtggagctgcctggtgtccacgggggagggccaaggcctgctgagctgattctccagctgctgccccagcctttccgccttgcacagcacagaggtggtcaccccagggacagccaggcacctgctcctcttgcccttcctgggggaagggagctgccttctgtccctgtaactgctttccttatggcccagcccggccactcagacttgtttgaagctgcactggcagcttttttgtctcctttgggtattcacaacagccagggacttgattttgatgtattttaaaccacattaaataaagagtctgttgcctta

SEQ ID NO: 781 - DNA, 22532 bp, Homo sapiens
  source 1..22532: mol_type = other DNA
cggcagggaggggctcttcacccagtccggcagttgaagctcggcgctcgggttacccctgcagcgacgccccctggtcccacagataccactgctgctcccgccctttcgctcctcggccgcgcaatgggcacccgcgacgacgagtacgactacctctttaaaggtgaggccatgggctctcgcactctacacagtcctcgttcggggacccgggccactcccggtggaccctcgtgccggccacccctgcactgatataggcctccctcagcccttcctttttgtgcggttccgtctcctacccagctcagcctcttctcccccgctcagacaggggtccccatcacatgccgctctctgagcgacctctccataggccttcgctggcctcagagcccctccctgcgtgtccttcccctggcggactgccttctcccacatcgtcgaattcctttccccgggttctacggccccgccgctcctcccaccatctctcttttcgggtgtagcgccccctccccctcggcgtacacccttcccagctcgcgtcctctcccgaagcccctctgacgggttcttcgcttccctcttggccttgccttcggtgcagactcccattacaggtctttttcttatctgccctctttcccccctcgagcgagcgtctcttctgtatctcccctccacttggacggccgcccctctaagcttctcccatcccgggtccaggaccccgtaaaatctgagcgggccaagggcctccgcccccaccctccgccccgcggttctcgcggtccttaaccttctctgaccgctccctctcccactccccatttggcaactctctctaccttccctccccaaatcgtgtttagagctcccttgtctccgttgcgacctgggtggtgggagggagggtaagagggatcgcccatcacccactcgcgcacttgtcgcagtgacccggcaggctgacattacttcccacctagccttttcttttcttgccctccctactcagtggcacccaacccgggataactctttactcggttcgcgagatgaggttgcggatgggtggtggctgttatccttgccagacctgaaggcctggttcctgagcaggaaaggttgtgcgctgcacaaatactagcttgctttatctctatgaactggttgcttcctgctgcaacgctgggaggatccaacaggaagggaagagccctagttagccacatacctttcccaaaaggttgggggtgggaggaagttgtgtgctcttttggttacattaaatatttattataagatacggaaacatgtagtgcccttggacagaacatattggagggtcagggttggttagaaagaattgcttattggttgagtccggaaggaatccggtttttttttttaatcaacgaagataaagggtacatttttcaatgagaagagagtacagtagatgctttttttgttcagtgaatgcactctcactctgatgctctttctctgctcctgaattgggaaggtagccatcagtagtgtgccgaacaaagatcattaccactgaggaagaagccattgctattaaagctttactgtggagggtggagtttcaagagtgttaagcatggtgactgtttctgtctttgccattgggtgctaagaatgattgactaaaccaagcaggaaagatttctttgctttcccaatactttgcaaatcttgttatactaactagtctgctgttatactcttatcatctcttactcctctgactcagaatattctactgtatagggtgaatacttttggtatccaccctccccctccatactggaaagtactttcagggtacttagttcattttacaaatacaaaactgaggcctggattacaaaaagtatatgacagcataccttttgccgaaggtatctgagatgatgtgaaactatttgaatctcttgagactttggggttaaaggttaggtttgtgttttgaaatatggtataatggtagtgtgcttttataaaggttgtctttgaagtaattaattcagaacaagatagaccgtcagggtatttctcctgtttggtttgaacttgaatgttggttatacaaggtccttttattttttaacaaagaatattaaatattctgaattggcctaaagtattttaactttttgattagaccatccttctagcaacaattgagagcactgagctttggaatcacgtagacctcggtttagatcctgactcaggtcttatatttactttatgaccttggaaaagttaacttttctgagtctcagttctctactttataaaaaggaaaatacctgcctcttaagattgtgagaattaaataatgagactgttcgtaaaattttaaccatgaggactcaataaatggtaataatgtgaaagaagttactgtggttttgtcagtttttttttttttttttttttttttttttggagacagggtctcgctctgtcccccaggctggagtgcagtggcacaatcaaggctcactgcagtctcggcctcctcaggctcaggtgaccccccgacctcagcctccctagctactctctagctcctaggagtagctgagactacaggagcgcgccaccacgcccggctagttttttgtttttttgtaaagacagggttttgccatgttgcccaggctggtctcgcactcctggacttaagcaatccaccttcctcagcctccccaagtgctgggattataggcgtgagccactgtgcctggcctttgtcagttttttgaaccttaaatgtaggttcaactacaagagcatttaaatattattaaagaaaataaaactaggaacttcgaatgcattttatgtttccatgggttatggtttcattttgttgtgcattttgctgtttaagatagggtgttaaaaattctgctaaggaggatttctactttttttttttttttttgagatggtatttcgctcttgtttcccaggttggagtgcaatgacgcgatctcggctcattgcaacctctgcttcctgggttcaagcgattttcctgcctcagtctcccgagtagctgggattacaggcatggaccaccacacccggctaattttgtatttctagtagagacggggtttctccatgttggtcaggctggtctcgaactcctgacctcaggtgatccgcccgcctgggcctcccaaagtgctgggattactggtgtgagccaccgtgcctggccagatttctacttttttaaagctcttacaggatatgagtcactttttctttttcttttttaacttcaatgctgattatttagccaatttcttatttatacaagtatcctactttaaagtgaagcaagaatgattttatttcaaaatggctttattgtacagagatttattcactgagatggactgcagctgtttctacttagaaggtttacctagcaaatgcaatagttgagggaattggagttagtttgtaactaaccagttcaaaataaagggatattttgattaataggggatggagtggtctaaataggaatgtaatgtggggcgagcaggacaattattctaaattatgtgtttgttcttgaacagtaacctttatttaagcccaatagtgagacttttggtgggagggaattagttttattttatttaaagttgactttttatttttaaaactttaattccttaagtatttacgaacaatgtggttaaggccctgtgggacataagtaagcatcaatcatgatttctgtttacaaatattgtgtggtagacaccaatccacagttagattttctgaaaatatctggatacatagtctattgcttaagacattttcttttcaatcacattggaggtcagtagtaattaaccatcagctgattgtcagtagaaattatcataggaactttgctgtcttgcatcttggtagtagtttttctttcacaagttttggttgagcaactcagattctgctgaatctggaaaaacttgtctagacttgagccttattgtatgcattatatctatatctatatctatatatatatattttttgaggcagggtctccctctgttgcccagtctggagtgccatggcacagtcatagcccactgcagcctcaaattcctgtgctcaagaaatcctcctgcctcagcctcccaagtagctgcaactacaaatgtgctccaccatgcctggctatttttttttttttaagactatcccacttacagaaataaaattttcttttttgtagagatagggtctccctacgttgcccaggctggtctcaaactcctgggctcaagggatcctcccaccttggcctctcagagtgctgagattacaggcatgagccactgtgtcctgccttgaacgcattgtatattaaaaacttttgaggaggttggactatgaatatagttgaaagaatagaaatgtctccaaatttatgaaaactagaatgaaaattaccagttattctctcacgtggtaacttttagggttgaggtactgtctttgatgaattatattttagtccagtaaattagtttgcaagagaaagtataaaactaaatgtggttgaagaggcagaaattttcaatggataattaatatgtatattctgcttttatgcatttagcagcttgatattcagtattaggtatttgcgatgatactcaaatacagcagatgtctagttgataacttttttttttttttttgagatggagtttcactcttgttgcccaggctggagtgcaatggcgcgatttcagcttactgcgatttcagcttactgcaacctccgcctcccgcttcaagcaattctcctgcttcggcctcctgagtagctgggactacgggcatgcgccaccacacctggctaattttgtgtttttagtagagatgaggtttctccatgttggtcaggctggtctcaaactcccgacctcaggtgatccaccctccttggccttccaaagtgctgggattacaggtgtgagccaccacgcccggcctagttgagataactttttaaaacattcatgaattttgagttattttcagattagagtgctttttttttgtagtgttaacattaattggttacattaagagaaaagttcccttgctatctttatgatggtataaggagttgagattggtgagataatgaacataatcattagttaaaagtggaggtcaaaagggaggaaaccaaaacttgaaagtgctggagttggccgggcatggtggctcatacctgtaatcccagtactttgggaggccaaagcgagtggatcttttgagccctggagtttgagacccagcctgggcaacatggcaaaaccccatctctacagaaaatacaaaaaattagctgagcgtgttggcatgtgcctgtagttccagctactagggaggctgaggtgggaggatcctctgagcctgggaggtctaggctgcagtgggctctgcttgtgccgtggcactccagcctgggcgacagtgagaccctgtctcaaaaaaagaaagaaagaaagaaagtgctggaagttttttttttgagacaagttctggctctactcccccggctagagtacagtggtgcacagtccaggctcaccacaacctctgcctcccaggctcaagccatttgcccacctcagcctcctgagtagttgggactacaggcatgcaccaccgtgcctgtctaatttttttgtttgtatttattcatgtattttttgtgtatttttttgtatttaaatttttttttttgtataagtgattcaaaggccatttccttagcaaacatccagccttttgtactaagaggcaacagtgaatgtatcctattaataatagactattaactgaaactgagatttgacttcatatccagaatggtggaccttggaaactagtatatcaactaaccatcctataaaattgaaagtgcattgcttttgtacatcactttaataactttgacattttcttctgatatcaaataaaagcatgtatgtgtttgccacagcatctttgacaccctctagttgactctctagttagaaataaccattctttgtgctgcattggattcactgcctcctgaatgatttcttgctgaatcagctgactgagaaagccagaaagatatgcatttgataatgtactctgtccaagactgtccagaggctagcttatatccactcctgtggcaaggagggaatgtataatggactctctttgccctctgaccagaatgcagtgagctctcagtttttaccattctttccactcgtaccaccatcccagtctctttagtaaggaatggtcttactccttggccttatttttgtatgtttgattttctagtcctgatgtctaaatcaattagctagtttagataagaagaagtcttagtagtcaaaagtaggaacgaatgtaatgtttcctgaaatgctgataccaatttttacaaaggaaaaaatatctagctcagattctataaacgtgtgaactcattttgaactttaaattcagatagaaaatgttttaaaacaacttaactgcctgtttctccattgtttttgaaattcttaagcgtaataccactttgagtgaaaaagaatctccatgtatctagttagtaaataaactgctgcctatagaaatcacaggaagcaaattcatctaatcaagacctattttcaaaaaaatcatggagtcataagtgaaagtatatgccctccttgctttgttgtattttattttatttatttttttaagacagagtctcagtgtgtcgcccaggctggagtgcagtgacacaatctcggcccactgcaacctctgcttcccgggttcaagctattctcatgcctcaggcccacaagtagttgggattacatgcgcccaccaccacacctggctaatttttgtatttttatagagatggggttttcaccatgttggccaggctagtctcgaactcttggcgtcaagcaatccgcccaccttggccttccaaaatgctgggattacaggtgtgagccaccacacccggcacttgctttggttttgactcacagtatgtcagaattattagtttcctaataccccctgtttatctgtagtggcttgggtttttttggcagaggggtctctaactttgaaccaatctgataaatgcaactattaaaggtcattttagtttctgtgatctgtatggtgatgtttataaaccctatgcctcatatgttaaatgtttttcattttgcctaggtctcagtcctgaggtcacacccagtctttgatgaaacgaagtatattcattttgtccttccctacccactaacagcctttgttgttttcatttctgatacattacattttaatatcataaattattcatttagtttaggatttatctttgaagttgttatcttctaaagtagtaagattggcatagcattgacggtaattaatgcctgtcatcaatgccaagggcatctgtgattaaaactgcatgtttaagacagggtaccgtatctgtgctaagcagatgatatgtggaagtcatgcaggtagaaacaggttgaaaagaataaatcggttttattgattggtaactggtcaagaacatgctgttcaaccccctacccccattcctttttaaaagtcatataccttatttttcttgctttatttactctgaagccaaacttcattctgttgaaagcatagtggtgttctgaatatgtttgcctcattcatctgacattgaattctttgtctttccagttgtccttattggagattctggtgttggaaagagtaatctcctgtctcgatttactcgaaatgagtttaatctggaaagcaagagcaccattggagtagagtttgcaacaagaagcatccaggttgatggaaaaacaataaaggcacagatatgggacacagcagggcaagagcgatatcgagctataacatcagcgtaagtctcatggtttttaagttctgtgaaatgggttgccatcgagtgaattagctgacttttggtattggaaaaagaactgttgtttttttcttttaagaattctagtattaggaatccttagaaatttatttataagtatgtttttaaaactcatgatccatattttgagttcttcctggtgtttgcttccatcttgtggttttctgatactaaatatgtttctgttttcagatattatcgtggagctgtaggtgccttattggtttatgacattgctaaacatctcacatatgaaaatgtagagcgatggctgaaagaactgagagatcatgctgatagtaacattgttatcatgcttgtgggcaataagagtgatctacgtcatctcagggcagttcctacagatgaagcaagagcttttgcaggttagtgataggaattccatgatatttcttaccattgtgtcttgtggttttgataccttccaatgagagtaataggttataatagtttcagagaggtaaacatgaatgcttagcaagaattgttttgaaagtttgtgatgactgtatagcttttttgctttgagtcattaaaacactaatattttgctgccaaaaaatgaatataaacattgtatattctgtctctttttctgttatgtttctgtgtttacaaaggctgctgtacgtgagctctatgtgagtgaaaggcagaggctcagggagtgtcagggaccaacagggatgcagctgcttaggagctgtaactttttggcttcataaagaattcacgtgtctcttgcccctgttctggtagggacagcatgccagaagacaacattgtgcattgtggctagtgaaagtcttgcggccgggcgtggtggctcatgcctgtaatcccagcactttgggaggctgaggtgagtggatcatgaggtcaggagattgagaccatcttggctaacatggtgaaaccccgtctctactaaaaatacaaaaaaccgggcgcggtggcgggcgcctgtagtcccagctactcgggaggctgaggcaggagaatggcgtgaacccgggagcagagcttgcagtgagccgagatagcgccactgcagtccggcctgggcgaaagagcgagactccgtcccaaaaaaacaaaacaaaacaaacaaaaaaagagagaaagtcttgcctttgcactaatgcttatgctatgaataactttctgtaacagttttttaaatttcccatgcaagaatagctttattgtaaataatatggctacaacatacggaatactatagccaatgtagttgatggagaggatagcaagagatggaaataactgggcacttgatacatttttaccacattttaagtggtgtcattcgtcactagtgagtagtacttagatataacaagtatttattttaattaaggagccaattgacaatttctcactttttttttttttttttttgggagccaggatctcactctgtgacccattctggagtggagtggcacagtcaaggctcactgcagcctcgacctcctgggctctagtgatcttccacctcagcctcctaagtagctgagactgctggtgtgtgtcaccacgctcagctaatttttagtattctttatatagagagagcaaaacctctctccagtgttttgccatgttgcccaggctggtcttgaactcctgggctcaagcaatccgcctgccttggcctgccaaagtcctgggattacaggagtgagccaccatgcccagctctcttgctattatttttaatctattaaagtgtaaatattaaagtgtaagtagggtcgggcatggtggctcatgcctgtaatctcagcattttgggagatggaggcaggagaaactcttgaggccaggagttcaagaccaggctgggcaacctagtgagacctgcatctctacttatataaagaagtaaataaagtaagtaaataaataaagtgtaaacagaatggtgcccttactgtcccagaagttgaggaggtcttaagttttaaaaagttctgttatttttccttttgagggcttgagtatatcctattccttgttttaaaacttaacaagactgaacttttgtgtctcccctcagaaaagaatggtttgtcattcattgaaacttcggccctagactctacaaatgtagaagctgcttttcagacaattttaacaggtaagacttgtattttcagattacaccagtaggactagaagttttaggaaggtaatttaaacaaactaatcagtaactaaactatatatcagccgagagtgactatcatttgagagctactctagcaaaagctgtttagagtgcaaaattaactacaacccttgctcactgagcttcagttgtcctaattcatctgatttatagtgggaaaaatactttgaaaataattcattcacttccattattacttcagtccaggtattccattcttcatggtcacaaagtaatgtttaaatgtacttttatgaggtaaatattgagatcccagctatagaaagatataaatgcccttttttaaatttagtaaaggcaaagctagggaaaaaacatttttaaaaattatagcgacaaaataaaattctcccatgatacagaagaagggtatcccttgcgtattctatattgtatcatgggagataattggtagataaaatcagccaatgattgcatatagaaaagttttaaaaagtagttggaaagagatggagttcatgctgttttggaatgtgaatgaccaggtcagcctctgagataagaagtgttcactcatatttatcctgaaactattagaataaccagatttattagtaagattagtcttaatcttctaattagtactttgatgggttgtttttaaatacttttaaattgtatgttacttttaagaactcatgatttaaaatgtggtcttaatatatagtatagttttacgtggcattgttctaaaaagtctatacagagatatgattgagtttccaattataatgtaacaagttttgatttattgtttgtatgcagcccctgtattagagattaacagattttaactttaacatgttatcttcttttactgtaaaaatgtaagcgtaaagtcaaggagttaagatttggaagcctgacttgggttctagtcctggctcctccacttactgttagttgtacaatcttaggcaagttacctaacccttttaggccttaatttctccatctataaaattcatatatattttgaggagttttgttatttcttttttgagagaaggcttatatttataaaatcttgtgataggatttgacttgacttttgtgacctaaaggttttttgtctcagtaacccttagcaaagaatggtctgtcactgccctagacttcaaaaatgagtacctgtaaagtacccattttgaatactgtaaattacttatctatccctggtatatagagaacagttggcaaattagtagctgaacggcaattaaggcatgagaaaattggagatttatgtacctattttattataattcttttctgttatcagaagaatagtgctggggttggataagcagtctttggaacacagtagctttcctttagaatgttctctgtcaaagtttcactgcagattgttttaagcaagcaagatttgattaaatatgtagtatgtctgcaagtccttgttttctttatagccatttgtgtacattttattaagtcaacatgtagagtactagattgagacccaggagttctagggcattacatttttatcactttgcttctactccccgtttaactaaagtcactgaacctccctgctcctcagagtcatagtcttaaaacatgtgaattaaattaccttaaagatgtgtgagcattttaaggcctcagaaagtctcatctgaaaaaactttttagacagtcctcattgttggaatattttttatgttccatcaaatctcctctgctgtaattctggcccatttattctgatattaagtgaagatgagcccaagtcttccatctgcagttaactattttatgcatcattttgtaacattgagcttctgatccactcaaacatgaactagtcggtacttaaaattgagccctttaagagctgggcatgttgatgcacgcctgtaatcccagcattttgggaggctgaggcaggcggatcgcttgagctcaaacatcctaacacctgtagaacaacacagatgtctgctgccacatgcagtgatctcaaaagttcaagaccagcctgggcaacatggtaaaaccctgtctctaaaaaaaaaaaaaaaaaaaaaaaacacaaaaaaattagccaggcatggtagtgtgtgcgcctgtagtcccagctgaggtgggaggattgcttgagcctgggaggtttaggctgcaatgagccgagatcatgccactgcactccagccttgtgggcagagtgagatcctgtctcaaaaagaaaaaaaaagatgaacatatagttgcttttcttaaaattcactctagattgaacttttgttacagcttaattgttgcttgaaagcaaagaagactttagtttcacttgctaccacttttcctttctatattcactgtttcctcagcttcctgcataaatctcactgttggtctgtaggatcagagatcactgcatgtggcagcagacatctgtgttgttctgcaggtgttaggatgtttgttctaaactttcttcctcctgtatgccagtggaagtgtgaatgcatagagaaaacagtgaagaggacagactctttattgcacttgattctaccttaaatgttaacagtcttaagggagtatttacgttgtgttttgatattgctgaaagaaaaaatagctttaaaatttctaaaaattgagatggagcccagtctggtcttgaattcctgagctcaagccatctgcttgccttggcctcccaaagtgctgggattataggcatgagccaccatgcctggccaaaaattttaagttgtaaaattatatatcagaaaatttacattgttacttcagagttaattgtgttgttggtttcagaatagacccatggcattcttgacacccatgaatttgaaagtgactccatgagatgattttgctgatggtatttttttagaggtagtttactagtatgagagtgagactggtagattgctccgcctctgaatttcagtacagctttgtcttttctcaggttcactaaaggatgtttttaatacataccttttacttttttattttaactttgcattttgacaatttcaaatttaaagaggttgaaataatagtaaaaagaatttgcaaatatccttcacccatattcctcagatgttaatattttaccacatctgctttgtccttttctttctcttcgctctaaatatatacatattttttcggcaccatgtgagattaagtggcagacatgatgaccctcatccttgagtacttttcagtgtatattttgtaaaaacaaggatattctcttttatagccacagtataattatcaaaatcagagagttagataatagtgccacatcagtgtttaattacagaccttattcagattttgccagttgttccaataatacccttattagccaaagaaagtccaagatcaggtcatgcgtttcattcagcagtcatatctctttagtctcctctaatctcgaacagttcctcaatcttttgtttattgaccttgacatttttgaagggtacagtccagttattttgttgtgtacctcattttgggcttttctgatttctttcctcatgattaaactcaagttatacacttttggcaggaacaccacagaagtgttctcagtgcatcatatcagcaggtttgtgataattggatgtcctattaattactagtgatgttaactttgaccacttggttaaggtgatgtctgctaggtttctccatgtaattaatatgtccaggatatctttttagcatgaacactaaattcttttttttttcccctgagtcttgttctgccaggcaagactctgcctcctaggttcaagcaattctcgtgtctcagcctcccgggtagctgggatcataggcctgagccaccatgctctctaattttgtattttaagtagagaccggttttaccatgttggccaggctggtctctaactcctggcctcacgtgattcgcctggcctcctaaagtgctgagattacaggtgtgagccaccgcccctggccttattctgcttttggtatgtcagaaaatttccataaaaaaaaagttagagatgtattaactgaattactacattttccaaaattaagaactaatttctcagaagttgaaaaacagtaagctgtagtcaactgaatatgtaaactaacaaaaacagacagcaagtgtatcttttcttagattcttttgtgggggaaggggagtggctaaaatttatgtctgagaaggttgacagtggttcaaatgtgaagaggcattaaggaaagacaactaggattcaataaagacaggctactaaaattaaaattaaaaaaaaaaaggatatggaatctttatttagattttgtttcaatgaaaaaggatgggatgggagggtgccaaggctaaagaaaaggatttacctttcagtcattcaatcagatgagtggctaaggaataaagataattaacttgcatctttaagctttccctctagtctcaaactgggaggctcttctttttcaagtgtaaattatgtgtgtaaattaagatgaaatatgtaacccactgtaagttttaacttccttataaattgttttgaagattaaattaggggaaccaaaacaaagaaaagttcttacataaaaaacaaatatatgtaaaactggaagagagggaaaggcagacttctcaaagaacatagagaagtaaataattaaagagatctcattacaaagcaagaaatttgagcagtgttggtgtgttacaagtacagcatactgttttttagaaatagattactgctgcacttactccagttaccaaaaaggatgtctgctaataaaaatgccaccaaagcaataaagagtgattggctttaagaggttccacaagtaatttacatacttaagtctcttgtggctgggtgtgtcattaaaaaaaaaaaaaaaccaaaccaaaaacctgataagaaagtaggaagcaggtaacttctagctgtctgattagagaaggttatttcattgggagttttgtgggggtgggggggtatgctaaactagatctatttccttctttcaaaggcatgttctcctttagaaccaaatgaatataccaattcctatgcagtcgcccccaccgtttttttttttttttggagacagggtctcacactgtccccaggctggagtgcagtggtgcagtctcaacctcactgctcactgagtgagactctgtctcaaaaaaaaaggcattctcctacataatcacaataccatatgtcgtatccaagaaatttaacatttatacagttttttttttttttttttgagacagtgtgctctgttgcccaggctggagtgcagtggtgctatctcactacaacctcccctccgggacaagcgattctcctgcctcagcttcccaagtagctgagactacaggcgggtgccaccccacctggctaattttttttttgtatttttagtagagacggggtttcaccatgtttgccaagatggtcttgatctcctgacctcgtgatccgcccgccttggactcctaaagtgctgggattacaggcgtgagccacctcgcttggcccatttatacagtttttaatgtgcaatccatattcatatttcttcagtatactaataatgtcctttgtagatttgttttttaattaaaaaattcaagatccatttaaagatcacatgtataggagccaagggaagtgtccctattgccctctgaaggtttgctgaaagctatctgatacagctttggacctttcacgaggtccaaacgataggtagaggttaggaagaaaaagaatcctgctttatcatttttatatcatttagatttctcttgtaggagatctaaatagaaacctctgaaagtttgctggaaaatcaactcacaaaaggcattttaattggagaaaaggcatacgaaatttattaacatgtacactgtacactggttttctctggggagaaccagagagatgacccacctcccaatggcattcagaggcttatgccattctggcaaaacaggttatgggaaggaggagaaaaggaattctgttgaggggattactggggaggatgaacggatcagtggacagaaattaattggtacattatctcgtgaaagagtctgtttaagtgtggttacattcttgatcttacagggaggggaagaaaaaacaattgtcccttttagtgggtctggatctcaggcagatgaaggaacttcagcttcatcctgtgccagggagagaggatgagggggagaaggtcagagagaccttgaggcttctttagttcagcatatcaaaacgccattttggagtatgggtttctgagccttaacagatggaattgttttgtatctgggatgttgaataaagtagccacaggttactattgagcacttgaaatgtggctagttagatgaggaattggattttaaattttatttaattaaaatagatggctactctcttggatagcacaaatttagaacatttatccccatctcagtctggatttatctcattatttcctcatgattaaattagttttaaatatttttgtcaggaatacatggtgtcctttataggaatacattgtgtctttcctagtacatcgtattaggaggctaattgtgttaatttgacacatttttagaattatcttgctttttgagagtagtgtttttggagggacaactgggagagtaaacaaaaataaggtacattctctgttcttaaggactttataatctagtcacagggaacaacttttaggcagtgcagtataagaccaaacgtgttacatacagatacttattgtggaggaatttagtgacattcatgcggttatttatttatcacaacacatgttatatgttgcagtacagcagtaagacagacacagttttgatccttacagagtttaacacttagtaaaagaggcagacactaaattatttttgataagtgtcatgaaataaaaatagagtttacatataacatcttaagttgcctattttgtatcattctttaattacaatttaagttttgttcaggaggtcactgataaacacattatctttttttcccttccaagaatcgtttgggattttagcatgtttgttaagatgtactctgccgaatgcgtctgatagtgcaaatttatttattttttgtgtggtacaatgtcattgtgtgtaggcaatttttgtttgtttgtttgttttttggggtaaaggtagactgaaaatactcttatggtttactttgaatctaagtccataaacaatgtaatgctattggcttacctcttttttttttttttgagaccgagtcttgctctgttgtctaggctggagtgcagtggcacgatctcatctcacgacaacctccgcctcccgggttcaagtgattctcctgcctcagcctcccgagtagctgggattacaggcacccaccatcatgcttggctaatttttgtatttttgtagagacagggtttcaccatgttggtcaggctggtcttgaactcctgacctcaggtgatctgcctggcctggtttacctctttaaacaaagatttatttgactggtgaacctttccctctgacatggaaaaacctttgtttcttttcttacccaaagggcaattgttaaaataaagggttgaatctaatcagtggctgtttgaaaataaaactttaaatttatgtattctctgttcagtttccttagggactttgatgcaaatatatctcctacctttatgtatcttttatcctaactatgataggtttattcacactaagtattgtggtttcttttttccttcagagatttaccgcattgtttctcagaagcaaatgtcagacagacgcgaaaatgacatgtctccaagcaacaatgtggttcctattcatgttccaccaaccactgaaaacaagccaaaggtgcagtgctgtcagaacatctaaggcatttctcttctcccctagaaggctgtgtatagtccatttcccaggtctgagatttaaatatatttgtaattcttgtgtcacttttgtgttttattacttcatacttatgaatttttccatgtcctaagtcttttgattttagctttataaaatcatccacttgtcccgaatgactgcagctttttttcatgctatggcttcactagccttagtttaataaactgaatgtttggattcctcagttattgtttacttttcatcatggaagcctgtcactgtatgtaggacataatagaacttgatcacttgaagctcagacctattggtcttgatcaaatcaaactaagaagaccttagaaataagctaccattttgccacagagcagcttataggtaatacactcttctctcagtgcagtgtacatttccacaaatctaagaattgccctataaacatagcaggattttgagagcttgaaaattttccattattctggacatgaatttctaaaatgccttaataggtttatgtagttgagtaaattttgttttttaatttttgtaagcatcaaagttgattagagaggggggcactttttctggagaattctcttagtaaacacaaaagattgttacggtttcattagtagtatggttgtggggccataagttaaacagtgctgcctggtaggctgggaactgaagagacttgtggtattccatctcgggtgcctctgttggcaatgatcaggcagcccaaaagatttaaatgatctataataatttccaagcggtagattatgtggcattttattgctcaggcaataattggtttaatgctggtagtgtcaaattttgaagtgttaattttgtcttagaaccttccagtaagtgaaatacaacctagttttatcaccatatccaccagcaggcatggataattattttaacaatgctaatatttgagttttgcagtatattatagaatatagtccagttaaatctttggtttcagtatgtctgaagagtacagtgagaggttaatttctgctcaagtggtaccacttaaaggcatgtattcttttagtatgtaaaatgaaatagtaccttgagtttaaatagaatgcatttaggcattgtagagatctgaaatagttttcttccactacattgttgaaatcaatgaagcaattagtttctcattcagaaatgtgcacactaatatttagttttgctttctcgtggataatattaagcacttactctgcagtttcctggaagttgtgtcaactgcagtgatactattcaggatggtgggaaatccccaaaaatatgtatgtgtgggcttgcttagattactatatttcatagttaatcttttgtctcttgcggtgctcatgatgtgtggggcacacggaaggcattgctgtagtcagtcattttggttttcttctatagccattttattattttagtgtattagttatgaagataatattatctatttgtaaattgctactttgtattttatgcatgctctgtaatttgatttttttttagttattgatttggattatattcacattctaataaacagttatagggggattatttcttatgctgtcagattacatttttcctttgagtgctttgggtgcagccgtggaatcctgatgtaaaagcataggttcttgcattactgagtaaacattgaattgggagcatcagtgtgtgaattcagctttgattttagaactgcagttcaattatgctttccttggaaaaagtatgtccaaaaacattaggaaagtagtgtgtattttcatatataacagtgtcaccagacccaggaaaagaaaccatctctattttattgaaagttggtggtagattttttacaaagtaaggagaaaagagaaaaactaaatagtgaattgaaaatgaataaagtaaacttagaatttttacccaagtgtagacttaaatgttgctttgagtatggctggatcttgggagaattccaggaaatattaggtattagaaaatgactttgattgcatttcagcaggtgtctttattctgagtagtatcttaggagacaaactgtctcaagcaagaaacaataaatttttaaatattatgacagttcagggcttaaggcagtttagaagtattttgctacttgaccttgattttcagttattttaactttgaatttttttttttttttttgagacggagtcttgctctgttgcccaggctggagtacaatggcaccatctcagctcactgcaagctccacctccagggttcatgccattctcctgcctcagcctcccgagtagctgggattataggcgccagccaccacgactggctaattttttgtatttttagtagagacggggtttcaccatgttagccagggtggtctcgatctcctgacctggtgatacacccacctcggcctcccaaagtgctgggattaaaggcgtgagccaccgtgcctggccttgaatttttttttaacctgttatatagtctcctgaatagttagccatggtgccttgatttaatcttatgtcattgttctcaaatgccatgatttctctttaatagtagttgtcattatgtaagggtaagttattgcccatttaattgtaattataagaagaggtgccagctagtgaccttacatcagtgatcttttaagttctgaagggttctgcagaaaagttacacttcttgagtttgggttgcccatcagagctggtcacatttctttgatcattgaaaaaatgaatatcttaatttttgtctttgctgactggtatttataaaatacaaatgcttttagtgggttgagctgttgtgataatctcttccatctaccttagagaagaagctgtactatttagacagttttggccaacactagaagcaaaagaattcaaaggctgggtggatatttaagaacttattctaacctgtcaggtttcaatttgtggggcttggtttaacagaggaaaaaaatataaattgattttctgatgtctcacaaatatcacatacctggaaaaaaattaaaacaaaaaatgaattttgtaaaaggttatgtatgacttccatttgctctgtaaaaaaatgaacaaagattgtgaaaggatcctcttccaccacatcatttaatgggttagcggaacagatagggagctatgacactagcaccaaagagagatttttcttctggttgggtggtgctggtgccacgcccctttctgggatttgacaagtctttcccactcacctatacaatatgccaaatcaactggagttgtcattctaatgttttaaagaatgattgggttcccccaaactgtaggaggtcgatggtaacaataaagtgatacaaaatgcttatgtcattataatttatgtaagggagaccattaggctgagaatcaatatgattgaggttatctattctcctgaaaagtgaattggagaataaagaaagaatatttgaaaggatgttgtgtactaggcaatatactagcatgtattagaaaatacggtaaactgtgggttagaagagtgaaagtagctggtatgatagagcactggactgagtaacgaagagattctagtcatggctcttgtggtcatttcatttttgagcctcacattcttccaattaatgagggtaccagattaaataaactctggggattcatcccaattcgaactctgtaattctctgaatgaactctctcttcaattaaagccaaattattaacattttaactcaagtttaaatttaatagagaagtcaaaatgaggtatgcactttgtggaatgtttttggtcttatcacaataacctgattaaaatggtgcctttatttccatgtttactcctttaaataagatgaaagctttcagaacatttatttgcaaaatgactgtcaatatcaacaatatgcatcaaagtaccatatatgctaagggagaggagcacttgatgggctgctatgttaactgtaaattgagaactgcttgttttatggcttttgctgttaaaaaaaaactgctggcttttaatatgtactttaaaatatactcatgtctgggagagaacttttaaaaaca

SEQ ID NO: 782 - DNA, 32742 bp, Homo sapiens
  source 1..32742: mol_type = other DNA
ggagaaacgttctcactcgctctctgctcgctgcgggcgctccccgccctctgctgccagaaccttggggatgtgcctagacccggcgcagcacacgtccgggccaaccgcgagcagaacaaacctttggcgggcggccaggaggctccctcccagccaccgcccccctccagcgcctttttttccccccatacaatacaagatcttccttcctcagttcccttaaagcacagcccagggaaacctcctcacagttttcatccagccacgggccagcatgtctgggggcaaatacgtagactcggaggtaggcatccgtgggggggcgccggctcgggcgtgcggggagtgtccgcttctgctatctgcctctccaaatatcccgactgctgccctggccccagccctctctccacttcggagcactcctctggcgttggcaccgctgaggaatgggcctgggcggggaggtgaagagaagccaggaatgttttatgttttcctaatggagagggggcctagggagcccctgagctaggaggacacggaaaaggggattggggtcctgagattgggtctgttgggcccaggacgcgttttctggatgggtctaggatgctcccttgtcgcgggacccccgcggtccggccctgcctgctgggggttcgaagaggtggagtgcagggtggaggtgttatttacccgagtcctggggacagtccccgggactctccgccaggcgcccagaccggcaggtcccgcaggcggcgcgcggtgtgtttgcactttccaaagttcttgaaccatctcaagaactccttctgcatcttggcgtctggcaggggtgttccgagagaggtagacctcccctccccaaactgccaccatcacttccaacgccctccacgcgctggagctctgcccgggtgtggaaacctcgtcttccaacacgtagctgcccttcagccacccgcccgcagcctgggagtgccctgagggtgggtcgggggagctgcgcaggtgagactgagttctaggacatttagggggtctggtgcctggctccgccaaaaatggggactttcgggattgtgatcatcacggcggattgagcagggagagccgtggagggacaagagagggccgaggcagggtggggggcgcgggcaggtgcgagggggatgcggccaagaagcagcgataaagggaacattccacgggtcgggcggctgctgttggatcttagataaagctggaagggattaccggggcaggggtaatagggaccggggacgggaacgcgaaacaggtgaagcgctcagggcgagagcgactcggcttagggagtccgggagaagcctgcggctgccccctcgccgccgaggtcctgcgggtcctgcgggtcctgcgtgctgagccggggcgtgcgcgggcgggggccttcggaccgcgcggcggggcctgccctgacccctggcggcgggcgggggaggcaggcgcgccctgcagagtacagaggggtgtggtgtcctctgcgagatcctcttaaaaagctggctacgcgcaggcggtttctgtgcacggagccgtagctgtcggagcggttagttcgatttcgagctcgaggtttcccccgccgccaggctgacttctcatcgcttgtttttctttttgcatttttcctcccaccgccgttgccgccctccccgtcctggccgtccgccctccgccctctgcagggacatctctacaccgttcccatccgggaacagggcaacatctacaagcccaacaacaaggccatggcagacgagctgagcgagaagcaagtgtacgacgcgcacaccaaggagatcgacctggtcaaccgcgaccctaaacacctcaacgatgacgtggtcaaggtaagccaaggcgaccaacagggaagggctgggacagctctcctctggcagttagcccgtgcatccttctttagcattgccgtgtacgcacaccccaccccgccccctacacgcgcacacacacacacacacagagttttgtgggtttgatgtgtgggagctcccgcagtcggcagaaacgttacatctcccttcccccatctccccccaatagttagttcagctgaaattcagctaaagtgagttttgtagaagttcctataactacacttttatcctagcaaatgagcctattgacctcagcaacagacggcccatactccttgggacggtgagatggttcctatccattcccaggttgaaagtctagtgacaggtccccactgcacgtggcattaagacagtcagataattgtgtcaggtcttgtgctgaggatgagtcagaatacaagatgggcatgttcccccaactaaaacgatgggaagtgattttcttaaaaatactacagtggatggaaatgcctaggactaaagacaaagaaaatacgtacttattcatatacatatgaaagttactttaactagactaacaagtcacttgtgcacaactaagcaaatttacaaaaccaaaaacaatgtatgcctcttggtttcttctatctatggacacctgcacttagatgtggaaagctgcttctttagtagctacctgggtcagcctgccctgagctaatggcacattcaggttggagttccttttcatactttcaggatgtgcttggtgagattaaaaataattggactgggttattggccagacttagatctgactcagtggtcagttttaaattatcattgttattagattttgacccttttagccaatctagtgggaggaatttattgcctaaacacatctggattgggatatcatgggctagagccatccttggcaaagggttttctctgagaaatggagggctaaggaaaaatcctggctcagggactgcagtgtgaagatctactcctatacaacccccagcaatcaatgaggcggatgagcaatttccacccaccacgcctgctatctatggatgggaggagctatagttcacaaaccgtttacattcatgaataatatatttcaaaaggggaaacagtttaatctgtaactggaagggaaaaaaaaactgtcagaattgactcccttggcttcctggagtaggaaaaaggaaaattggagcatttgcagctttttttgactagctggattatggaatatttaaaagcaacagcaacaaaagtaccttataaactagaaaatagaattgctaaaaaactatttactaaaaacattaccttaaagggagaggatatttgtgttttcccccacccccacccttctcatgtggctttgaacaagaaggagagttgccaggaaaagaggcagatttcagagagggctggcttcactggatcctccctgttgttccactgcactgtgagtgagattccctggagcaagcgaatctcccgggatgagtcagagaggccaacagtgtggatgtgggtctccacacatagcatgactaagttgagaaagaaaggccccactgggaaaagagacttcaacacagatggaaaaaaaacataacaggcttggaggaaatagcagtttacaaaacagcatttcaaagagcaagtgtggggatcctcaaattaaagaaattaaaagaaaaagctagagcaagctcctgctagcctaaagaaaccaaaccctgactacttgctcatagaactgtgagcaaaacaagacagtcaaaccaaaaaatccacctagaaaagaatttggcagtctcactcagatgcctggcctagaggggacttcagagaatgccctacagagagacaccaagactacaaatgcaaattctgcccaaagagtgcctggccgatgaacagggtcctatctacatcttatggagactcctattttataaatatgtatcctcaagtccaagcacaaacaaaataacagaaacagggatgattctctcccagtttccatgacagtaaataataaatttccctaaattttactttcaacaacatagactttttttatttttatttttatttatttatttatttattttttgagacggagtctcactctgtcacccaggctggagtgcagtggcatgatctgggatcactgcaacctccacctcccaggttcaagcaattcttctgtctcagcctcctgagtagctgggactacaagtgcacgccaccatgccgggttaatatttgtatttttagtggagacggggtttcaccatgttggccaggctggtcttgaactcctgacctcaagtgatccactggtcttggcctcccaaagtgttgggattacagatgtgagccactacacctggccaacaacacagacttcttaaaaaaatcatgacaataattttgggtgcttcttaaaagcacccaaagctttactgctaatgcatggtagcttaaaacttcacataataagaaagaaccagtggccaatggaatctactgttaaaggtacccaatcaagtaaggaaaagttggtcctaaaagcaagcagccctgtaaaagctgctctgtccaatatggtaatcactagccatttgtgtttccatttaaatttcaagtaattaatatcaagtaaaatttaaaattcagttccttagtcacactagccacgttgtgagtgtgcaacaggtaaagctagtggcacagacatagaacatttccatcagcacagaaatctctattggacagtgccagattagggtgttctctgcattgtaaaagcatccccttgccaagttaaagaaaacaacaacaaaactctagagaagaaatgaaaccccagtttcatttctggagaggaaagaaaactcatgtgtggcatgagtttatattcaagaaggtgcagcattattacctattttactagtaataatgacacacattatagtatacaatccagttccaataaaattaatttctcatcttactaaaagcttgctgctccacattatgagacaatttacccaaatatagacatttacccaaaaatattaagtagcttgtgaatactttttaaaatttcctttaattaaagtggtcacaaactcaaacccttcattctccctctgagatttctgtgtcatcttttgttcacattgttattcacatgtttattatgtacttattttgattttctagataaataaaatggcttcaaatctataattctgataaaattagccatcaattaatttatttattaaacccatgcaatatgctagattagatgctttgctatgtaattcctacaataaatcctagcaatcacaaagattacagttagtgagacgacatgcacacaggtaaaaagtgtttttaaaaaatacatacatacaaccaaaacagtaagtcactgctacatggaaactgattggtcctttttcctttttttttttttgccttgactgccaggaagcagtttcaaatctatagctggattttaagtttcattaattcatgttcccacatatggttctgtattttcacttcccccttttaactgacatactgtcttatgtgatctctactgtaagccttctcatcattttggaaacagaccaaatataatatatatgataaggaatcaaaagtaaatacagtagtgttgaatattgcataacaaaaaggtttttaaatagggaatggtatcaatatgaagtgttagggagacccagccatgaaaaggatagcagggtcagagaaggaggatgtattgcagctggtttaatggagaatggtatgaaggaggtgcagtttgaattgggtcatggaggacagatggattgcaaatagctggggcaaaagcacaggaaggcattctaaacgagccaggcatggagacaagaatgtctcccacaagggagttgtagtagctcaatcagactgggatttgagatttcatgtggcagagtggtaggtgataaaggtgaaaagactgatcatagtaaaatgcggagtctgtaaatccagcactcatgataagtttggacatcatgtcaacagtggacagccataaatgactgcaagcatcggtgtggtataatgaaggtgacgtttttgtaaaatgactctggtgaaggtacagaaggtaatgaaaagtagccagtctagttgagcagaaaagagttcagatgtaattgcatcatggtccagatgtgaaatgaagacaatgcgaagtggcattgtggatcgaaacatacatgcacaaaatgacagaattttagaatttgaagggatcatcatggttaccaggctggcctccaattcctcttttgtaatattaatagaaattaagggctaacaagtttaaaatgttatccatctttttacatagttactgcccaaagtgaatattttgaaatgtatcattaaagaagaatagataagattatgtgattcaccatggactattgtcatgagaggaaaaatgtgtttagatgattctgttagcactgagacaaatcaggatatctgaaaggaggtctttgttgaaaaacagaaatatgcattcataacttgcttttctaaaattggaatgtaatgattcttaaatatgcacagacacaaatttttctttaacagtcaagaaaatgcacgcaggtgataatcagatcagttttggttatagtacaaaggtttaatgcctccgtgatccctttcaacttgaaagcattctagagcaattggtgattaatatcagtataacagtcatttataaaattattatttatttgatatacatctaatcaaagcataagatttatttttattattattattatactttaagttttagggtacatgtgcacaatgtgcaggttagttacatatgtatacatgtgccatgctggtgcgctgcacccactaactcgttgtctagcattaggtttaaaagatcagattgtctcggcaccatgttaatatctttttctgttggcattagtattagttttgcttgtgtatttgtttaggagatagcttcacaagttggtgattgatattctaccatgtatgaagtcatgcgtggaattcagaatccccagcttgtaaaattgcattatgatcatctttagtgggaaattgttctcagaatactgagcaaaggatgataccaaaatggcagctattattcattcttaagcatatgaaatgctttcaggttcaacccaaaattacatacattttaaatgcttactaaaagagtcttttccctcctccatctattaactgcaatcaaaaaacttcggttttaactgaacatgatttcatattatttattaaaatttaaggcaaggtgcaccaagtacccttgaattatgaaaagcttcatgatgtgggatattctttcagttaacggcagggttggctacacttttaaggggttcaaagtaggaacagctgcaatagtgagctgcatctggaaagtccagtaatttgaaaaaccacctgtttatgtatcctgcccactcaagtccataaaataacagacactttcatattccaaatgaaactgctttttagtttgccctacttttaaacataactctttgtgatggaatgaccagaaacagctggtctctaagaggacagggctatgtgcgctcacctgcggggttggaccttccataatccccctggctgtggggaaagttgagggctgctgtctttatacaaagatggtttattccaagatacacacactcttcttccacaccctggagaccttgcatatttagtatcttctttaccataatctgaggccctagagaaaaagatttgcaaactatacttgttttaaaacaactttctaaaaaagacactctcagcccctagaaattatgcctaacacatagatgctcagaggcaacctgttgtagtgcaagaggattgtgccaagattagaaaacaaatatttgcaacttttgtaactgtcttctctaaaacttgaatgtggtgattctaaagtaaagaccgacacaaaattctttttctttagcagtcaggaaaaggcatgcatgaagtaatcagatcaggtgtggtttcagcataatggcctaatgctttcatgatctctttcaactggaaagcgttctagtcccactggacaccaaggaggaagaagggacggaaaatattaggcccataggtttatcttcctcagtagtccacgagatttgagcttatatgtagggagcaaaattgtttgtctaaaagcagttaataaatgccccaaaaaggctgggcgcagtgactcactcctgtaatcccagcactttgggagctcaagattggtggatcatgaggttaggagagcaagatcatcctggccaacacggtgaaaccccatctctatgaaaaatacaaaaattagctgggtgtggtagcgcgtgtttaatcccagctactggggaagctgaggcaggagaatggcttgaacccaggaggccaagattgcagtgagccaagattgcgccactgcactccagcctggtgacacagcgagactccgtctcaaaaaataaaataaataaaataaaataaaataaaataaaataaaataaaataaaataaaataaaataaaataaaaataaaatgaacgccccaaaaatattttgggcaaactattttgtgtttcttttctttatttatttatttcttttgagacaaaatcttgctctgttgccccggctggagtgcaatggcacaatcttggctcactgtatcctcaacctcctgggctcaagcaactcctgagtaactgggaccacagggatgtgccacaattcccggctaattgttttagccaggatataaatgctgcctacatagagtttgtagctatctccttgactttctttatgcagattccttcacaaacttttgatggattcctttaccaaattctactgtctgttaaaatcttctatctttatatctttagtccaaacaacacgtcatttataaaccttaaaattgtttctgggcaaataaacaaggcaaaataggaatatatatttttaggcaatttacttctgttttggtctcataaaaaattgtaattaaattgtagaaaatatttcaattcctctttaatatcctctcctcacatactggctctcaacttctaatcctcctattgaaacattgattgggaggccaaggcaggcggatcaactgaggtcaggagtttgagaccagcctggccaacatggtgaaaccctgtctctactaaaaatacaaaagattagctgggcatggtggcatgcacctgtagtcccagctactttggtggctgaggcacgagaatcgctttaacccgggaggcagaagttacagtgtgccaagatcaagccactgaactccagcctgggcgacagagtgagactccatcacaaaaaaataaaaataaaaattgaaatttgcagcctttttaaaaccccatagcctctttataaacccaaaagcactatcaaatttggcgaggtgtcaaaagaatcagaggaatgtttacaaatacagatgcctgggcccacctcagatatatatatatatatatatatatatatatatattttttttttttttttttttttgagacgatgtcttgctctgtcacccaggctggagtgcagtggcatgatctcagctcactgcaagctccgtctcccgggttcacgccattctcctgcctcagcctcccaagtagctgggactacaggcgcccgccaccacggctggctaattttttctattttttagtagagacagggtgtcaccgtgttagccaggatggtctcaatctcctgaccttgtgatccgctcgcctcggcctctcaaagtgctgggattacaggcgtgagccactgcacccggcccagatatattaaattagaatatctagaggtggagcctgagtatctgtatttttcagagtttcaaatgatcgttcttcaaatgattacactgtgaagtcagatttagaaatgactgtacccaaggttggctaaaagatacacaccctggttgattctacctgaagagagcaaataagatacacagcaaagttgtagatgttttccctgccagtagaatacttgcgggttaggccatttaaaaccctgccagagagttttgaaacactgtggagggctcccaaatcaacttgctcaatggttctccatcccttcaggctacttgggcttaaagccaactgcaagcttagagcctcagagtgacctaggaatggggtgaccatatattctaggttgtctcatacagactagccagcactactcagccgcaagtaatagcatccaggcatgctcagaagtgtcccatttggaggaaaaaaacaatattgtcacaaatgaattggcaatggcctgtctctgattcttatacctggaatatactggaagtccctactcatgctattttctagcagaataggcaaaatttctacattccaggcatgtcaggcctttccctgattcctttctctaatgtcactcgtctgctgtcttttatcacagccattaaactgcaccctaacttaaagaggatcccttatgttccaatctactcatccctcagatctttctttctctgaaacacagggttaatgagactgacatccttccatcacatattttctcagctactcagtaaaagatgtaaatgtttaaaatagtttaaactatttttcagttagtccaggaaacataaaatggcatgcttgcacataaaccattgtttagggtgggggaagtgtttttaattttgccttaaaggaaatctgcatgatccacaggctatgcaactaccaagggaattagttggtagaacagaattacacctgcacagaatacaaatttcctgcctttcatgggaactatgttgatgtttcagatatgaaatacatcttgttttctttattgaacctcgagaagatgtctcttgttggtcattatttcatggcaggggaagtacatattcctaaagacacaaccgagtttccctttaaccatcattagttgggctggccattaagaaccagacgcttttattttcaaagagacttaagttttgatgttgtacatatgtgcctaatattctatctcatagcaatttaaaggtgacgttttaaaaagctgcattcagtgtataaacttctcctgatcccagcaaggatgttgtgatgattttatttaaaaaggtaagttgtgtctagatatggcagtgggtcatctcatgcatggtgcagatgtcaaacacaattacattttcttatttgcaatgactaaaaaaagaagctgagcccaagcagtgagaaagtaggagattgggaggacaagaagcaaaggaaaaaagtaacatgagcaccgttctccctgtcctgccacttgctccattatggactgggctgcgatatctcatatcccagctccacaactcccaacaaccatttatgtgcatggtgcttccatgtgtgatgacccaatcaggctcaggtgtggactgagtagttaaattataacccttgtctctgaagagtttagggcttagtggggaaacagacatgtaaacaaacctgagtgaggtcatgtaatcaaaggacaggccacagtcaaccacaaagaagagagttctcagcagtctccaaagccgaacatatgtttaccaggaacagggtcccagcagagggagcaacaggagcaaccagagccttgaggggtcgtggcctgttctgggcaccagcagtggatcaatgtggccagagccagggatactagcagaagccagagcagcagggccttccttgtccagcaaaggcatttgtctctttgtaggccacagcgacccacagagggctttttaggccagaaaaaagccattaaggccgggcgcggtggctcacgcctgtaatcccagcactttgggaggccgaggcgggtggatcacgaggtcaggagatcgagaccatcctggctaacaaggtgaaaccccgtctctactaaaaatacaaaaaattagccgggcgcggtggcgggcgcctgtagtcccagctactcgggaggctgaggcaggagaatggcgtgaacccaggaagcggagcttgcagtgagccgagattgcgccattgcagtccgcagtccggcctgggcaacagagcgagactccgtctcaaaaaaaaaaaaaaaaaaaaaaagccattaaaaagggagtcatgtctcttgttggtcattatttcatggcaggggaactacatattcttaaagacacaaccatttcctcttaatcctcattagctgtgctggcaattaaaaaaccaaaagtttttactttcaagaagatttaaataacttctgagggtgtacatatgtgcttaatattctgtctcacagtaatttaaaagtgaagttttgaaaagctgcatcctgcgcttgtcagaaccatgtctgatgagatatcccctttaaagggctctcggtgcaatggggcaaatcaagggggtttgtgcaagtgggagtgagacaggagatggggtgcttcttccagcactccctataggctgactgagtgacaaagatcattttactgacacctccaatggccctatgagatgggtactattattattatcaccatcatattccttttgcagataaggaaactcaggcttagcagattgccagaacaacacaggcaggaagtggtagagtcagggtttgaacccaggtagtgaaactccaaagcccggattcttaaccactgtcctccagtgcctctctgtaataagtcatgatcccagaagccattggtgtggccacaatatggaaagagatgacagtgtcctcacactgggtgagcagcttatggtgattccagacatgatctctgttgggagtgacaggtctgagcttctaggatcagaccctagatcttggcaagtggtttgaggaaagagaaggaccaatgtaaaaccccaggcttcaaggaatgtggatgctgggcagggaggattaagccccaaagaccagaaatggggtacacagggcaggtgtggccagagtagaactagagtagaacttccagtgactagaaatagaaccagacacgttgcagtggtggataaggtagaatcgcttaagtctttaaagtgcccctgatcacccaagttggccagagaccctggggtggggctgattctgtctggatatacggggaggggtaagcatgaggaaaggaagcaggtcctgacaggtactttgcactaaacagctccttataaggttctcaatttgcctgctcaatttctacagacatttgtgggaccacaccagtacattgtaaaagcaggaaacaattgagaaaaacctgagttttatgttggtaggagaaatgcctatggaatatggcaaatcgtttctctgagacttcctccctagtaattacatatttgttctcaaaaacaaatgccagaaggaagaagcagatttaatagtgcattttacaaggcaccattaatctctaagaagaacaattaaaatgtctcagcaatcatggttcactgtatatcttttctatcttcttagaagtaatatatggctggaaatgggcataccaaaatatgtcaaggaagtggaattgcgttcattagatttcaccactaattattttagttagcttcacagatctctcttccttgcttgttcttgagagcgaggctttttagtaggaagagaaattgtctaaaacgattaataaccacaaattcaccaaactattttgggtaagtccctctatttctctaggtctaaagctaggaataagagtcattctcatataatgtactgtcccagaaagggcattatattagtctgttttcacgctgctgataaagacatatccgggattgggtgatgtatttaaaaaaagaggtttaatggactcacagttccacatgcctggggaggcttcacaatcatggaggaaggtgaaaggcacatcttacatggtggcagacaagacagaattgagagccaatcaaaaggggaaaccccttataaaagcatcagatttcgtgggacttatcactaccacaagaacagtatgggggaaccgccaccatgattcaattatctcccacaaaatgggaaaattatgggaactacaattcaagatgagatttgggtggggacacagccaaaccatatcaggcattcaaccaatatttgggaagcaccagccctgcaccaggcacggagcacgtcatgagtcctgccgtaccacagcctgcctgacagacctcagtcatcctctggagcttgcctctgacatctggacctcctcagaatcagcatctcttctccttgcccccgccatcctttgtttttatctctgctgtggcattcatcaaagccttccaactatcctgcgtcactgtccttcagtgtcctctctcctctcccttccttctcaccccactttgtgcctgtatccttcaagcagagcaatggcaccctcacttctgtggctgcccagtgccccatgcagagtcagacatcagaaaatagatgctgaattcagttgacactctgaaattctttttaaagtaagttaatgtgtgctttgaatgaaaagacactgggattacattattgagtgtctttcttcctttgccacttttgtccctattggccatatttgaaaatcttgttggaaaaaaaaattcaagaacttaataaataaattcaaaaacatttagtctatttacttaggtgaagagaaaactcattctaatatgtgtgtatatttaaaatatttgttatttagactttttttttaagtctccaggttgaggaggacacaaatatatcctcctaaaccttccagtaagcaagctgtggcatccagatgatctcctgggtcatgggggataaggctaatctcctaggtgtctggcagacaggacaggcaaattcccagaatgccaaaatataccatctgctgctgtttggcattgcccttaagtccagagtgtggaggctgggggtgggtctctggctacaggagaagtcccctggcaagggaggggtgaaaggagtgcctgttgaaccccccatctatccccgcactatggcaagattgagaggaatgactagatcagggaatggcccgaaagaaaaatccaaaacctcccaaccctggacaaggccacagctttgagaaaccgaagcctctgcttccttctctttggctttactgcttctagatgcaaatacacagagctctgagattttgtgtgctgggaggtgataactgttaaccctctattccaatagcacagaaatttctctttgcctcagaagtggtttctcatagatctcagatctcttttcaggaaaaagaaaaacaacaacaataacaacacattaatgactctgaaagagtcagacaccattaattccattattggtgtctgtgccaagtgaaatgaacgtcagctcttttcccagatatgtttccttcttttgcctcctataataagagatgattttactgtaataatataagactcatcaatttgactccaaatagctttcctatcaacaggctaagtgtaaaataccaggatcattattcagttgagaatagatagaactaggaagtagccatcaaaaaagaatgatgaggtgcattgtggatttggggtgtaacttggtatctaacatacagccagaatcacagtcatagcacacttaatattttatcagaaacttgcgtgaacaagttaagaggactctcaacttaaaaatgacaccaattgcaatgatcttgttaacatttgtgatgaaaataatagcaaagtgacttagacaaattacaatagcccataaaaataagataaagtttaacacaaagtaagatgatgttaaaagacttgaaataaaacagatatgttaagtaggcaacacataggtaagcatataaaaacaagaagataccaggatagagctgtcatttttgtgggagcctgtgatgtggaaaaccaagatgcctggtgagtataatggatatggaaaccccccttgtaataattccacagttccaaggggccaaggtctccaggttgagtcactattgtaaacacacccatagatgaatccacatgccatacctccttgagtaagtggggactcaaactaggtctgtcaattgttccagaaaattaagcatctaaataatttaatgataatttaaaagaagcacaatgaaatatttcaaggaatgtcacatacaagattctgtacctcttctgctttggttagactcattcagaataggttcctgctttgatcttaagagggaggtagagattctggagaagccctagggaagagcaaaaggaaaggaataaggagccaagaggaaacccagggtaaggctgaggagggactgtttcgtgtaggtgatttattggaagggttggaaggaaacatggaatgacaattacctttggttattgtcaggttagtatgagacttacaagaaaagcactgctcagacgcaattaccattcaagataagaaataataggaaaggctagcacacttagctttttatttaaaaaagtgttaggtaggctgagcacggtggctcactcctgtaatcccagcactttgggaggccaaggtggatagatgacttgagcccagaagcttgagaccagcctggacaacatggtgaaacctcatgtctacaaaaaaatacaaaaattagccaggcatgatggcatgcacctgtagtctcagctacttggggggccaagaggtgggaagattgcttgagcccaggaagtcgaggctgcagtgagccatgattgtgccactgcatgacagcctgggcaaccgagtgagagcctgcctcaaaaaaaaaaaaaaaaaaagtgttaggtgacatgagagaagatcttccaagtaataagagtggctaatcccaggaatgtgtcaccagaggttattttgtaatagtcgtgtgttaaattccttatttgtctatataacttctcaaatccttctgcctctacagttatagtttaactggcgcataacagccttcacacacagcctcataattaaacatagacatacatatgaacactttcccctatgccagcaggatacttggtttgtttaggggcaaagaggaattgatgtggcgttgtttcaatcagtggttgaaaatgcaagtggtaaacattgaaaaatagaacactgcaaaaggcatgcattgtatataccaaaaggtcagcatgaagcattatctgtatggcaagcctgcccatccactccctcctacacgttgcatattcacacagttttgcagcttgtataaacccctattgtgatagaaactcatgaaagagtgtggtctctgcgaaagctggctgttctgtgaatttagaccagtggttcttcaccctggctgcaaatcatctggggaacatttaaaaacactgttttaaacaccccaaccctagaaattctgatttaattggtctgtggtggggcccagaactctgtattctttttttaaggctctcaggtgctgctaatgtatagctaaaattgggtctggtttagactctcagaatttcttaataattaaacactttatcatgacaagactttcaggaccttaaaggccacagtggggtagttatcatttcactaggtcctcatctggggaggtccttggcatttttactggaatatatttgtcactcaaatttctattacaaaaaattctttcttgcacactgctttagcaactacatgagatatactttgtacatagcacaaatctcatatcacttatgtaatccagctctgtggttccttcctttcctttgcctgtttatttttaattcttcccaagaggaagcttagccagttagaacaccagagtatcatccccctcccccttttcccacctgagttcatggcttagacatactaggaatgaagctgacaacatgcactagtttttttcgaaattatgcagcaaaattcccaaagtgcgagtggccacagagatcttcacagggcccagggacaggcagacatcattctttctccagttcctggcacagaaaagagaccttaggttactgagaagataccagtccctcctcagagcagacaaggaaactgagcctcagaatgaaagactgaatttcagtcctttcttgaacatggacctccagggttatattgggccttggaaaaggcacttacactctggactgtagtttcttcatctataaaatcaagaggcagaaacagacaatctctaagttgcctttatttataaaattccgagattctagttgaccagtattcatacaagagttgaagcctgtaagagtgcagaaagcccacacaaagagacagtggaagacctctcatcagtagtatttttattaccctcttcctaggttttaccagtcaacatcctcactgttaatatacagaccgtggtatttaattaaatcatctttgaaatactgagctatcaacagatggcatgctgaatgcaaaaggaccacaaataaatatttggtactgaagaagatcaagagttggagttcatttcccattctgatctgggctcagaactctgtggtcttccctctaatcatccttgccaccaaattggctgtatctgttctaagatggatcagaaaatcagttccaaagttggctacaaactttcaggtttgggttttgttttgtttttttgttttgttttgttttgtttttgcaaccagccaattcatcttagttcacatgacagagaagtgcataattacttgcaactttagttagagcagtggccttaagaaggtctagctaaataaaaagtgctcagactttctgagtgctgacagttgtcaaattcacctagttcacatggccccatttctatcgtttgttttgttttgtttttgttttttaacagcccatctgtgagcaataggatcagatgactaagagctacagggcagaaacactgttacttagagtcaaattttcccattacctagctgtaaagagtttgtttctctctgactcatataaagtttaccatttaggcccctgcatgattttaattccatcacttaacaccccagccatatgattctgaaggtaaacatgaaggcgtttgaattccagaccacctaaacattcttaaggaaatcatcatctccacgggcagagctatgccaaaatctgtaggttttaactcaaatttcatgataagcaaaaattgaattaatttgtcttccattttgttcacctttttgccaaaattatgcctggattagaataaataaattcaatcaatgaatgcaatcactaattcttacgccagataataacacattcagaattctcctttccctgggagattttatcaggttagtgttcttgtaaacaggagaaagagaaaaatataacttagtaaatagcagtattcactaattcattcatttattcaacaaatattaatttactacctactacattccagggagcttagagtctagtatcagaaataataaccacacacacacatacacacacactacattaaataaggatgtgataggctagatgaaataaataaataaataaaaggtccaggtgagaaaagaaggtgggggctagaaagaagtcattgaagaaaaaacatttaggttaaaacattatgaataacttagagtgagccaagtgcagagtgctgaaggagtgctccaggcaaaatcaacagcaaatggggagtccttgatgtagaaaagggtttgaggaattgtcctgggagaaatactcaagattccagtctgaattctagaggttagtgatttagagaggcaagtacgaaaatgacttcctctcttaccttaaaagtaagtgcaccatagaaggaaatcacccttccttggtaataattcctgagtgagcctgagaagccagaggccatctctattttataggcactgtccccttttcagttacccatggctagctcattgaccttgtcctggtcgtttcctcatttcacttactccatcctcaaaacgtagacgcttcataaatattgtataaatgaatgaactcacaaagtcacagtacagcaaggcaaaagtgcctgcaataaacaagcattctaggctagaaatatttctcaacttcaaattgtgtcttattacattgtattccgattttctagagtggtagttctcagtcaagggaaagtttttcttcccttccaggggatatttggcattgtctggagatagttttagttgtcacgatttgggggatgcttctggctcaacttgggtagagaagcggggatgcttataatcatcctacagtgcacaggacagtacccccacccacactccagtaatgaagaatcattagacctaaaatgttaatggtgtccaggtagaaaaaccctgttgtagaggttggggactgcgtcttgacagccacattatacagtgtatcaaacaattctgtataatgggctgtaattatccttgcctagattttgcaagaaccctagtgtgtatctttttcctcacttgccaagcaatgttcaaacctgcagagatttatttcattcattttctgtgtgtttagtaaacagactagaagcactggaggaaaaaatattccagcaatgaggtaagacgaaagctattagtaaccctagtttaacttagctgaatagtaggaaacaacctctaccgtgaggaagtgtattgtagaaactgaaaagacgctaatgatgtttaaaaagctgtagttcaaacaaatgtgcatgcagaccaatgggtagactgaaaatgatgaagacatttccgtttcttgtgtctttgatagaaaagaaagagcttttattttctttagtgtggcaatcattcagatttgtcccatgacatgcccagaaggttgaagaataacaaactcccaagtgtaaacacagaatttagcgaagaatccaggcctctggatgaatccctgtaattgcatgtttggataaaataagattttcatacattaaacaaggtaggatttttctatctgggacggaactttcaacacttggaggggttgtagttatttctcctcaaagatggcaaacatgagtgccccgagttatccctcctctctgttcaagttcgctaactaatcacccagtatccatgctatcgctggcccttctgtggcctatttttatactgttcactgttcagtgtcacttgtttggtaacactcaacatcaacatgtgctaccaaattgacaccagaggacaaaaaagaatcaagatatgtacagcctgctttgtactgagccagctgccactagatgttttttgtgataatgaacacgtgaggccatgtggacgcgagagatggctccgggttccctcagacggctcacagccagctggtctgcagtgcggttttagattccgatgtgggaaccccataaaaaagaatatgcaggccaggcgtggtggctcatgcctgtaatcccagcaatttgggagcctgaggcgggtggatcacctgaggtcaggagttcgagaccagcctcgccaacatggtgaaatcctgcctctactaaaaataaaaaaaaaaaaaattagtcaggtgtggtggcggatgcctgtaatcccagctacttgggaggctgaggcaggagaatcgcttgaacctgggaggcagaggttgcagtgagcaaagatcgcaccattgcacttcagactgggcaacaagaatgagactctgtcacaaaaaaaaaaaaaaaaagtctgcaggctgcataaagaggtatgaaaatgttccagaaatcccaaatcctatccctgaggttcattttggtgagggaatgtgtgtgcattttctagggcttccctaaaaaagtatcacaagctggatggcctaaagctacagaaatttcttggggacaaatttcatgattctggaagctagaggtccaaaatcaaggtgtcagcaaggctatgctttttctgaagcctatagggaaggccttccttgtctctcctagtttctggtggtttgctggcaatgtttggcattctgtggattgcagctacataactccactctgcctccatcattaatggccttctgcctgagtgttttcatatgaccatcttcatataaggacaccagtcatatttgatgagggttccaccctactccagtatgacctcatcttcactaactacatctgcaatgaccctatatccaaataaagtcacattctgagtgtctggggattagaacttcaacagagcttgttgaagggggcacaattcaatgcataacaggatggaaactagaaacgggtatgtttttatcagtgtagaaagatttagcttaatttttcaaagtgtaataaaaaccccaggaaaactcatactccctcctaagaagagcaaaagatggagaaacccgatggttaccttcaaacaaaaggaaaggaggaataagatgaaaaggaattaatccaaagcaaagagagtggcttatatggaatgttggtgcaactttctctgacacatctgtgcactcatcagctggggcatcatctccctggggtacatttggtcactgtgtgcctcatggtaataaactccagaagcctcattgacttgctagagatgagctcatccttcttgcttgcttaatggcaaaatacaaaataagcagtcactgacatggaacgatttcaggaatgccaaaaggttctccttttccaaaatatctcttccatcttcccaatactgttactgacatcactaacacctctccacttccggttgagacacctgggccagagctcctgatgtggcaggcagtgccctaaacgttttgcataaattaactgatgcccagagcaacaaccctaagatataggtactatcataccgcatcttacagataagaaacttaggcacaaagaggtttagtagtttagatgagataaccctgatgagcagagattcgaacccagcctccatgctattaaccaggacatcatattgcctttcatacatgctcttcaaaggcaacacagtaatcgattatcacactcactcacatctgattgtcacatttttcagatctgctctcctagcagagaatgaagcctaaggtatccttgtttctcaaagtgtcctccccagaccagctgcatcaaaatgaggggatgaggtgcaaatgcctggaccctgcccttggagcactgattcataatctcaagtcccaagaatctgcattttaacaagcatccccagaaatttcttaagtatactaatgtatgggaaccactgacactaaagaaatggaataaggggaacgtacaatgttacagtaaaccaggaaaagccagaaagacatgacaacacagtgaggactctggtagccaatggtcagtcaaatgcccaggggccctggccagaagagagttaggttgctgaggagtaagagtgatgctgaatgtggaggcttgagagcagaaggaagccagccagctatatcctcttgcttggatcacacaccctttccttggtggaaatggttatttgcagagttagagaaggcatgttttacagtttggatggcaggtatggatgtagacaataaagagcaaccagagtccatgggttcagaaatccccatgtgtttctgtttgaatgagacgcttgcataaacagcacaaggagtttggggtggggttaaagagaatggtgtggtatagggagagctgaatgaggaactgagagagcaaaatcctgtgtttggttcaatcactgattacaacctccctgaggctcggtctcctaatctgtaaaatggggggaaataatacctgccttgcaggtcctcacacacagggcatgatgtgaatccactgaggcatatagcactgtgtaacatgagttattgctattccaaggcccgtaaaaggctcttgccttggaatatatctgccacaccaatgcctgcagtccattaatgacacataaaggacactggagataacgatgtcccttgttctatgcatccctcccacccatgccagaaaagaaaacacagtcacctgaagtcattctaaagagtatgcctgcctcttttcctgcacagacacatatacacagacacgcacatacacagaccatgcacatacacacacatgggaaaacatgaggaaaagtggagacaagaggcaccaaaggacaaagtcacttttgtcgcctgtcccttccccagcagggctgggcctgggctgcttctcctgcctcctccctgaagccccctcctcatcatattccagtgcgtgtccaccactttggggccaggtctacacaactgcagtgattcaggtcacgggagaaaacccaaacaagcacaaaacatgcttcaacctatattttctaaattgtttttctttaaaggtgaagacttctgagcttgaattatccccttgtcagtgggctttccatgctgtccaagtgacctaagtgataatcaacctccatttcattttgagaatggttgtggtattttagagctatggtgaataagaaaatcatttaaaataaaatgatttttatttatttattgtttttatttattttatcttaaatgaattttaaatcatttaaaataaaataatgggataaaagaggatgctaaaaataataaatatatatgtatcaaagtgtgcttgtaataccaggcaaagaattaataagagataatattatggttggtgaaatgttatgtatggctacatcctttcaatgagcatttatagttcctttaaaatatgcctactgaagaaatatttacatgctaattaacatgtgcatagtaccactaggtattatagaggataccagatgtttgtagtagacacagaccttgccctaagtcctggtcttgatgtagtcactttttagtcactacaggtgactacatttagtcactacaagtgaccttccttcaatggggaaataaaggactttacaaaagacgtagaagacaattcttaatataaaagtgatttagatcttcacaagtttgtgaagagaagcagatgagtgaaatagaacactatcaatgtaaaatattattctgaggcctctgtaatgactgggaagcaacaagagggaggtcatttcagagagagaggctctaggttccaagctggatgctcaggtcagtgactgcaggtcccctccacacccatcaccccacaccctaaccctcttcagttgctcacaaaggtagataaatacccacatttttgccctcttccatcttgaaaccctggaaacccttgcttccgccaggggaggttacttagtatctgtcaccccaagggaaccaacgtcgaagcccaagaataagagtcaatactcctaccagaggtttacatttttcccaggggtctaggtggatattcctgggaacccccgtcaacacaggcatctacagtacaatccaggcctcctgttttcagcaggggctgcaagagcactgcagccttttccccagaggtgtcagtttggcccagtaaagattgcccctgagaaaacacatgggcaattagagcaaagttcctatgttctggtaacatttaattgtgctatttctcaacctcctctgcacccacacactcacacacaacatttattccactgacttcaaaggaagctcaacgtgttaaaaatatgtgtgggaacaaagaagggagtttgaaattggtctaaactctgtataactgggtttgacacgtacattaggattttacaagtatgtatttaatctttttttaaaaaaagcgtttacatagggttcagaataatgacaataaatcaacatttctattgtccatttgtgtgttttcatagtaaataatgctcatttatccttaaccagtaatacatacttatgggcttaaattagcaaaagcctctcaaaaagtagctccactcatttatccaccagtgtccagatgccatccagcacatgaggagctcccagaaaggagcagggaacaaactagggctgtcaggagtggaggagaaagaatggcatatgcaaaaaggagctgtaattaaatccaagggaacatggcacactctagtcttttgcacgagacaaagggcaatcctggtaaaaatacagatccccaggccccaccccaaagagtctgatctgattctgaaatggggccggagaatctgcattttaacaagcaccttcaccaggtgatccttttgctgagaacccctgagaaatgagaaccctgtgctagtgctgaatggagcattatattccagagttgaagtttggtgatcagttttccagatggagctggtccttggtgcatacctgggtataaatccaagccaattcaggtatatgagctgatatttcaaccgaaacactatctatagcctaaattttttctaatattctgtttggtatgaattctagaaagttgtaaatgctatatttccttctcatctatttctggactttgtcccaagaccaaatcccagggcatctgatagacattcattgcatacatttttctgtaaacatgaaaactgaattgtctaatagaaaagggcaaggaagtagaaaataagaaatcatcatcagaagtggtttgttttggaattatattgtccagctgcataacaaatcacccccaaaattgagtcgcttagaacaacaaacattgatcctccacagtttctgtgtgttaggaatcaaagtgatttaatttaatggttctgctcagggtctctcgggggctgcaatccaggtctcaggctgggatcctttcaaggctgagctggggaaagatccatgtctaagctcactcacatggccgatggcgggattcagttcctcttaggctgtcagactgagggcctccgtgtctcagtggttttagccagagccctctctcagttcctttccacatgggcctctccacagggcaactcacaacatggcagctggtttccagtagagcaagcgagtgagagaacaagaaaggcaagcaaggtgaatgtcccagtcttttgtaacctcatctcagaagtgttaacccatcacttttgccatgttttattatttagaagcaaatcactaagtccagcccacaattagagggatggcattacacaagggaatgaacaccagcagacagggtcattgaaagccatcttagatgctgtctatcgcatctaagtgtgatttttccagatgaaaagaatatattaatttgtttcagtcttagtcgatgtgccatcccatttgtgctttgctaaaacttgtatcaatgtaaagcaaacattttctgatacaatttaggtagtgtattgtggtaatagagaccagtagtgttgaaaagatatgttgaggtcagaaattaagctcatgtttctaaaagaggagatatgtacaactactatgcaagccaacaggaaagagtgttttaagaatgctttctgctacaggtaactaaaaacctaaacagctgtggctttaaaataaaggtatatctaagtcacataagcaaaagtctaggggtgggcagctgctggcattgcttcagtagcttgataatggcaaaagcagcatctcttctatttccttggccttctaatcatgcatgtcacctcacaatcacaacataggcaacacctcatattctaagcaagatgaaaagggcaaagagtcatgccatatgcctctgtctcttttcataaggaagacaaagcttccctggaagtcccctctagcagatttcacttagatctcattggccagaactgagtcacatgcctgccttaaaccaatcactcaccaagaagactaacattatcatggcaagtctaaaccaactgtgactcatctctgaaatcaaaggattattaccattacccgaatccatcaggatcctgttggcagagaagtgggactgtaaattttgagcaggcaacaaacaagtcttctgtaaacttcttatgtgttgttttttatgtgttctatatatccagtagaatcacaatttccaataacagtctaaaaagatattttccaatagaaacagaatgtgtaagatcattacttatgaaatcccaaatgtacttaaggtttccttcttgaaaattccttattcaaaataaaatgtccagattttgaaacccagaaaagattctatattttaaaaatcctgtgcacatgtaaactgtttttcaaatattgccttcagatacattgaacagaatgaaatcttctgagatttactacatcagccaagtattatcaaaacaaacaggacagattgcttttcttgacgtctgctgcttgatttgtgttaactcatgtttctgaaattgtagtatcataagccaatgctgcacaaaggtatttcatgtcatttataaaaatctagtaatgtaaactgttaactccttataaagcatctgttgacacacaaaaatatcactgaagtgcatttatgcctttcttctttaggtctgcataatacttccctccagaaggccaagttgttccataaattacagaacagaaagttggttgtgggaggaatagctcaacctcatctgaggcatcccactctaagaaactaatggcacctacacctcttgggcattgagtttttaagcccatttttaattcttgttctgctcatattctaagtgagcacataaagtgctgctccaagcaagaccagcccttgtagaagggcaagtgcagtcagtcccctaggaaacgggactggggagtgatcgtttcaatgagagataaatcaaactgatgctaaacatgaacaatgagcccattagagattgtgagaaagaggcatcatcatccactcaacaataggcctgtgggacctcttgatagcctgaggatgtttaatttcaggtgcaggtatccagaatgtagcagctagactgatcaaggatgtgtgatgacagcaagcagtagtggaagagcccaggagagttcctaagcctgaattgcaatcctgtgctgccataaaatgggaagatatacttggtccagtcatctgacagctttggtcatcaatttctctatctcatatgtgactctattgctttaagaatccctttagctttaaatatctatgaatctgctgaagcagctgtgctttgattgatgtggatctctgaactcccttaaatacaaagaccaattatttagccgagctttgttggattcagtgcattctgaatacatgtcaaaatatacttggatttgtaaaaaatattccttcctgtttttttcaccatagatagatgtacaaaaatgtccgtgttcacaccgtggaaaggacatttctcataaactcacacagagatacctttcaagtcaatgccttagaaagcaatgagagatttaaaggagacctagagatatgaatggagtaggcagagaaggtatgtgaggagaatgatgtaacttcctagggaaaaagtatgaagcacaaggctggacatagacctgggaatcaggaaattagagttctaattgcagcttttccattgattcacttgggatcttgagaatatctgtctcattttaatcattctgggccacagtttccatatctgtcaattagagtaagagtccctggctgggtgcccaggattgtgagaacataccattcagagccataaaaatgcaatcagtaccaataatgtactagtaccagtacctaggatgcaaaacatcctagatactaggtgtcctaacttaaagtggaaacattaacaagagtaattctttgaatcatcaaactgggaatattttaggaagcatatctatctgggtgaaaactaagcaaataagacaattgtaaaggcttgtgatctcaggaatacaaaggcaaaaatgcgcagacttgaaatatgacaagttctagttttgtcacttagcatctctgtgaccttggataatttcttaacccccggcagtattctcatctgtaaaatgggaataatgacatgcacttcagtggtttgtggtgaagattattacaaatagaaattagctcttttgagccactggtggggtttaaattcccagcccttatgtgctttgcagctgttagttcctcttattacaattgtctatttaaaaacctagtcacagcccggtgcagtagctcacgtctgtaatcccaacactttgggaggccaaggcaggagaactgcttgagctcaggcgttcaacatcagcctaggcaacatagtgagaccctctcatctctacaaaaagcaaaaaattagccagtgatgcatggctgtagtcccagctattctgagggctgaagttggaggattgcttgagcccaggaggtcaaggctgcagtgggcagtgatcatgccgctgcactctagcctggatgacagagcaagaacctgtctccaaaaaaagaaaggaaggaaggaaggaaggaaggaaggaggaaagaaaagaaagaaagaaagaaagaaagaaagaaagaaagagagagagagagagagagagagagaaagaaagaaagaaagaaagaaagaaagaaagaaagaaagaaagaaagaaagaaagaaagagaaagaaagaaagaagggagggagggagggagaggagagaaagaaaaaggaaggaaggaaggaagagagagagagagagagaaagacctagtcaccaaaagcaagagattttttaaatgctactattttttgggcatttactaatcatattgctatgctctgcacccaagctaagtaatttaaataaattatctcatgtactcctctaaaactaattactgctgtgtaaatggaggtagaaagaaactaagctttatttctgcctctattgtttctttaacctgccttgcttcctttttcagttgcacctaattggctgtacttttagttttctttaaaactgccttaaatttcaaagactaaagcagcaataactaactgaatatatttatataacatgttatttttgtcatgttgctttccacccctggagacctgctctaaattcacttggacgtttgaggataaatcatgctcactagcagtttctgaaaatgcagtttcactgaaaatgcaggcatccagaaatttagtaagcaacttaaaagaaagtgtaagaatctcctatgtattcattgaaaaataatttgaatttatgcttagaaaaatagaattattattaagaaatcttacacactcatgtttttaaatatcttcactaaggaccaattgtgtatatggtgtaacactgtcctcaaagaacatgccgggagaattgttgcagttaccagagggttaaatttggcaaactcttttttattaacgtgccttttaattatgaaatagcatactcaccttagataaaatttgaaaaccatttttgtaaagtggtacaatattgaagaaagttgataactttcagaccagatttaagcctcaaatctacctctcttttacctggacaactcattagcatttctgaacctcacattttttctataaagtgagaatactatattatagagttgttgtcagttaaatgagaacagtgtctgatcacaactagtcaacaaatgttcacaactcttcccctcctaggaaaagaatctcaaggcagacctgcttcgggtctgctctgtaaagaggtaggaatcctctgctcccggtaaattgcttcctaaccttctttggtaatagactattttttaataaaggtgatggatcatttcccattatacactcaaaatgtgtgtccatttcagggcagtcatggatgaccattgcccatcttttgaccccagattaagaacacctgctgtagtattttaattctgccttcaaatcctcttacaaaacaaagacatctttaaaaaataaaattctttaggtgtcttgcagttgaatgcaggaaaaccagagccccttatttttgatagttttgggaagaatgcagtgtcagaacacaaacccataatagacaaataatttgcacagaaacttcataaaagtattgacctgatttgccatgtatttgccaccttttaaaacacacaactaaatgtttaccctgtgtctagatccaaatgggtgaagaaaaatgagtgacaatacatctacttaagctcacttacataattgtggccatgccgtttttttcacattacattattagaacattggacaataagtcaagaaacagaatgttctacaaaataaactttaaaaattggtaagcatcatgtgctttttccagaagacattttattttgttgaatcaaaggtggctctttggcactgagtagctccgtggagtcatggcagtcctcattccctaatcctgagcctgcctgagtcgctgctgtcagtcatccacttgttgggatttcaaactgcattaaatcccctcctatagctgtcactgccaagcagttgcactggctctgtcctacctttctgttggtaattctgtttttaatcctgtg

SEQ ID NO: 783 - DNA, 10773 bp, Homo sapiens
  source 1..10773: mol_type = other DNA
cccaccttgggacacacccggaagcggcggcggcgcccctcggggaagatggcgccctcggggctgaaggcggtggtgggggaaagtgagtgcctctccggggccgggctctggcgtccggtgtgggacgggggtcggggacgcacgggctctgggatcctgggtttcatggcggctgggagttgggggccgggctgggcgtccgagcacctgaccctcgagggggcgggcggggacgggttcccagctggacgcccctgctctccggtgccagaacagaacaaaattggggggccggactccggggacccaaaggggacgggtagagtgtggcggaggctggggcccggactcctgggcctcctagggtgcctgccgggggaggagggcacagctggatgcccacactctaggatctcttaagccgggcaaagttcaggggctggattcttggggcctcctagggctctggtcagcgaccctaggtgctgtgagcgctcaggggacgtgtccaggccccacaggggtggtgtaggggatgtcttcctccttgccccatttccaggagcgccttgcagctggaggacgcaggcgtccaggcctcaccggccccggttcttgggggaagggtggagggcgcctcttcctccaccccggggagttccggcctcagctgctccttccgccctggccgtcttgataacagtggacatgacacagtggacgtggctgggcggggccaccccgttacttctctccactctctcctctaggcagggcggtctgtagctcaaacccctttaattgggggagattagaaaaaagtgattccattttacagatgaggaaactgagaccggaggtcagtgggatagcctcagctaggcatgcctcagagctgggaaccaggggtcctacattttagaccaggttggggggactggctgaaaccctcacagcaggaatacttgaggtagcaggtggggaagccgagagcctggcgctagaggcagatagagctgtagatgatcccggttctcctcttttcattcacctaaaacatgtttatcgagtggcaccttttgccccagcactctgccacttagacactcaggatgcgtaggtgagttacatgttgcctaagaatctgtttccctgtctgtaaattgggggtgaccccagaagccaatttgcagaactgggggctaaaaataaatgattcctgtgccgtgtctcacacctgtaatcccagcactttgggaggccgaggcaggaggactgcttgaggccaaaagtttgagaccagcttgggcaacatagcgagaccccatctatacagaaataaaaataaattagctgtgggtggtacatgcacctgtagtcccagctactcgggaggctgaggcaagaggatcgctggagcccaggagttggaggccgcagtgagttatgatcacaccactgcactttagcctaggtgacagagtgagatcctcctctcttaaaaaaaaaaaaaaagtaaatgggaattaagatgggggttcagccccaaggctgagaaggcttggggcagtggtgggaccagagaaccagcattctgacccctcccctcccttccctgcagaaattctgagcggagttattcggagtgtcaagaaggatggggagtggaaggtaggggtgaggcagatggctgggtacccagaggcagctcatcatcaggcctatggggaagaccctgaatgtgggacccccaagaactgcctgtccacatgggtggagttgggtgaatgggttctgggtcctcccacccagccagcccttgaaactgcccctcccactgccttggccccttctggggccagctgtggcctcttccgcctgctcctccatccatctgtccatccatctggacaggtgcttatcatggatcacccaagcatgcgcatcttgtcttcctgctgcaaaatgtcagatatcctggctgagggcatcaccagtgagtgaacgcgtccccagtgagatgggacctgagcgtgggaacccctgactgtgcccctctcccagggttcagcccttgagtgtaggatcccctcaaatcgtccagaactcccaagtacgcagctccctgcacggacagcccggatcatgtgaccaaatccattcttaaaccttgcaagctgactgcgggagcccatggattgcaggcctcccctgcagcactccctggctgcagccccttcctgaccgtgcagctccctcgtggagccctgtgtgggactcccagggtggactctggatgtggggtcccaagaatgcagagccttctatgggtgaccccaggtggtgtcccagtcactttgccattgagggataggtgctgagggagcctgtcctctcagaacctcagtctccctgtctgtaaatttggggaacccagttggctgcacaacccctgcagaaccctgtcgtgtggctcttagctggtggtccctaagtgggtttctcctgcagtccctcctaagcatccacccctcctccccaagcctccaaccccccacacctgagactccccacgtggccctgcctggatgccacccacctgtgtcccttcctctgttcctactagttgttgaagacatcaacaaacggcgggaacccattcccagtctggaggccatttatttgctgagccccacggagaaggtgcctacatgagtgagcgtgtgtgtatgcgcgtgcatgcgtgtacatgtgcatgtgtgtgtatgtctgcatgcatgtgattgcatgtgtgcatgtgtatacgtgtgcatgtgtccatgtgtatgtgtgtgcatgtgtgtgcatgtgtgtgtgcatctgtgtatgcatgtgtgtgcgtgtttgcatgtgtgtctatgtatgtgtctgtgtgcatgtgcatgtgtgtgcgtctgtgtgtgcatttgtgtgtatgtgtgtatgcgtgtgtgtctgtgggtctgtgtgtgcatttgtgtctgtgcatgtgtgtatgcgtgtgtatgtatgtgtgtgtgcatctgtgtgcatctgtatgtgtgtgtgtgcgtctgtctgtgtgcatgtgtgtatgcgtgtgtatgtatgtgtctgcgtctgtgtgtgcgtctgtgtgtatctgtgtgtgcatgtgtgtatgcgtgtatatgtatgtgcatctgtgtgcatgtgtctatgtatgtgtgtgcatctgtgtgtgcgtgtgtatgcgtgtgtgtatgcgtctgtgcatgtgtgtatgcgtgtgtgtgcgcatcagtgtctgcatgtgtgtatatgtgtgtatgtatgtgtgcgcgcgcatctgtgtgtgtgcatgtgtgtatgtatgtgtgtgcatctctgtgtgtgcatgtgtgtatgtgtgtgtgcatctgtgtgtgtgtgcatgtgtgcatgcgtgtgtatgtgtgtgtgcgtgcgtgcatctgtgtgtgtgcgcgtgtgcccatgtgggtgcgacactagtgtgcatttgcacatatacatgtccccgtccgtccatgtttgcacatggtggcagatggggggtggctgggaggcctaggcagccaatgagcctaggtgtgcaggctcaggcccagagagtgatccaccttccccagtcggttcaggccctgatcaaagacttccaggggaccccgactttcacctacaaagcggcccatatcttcttcaccgacagtgagtgaggagagcctagggtgttggtgggtggggcaaggaggtgtgggggctgctctggcctgatgccccactcctgcctcaccccagcctgccccgagcccctgttcagtgagctaggccgctctcgtctggcaaaggtggtgaagacgttgaaggagattcaccttgccttcctcccctacgaggcccaggtacggcccgggctcatcctgggcagggggtgggggtttgtgaccaaatgtcccctgttccctcagaaacagacactgaggctgggcgcagtggctcatacctgtaatcccagcgctgtgggaggccagggcaggaggatcacttggggccaggagtttgagaccagcctgggtacagagcaagaccccgtctcttaaaaaaagaaaaagaaagaaattagcttggcgtggtggcgtgcacctgtagtcctagctactcatggggctggggtgggagagtcgcttgagcccgggaggtcgaggctgcagtgagctatgattgcactgctgccctccagcctgggcgacagagcgagatcctgtctcaaaaacatacataaagtaaaattttaaaaaggggaggtacccacagagtccaaggagctcttgccttgagttctatcccactaggcccttgcagggggcagcgtagagcgcaccgcggggttgtccagccagcttaagggacacgggctggggtatttatccactgactcctgcaggcatgggtttagggttgacctgggcctgcctccaattcggcaaagcaggcttcagggaccagggacggctcccaggaggtgcaggtggcggcagcgggaagcggggcaggtgtgcacctgcagcggcaaccctggtgcttctgtcccctcctcgcccaggtgttctccctcgatgctccccacagcacctacaacctctactgccccttccgggcagaggagcgcacgcggcagctcgaggtgctggcccagcagattgccacgctgtgcgccaccctgcaggagtacccggccatccgctaccgcaagtggggaccccacccagccccaccccgatgccgacccccccttaaccgcgtgcaacacctaacctttaacctctcttgtgaccccagccccggccctaccctggcccctgactctcaccttcaaacccatccttgaccccatcccctgatgatgtcccccgtgtctgacctccccgccaggggcccagaggacacagcccagttggcccacgccgtcctggccaagctgaacgccttcaaggcagacactcccagtctgggcgaggtgagggggcgtgcttgggaggtgaggggcagccccaaccggctcagggtcagtgcctcattcctgccctaaaccccaccccagggcccagagaaaacccgctcccagctgctgataatggaccgggcagctgaccccgtgtccccactactgcatgagctcacgttccaggccatggcgtatgatctgctggacatagagcaggacacatacaggtctgcagacttggaacccgtccccacccttgccactgacctggttccccagtcctcagctcccctgacccccaggctccctccttcctccccaggtatgagaccaccgggctgagcgaggcgcgggagaaggccgtcttgctggacgaggacgatgacttgtgggtggagcttcgccacatgcatatcgcagatgtgtccaagtgcgtgcacacggggaccggatcccccccccaccgcccactgtgggcctggtagcggccttgggatccctggctgctgccaagtctttggccctcatgagcacccctcgtgtgactccagactggcctccaatttcaccccacctctccctgtcccccctgagtgggctcacccatggcctgtggctcctctcccctcactctcacccccgcccaccctcatggccaggaaggtcacggagctcctgaggaccttctgtgagagcaagaggctgaccacggacaaggtaggggcggacccaggtcaccaaaggcgctggtggaaggaagcccccctccccatgggcgcagggccacagcctggatttcgagcctggactgagacccaggtgggcactgcctggcttcgccccccaatccctaccctcttccccctacttccccaggcgaacatcaaagacctatcccagatcctgaaaaagatgccgcagtaccagaaggagctgaataaggtgtgctcgggtgggcagggagcggggacacctcggcccctcaaccccatgctctgtctgcgttctgccttgactcagcctttgttatcccccaacccccaccctgcaccctgcagtattctacgcacctgcatctagcagatgattgtatgaagcacttcaagggctcggtggagaagctgtgtagtgtggagcaggtggggcagggcttgcggggggcaggggtgatggtcctgccaaggcggggtattggggaggggctgaactgtagagatggggggttctgggggaggggcagggcttgtggagaggtggaggggccttggagagaggtgggacctggtggggaaggagtgggtcttgtggagaaacggtcctaggatgagggtgtggcctgtgcataggtggatggggcttggagaggtcagacttgggtgaggggcagagccttggacaggtggtcccaggacaggaatgtggcctattcataggtgggtgggaccttggagaggtaggcagggccttggagaggtgcgacctgggagaggaatggagccttggagaggtgggacctgggtgaggggcagagccttggagaggtgggacctgggagaggaatggagccttggagaggtgggccctgggagaggggcggagccttggagaggtgggacctgggtgaggggcggagccttggagaggtgggacctgggtgaggggtggaaccttggagaggtgggacctggatgaggggtggaaccttggaggggtgggacctgggagaggggtggagccttaagagaggtgggacctgggagaggggcggagccttggagaggtgggacctgagtgaggggtggggccttggagaggtaggagctgggagacaggtagagccatggagaggtgggatctgggtgaggcacggggccttggagaggtgggacctgggtgaggggtggaacctcggagaggtgggacctgggtgaggggtggagccttggagaggtgggacctgggtgaggggtggagccttggagagctgggacctgggtgaggggtggagccttggagaggtgggacttgggtgaggggtggagccttggagaggtgggacctgggtgaggggtggagcctcggagaggtgggacctgggtgaggtgtggaacctcggagaggtgggacctgggtgaggggtggaacctcggagaggtgggacctgggtgaggggtggagcctcggagagctgggacctgggtgaggggtggagccttggagagctgggacctgggtgaggggtggagccttggagaggtagtctcaggatagtggtgtgacctgtgtgtaggtgggtggggcactggaaaggtgggacctgggtgaggagcagggcctgtggagagactgtccctggacaggggtgggaccttgagagacctggtgctgagatgaggtaggacccaaatgtcctcttgccgaggatcctggggatgtccttggcccgcctctcccatccccttccctgacacatagcggccggtggacggctgaccccatgcccgcaggacctggccatgggctccgacgcagagggggagaagatcaaggactccatgaagctgatcgttccggtgctgctggacgcggcggtgcccgcctacgacaagatccgggtcctgctgctctacatcctccttcggaatggtgggtgggggctgcagggagttggaacgtccccatttgccagcgtctcccacgatcctgggaactgctgaaccccacagctctccttgggtcatttgcactcaccgggctcaccaacccccacagctacccctctggacccgggaaccctcctccattggcttggggattcctccactgaggtgagggctccctgctaacgtagaaaccctcacatctgtgattcctatagatgtggggctccctcagctcatctggaggagcccctgatctaccccctccaggtttcccactcttgctcacactagcacagggtactgaggccctccccactgcaaggttctctcatcagagtcctgggagctcctcagcccaccccaaactcccctaaacctgggagctcacctggccgccgcctccaccctgcccattcccgtcccccaggtgtgagtgaggagaacctggccaagctgatccagcatgccaatgtacaggcgcacagcagcctcatccgtaacctggagcagctgggaggcactgtcaccaaccccggggtacgccaggagcgggcatggggggaccctgggagagggtgcggatcacagccggggctctgcaaggcagagggccattggtgcacaggcacggtgtggttcctggcgtggtgtggttgctgggaggccaaaagcagtgtttcgggtctggtctggggcccagaggacactggggcctctcccagtcccagcttacacaataggcaggggaagtgagacatggtcgctgccaggctggtcctggcagtggtgcagttgggagcgggtggtctgagtgctagaggcagggagtagggtccccagcatgggggctacaccacattgtctatctgggctcccaggggtctctgagggtcccccgcacccatccagcacccacacacagccatgtgtgtgcttgactcttgggtcagcctctcctgtctctctctggccctgtgcgtccccctccagggtgccctcaccccgtccccatctctcccccatccctcatccatctcgctgtgcactgtttctccatatctctctctctcacccttctctctgccttcccctttctctctgttctctgtcttgctcccctcccctctccgtcccccttctgtccccatcttcctctctctgtttcctgcttcatctcttgtctctctctttgccttcatactttgtctcactgcttcttatctctttgcctatctctgcctctgtctttgtctttctctggctcgctctctctccctttggctttctctctccgtctctctctggctcactgtttctctctctcgctttcttgctgtctctcgctctctctcgctctctgttccacttccccatctttgcctgccatcccccaccctaccagccacaccaggcgcagcccctctgtgaccagcctccttcccctcaatccccctgctgccctccctgccctgcctgtagggctcggggacctccagccggctggagccgagagaacgcatggagcccacctatcagctgtcccgctggaccccggtcatcaaggatgtaatggaggtactgggtggcaggtcagggtgggggccagccctccgcatcggctggcggctcagcctccctcctgctgaggtgctaagcctcagggcttaggggaaaatgctcattgctggcattcccttggcaccgatctgctctgctgaggggggcacgccaagcccgcagctgaggaattggggtgacagcggggcctgtgctggggagcctcacttcctccccacctgccggctgcctccgctatatctctctagtctgttcccctgtcccgcaggagtgcccctgagccccagccctggccttcccaggatcccagggcagcaccatccaatggcaatgggcctggggcggcttcctggcttcctccttgtccctctaagagccccggcccctctttctgcgtgggggccagagacctgggcctcctcatccccatggaccttgaatacctggacttctggggctctgaggggctgagagcccagacactgggttccccaaagggctgggggtattgactgatggtccccaagggcctggaggcccagactactgggttgccgaggaactgtgggtttagacttctgggtacccaaggagttatggaattagattcgtgggtccccagtgagttatggatctagatttctaggtccccaatggactagaggcctagactcctgggtcccccagaggcaggaggtggagatgctggttcctgtctgccaggatcttggcccctgaataccccgtggggggcactcctgaccccggaccccatgcctggggttcctcccctaacctgcctctcggccgccaggacgccgtggaggaccggctggacaggaacctgtggcccttcgtatccgaccccgcccccacggccagctcccaggccgctgtcaggtgaggccccggggccgcccccgcccacgcctgggtctgtgttaggtgggcggcctggcggcggtgagggcctcctgcctggactttctgcccctgccctgcacagtgcccgcttcggtcactggcacaagaacaaggctggcatagaagcccgggcgggcccccggctcatcgtgtatgtcatgggcggtgtggccatgtcagagatgagggccgcctacgaggtgaccagggccaccgagggcaagtgggaggtgctcattggtaagtcaccaggactgggaccctggggtctggggcttgggttcccggggcctgggcttgtaccttctaggtgtctggactccagagtccttggagtcagggacctggtttgctgagggacagggacagccccacaccagccgggaccgggagcctgtcaaagacgaaggcagcgccccccaacatcttccccaaacctctgcccctgcacaggctcctcacacatcctcaccccgacccgcttcctggatgacctgaaggcactggacaagaagctggaggacattgccctgccctgacccctggccccgccccctacccctccctttccagagaaataaactcttcccgtcgctctgccag

SEQ ID NO: 784 - DNA, 3727 bp, Homo sapiens
  source 1..3727: mol_type = other DNA
gcggtttcccgccgcgggtgaatgagtccgactgcgctgccgccgccgccgccgcccgcatcgaagctccggccgcgtcccccgcgccagccccgggagcctgcgcgccgagacccctgcgtgtctgcgaacagacctccggcctcgggccatcaccccgggcaggtaagtccggggaccccgcccggtctgcggggaccgccgggaccccaccccccaccccaagcggagtcggggagggctgggggcggggggacaccggggagtcgactcgctgctctctcggccccagacctaccgcccctcccttcccccaccccgaacgcctggccctccggtccagggaggagccacaggtgggtgggagccgggggggcggagctgggacaccccgggggtccacccacatccgtgtcttcccctgggactgagcgcggaaccctttggaatgagcgctgagatgctcaaaaccagagtgggggcgggcgaggggccagtctcctctgggagctccccggagagtcagagcgcggcccccacgcccctgggcttggtgctgggaagttaagcgggatctctccggaaaaaggtggggggaacccgcctcactcctgtcctgggccgccgcgcctgggcgggacgcccccaggggacccctccacccccaccccgccggcagggccctgccgggaggccccacagggagcaggtgcccagggccctctgccagccgccccccactgctcctgacccctgcttctcttcccagacgctgcagcccctgtccgggcctcttgcctgccgcccccatgagaaaaaccaacatgtggttcttggagcggcttcgggggtctggggaaaacggtgctgcccggggcgtggggagtgaggcgggggacaaggcctccaaggggcccctgtacagcaatgtgttgacgcccgacaagatccccgactttttcatcccccccaagctgccctcgggccccgcggagggcgagggacaggccgcgctgggcccctccacgtcggaacagaacctggcctctgcggccccccgccagaccccacggagcccccggctgcctgccaagctggcagccgagagcaagagcctgctgaaggcagccacccggcacgtgatccagatcgagagtgccgaggactggctgtccgaggaggccactgacgccgacccccaggcccagggtgccatgtccctgccctcggtgcccaaggcccagacgtcctacggcttcgccatgctggctgagagcccccacacgaggcgcaaggagtctctgttccacagtgagcacggggctctggcccaggtgggctccccaggggccgggcgccgccgggcagctgccaaggccaacgggggtgatgggggccccagggaggctggcggggccctcatgagccccggccgctacttcagtggcggggagagcgacacagggtcctcggccgagtcctcccccttcgggtcccctctgctgtcccgctccgtgtctctgctcaaaggtttcgcccaggacagccaggccaaggtgagccagctccggcactccgtgggccgccacggctccctgtctgcggacgacagcaccccggacgccagccccgggagccggcgccgcctgacccgccgggcacccccggaacctggccccgagtcgggccaggcgcgtggggagcacacggtccacgtgggccctcggggcagcgtgcggctgctggccgagtacgaggccggccaggcccgcctgcgggtgcacctgctggccgccgagggcctctacgaccgcctgtgcgacgcccgcagcatcaactgctgcgtgggcctgtgcctggtgccgggcaagctgcagaagcagcgcagcaccatcgtgaagaacagccgccgccccgtcttcaacgaggatttcttcttcgacggcctggggcccgccagcgtccggaaactggccctcaggatcaaggtggtgaacaagggcagcagcctcaagcgggacacgctgctcggggagaaggagctgcccctgacctccctgctccccttcctgtagagcggggacctgctcgctgtccgctcgggtgcagagggcagaccccggtctctcctccacaccgggtgctggcgggcgggtccgctggcttgggctggggctggccggggaggggctcacactcaggctgggctgggcgctgatgctgtagctgacgcagggtttcctgggtcacccgatgctgactggagtattatttttcatgaattaatttctcctttggaggaggaggaggaggaggagaggggcctcgggggaagagaaggggccacttcgcggggcagagggtccccctttgcccctccacactgcctcgcgcctttcacgcagagttctagaaggaggttctcaggggttcaggaatccgtgcatgtggccagggcggggccgtggacagggaggtgacaagtcttggagcccacagtctccttcactgcacgtgtgtcttcctcccccacagcctgccgccatccagttcccaccccgcggagagcagggcctcgcggccacaccaggcccaggctctgcccgggacgccccctcccaggggtcaggcttggctctgggagaccccagcttcccaggctccggtggggagtggggccaggcgagggtgccctgacgagggtgggcgcggagggagcagccgctgccacagtcggagcagaggaggtcttggcagaggtccgcggggaggagacggctctcctggcctgttttcctccaacactgtcgccgctggctttttgggtacaggcccgtctggccatttctgctgtggcgccggagggtcttgctcagagatgcccagagagcagccctatggcccatccgtcctcgctgggggctgccaccccgtcgcccttttgtccagcgtctgcagctgggagcgacacgcagtgattgacggccgtggctttgacgccacgtgtgtaaataggctgtggctacggtgggtgggtcggagcccaggaggcagctggggggacctggctatggcctttcctgctgttaggtggctgcaaggcttccattgtgtggttatgtgggtccttgaatgattttggggaggtttccagctcagaatgatgcagaaatgataagactcaaagcaggggccaggccaggccagtgccttcgcctctcccggctgctggtgggcacggaggaaccagggcacatctgtggtacccagggacgtcccttgtcagcccgtttgccacacattgttcctcttgtccaggggagggtggaggagctgcttcccaggactggaggagcagctgggcccctgctgcacgtccggtgggacacacctgtgagccctccagagggagagtgcaggccccttctgagcctggtgttgcagggctccgctctctcccggaagccagggcacccagggcggaggctcctcaggccggggaggcggggagggtgccctgcatggagagagacgccggcgctccccgccttctctgatgctcacccctcccaggccctgttctccctggggtcccccgtttagtagcccccctgcactctttgatatcttagtgtctgaggttgactgtgggtaaatctttaagacactccccagctgtgtttgtttataaatgctgtttatagtgcaataaaggtgtttcgggaat

SEQ ID NO: 785 - DNA, 10163 bp, Homo sapiens
  source 1..10163: mol_type = other DNA
gtgacgtctttgccccgcgccgcgccgtcccacccatctccctggcctccggtcccaacttcgcttctctgctgaccctctctcgtcgccgctgccgccgccgcagctgccaaaatgtgagtgacgctacgcgacgcgggcggcttcgggccccgcaggcggcagctcgcgctgggaccgccatactgcccagttgccgccggccgccactcggacgcaggccggggctgcgcggggatcccgaggcctgggggtgggcggtggcccttgggtcgcgggctgcagacgggccgggcgggtcccgcggccatcgggcggacgcggaaggggcaagggcggggcggcgagacgcttcccggaggaagtgagctgcccgcccgcagcccgctcctcgccccttccctttctagtccccgacgtccctgagaggaatggggacgacagccctggttcgggagcgcccgctctcggcccggtgctgcgctgggccccagaagttgcgaaagaaaggacctcggccctgtcctgagcccctgtgggccgaagagctccttgcctagctaggggcatctgcactggaaagatcacttaaccgtgggccttcgctctcttaagcgaaagcacgttgcaaacccctgcttccagtggtaagactcagagaatgctaatggttaagaatcacaaggactccctcttccacctccattctgctcattgctcaccgtcggaggaagccccgggtttcttccaggagctggggacccccctcgaatgttcctgctgaggctgctgtgccaatagatcacagtggttaagatctagagccaaggtacacaggacctgatctaaaaacaagctgtcctgcagccagctgtgttgactctctaaacctcactttactcatttgtaaaataggagtaatattcccctcagagagttatgagggttaaaggaggaaaagcatggaaagagtctagcgccacggcatggtccttacttatctaccagatactaaactccgtgaggacggtgatgagatctgttgtagccctggtcattgacacatgacagatgtaaagtgactgttcaaacagcccatcagactgttgtataccaaggcacatgctaggtgctatctaggatacagagaagagagtaagaagacccaggaacctgtgatctattcgaggaggcgggactttatacctgaaaaaccaaagtgatactttccaagtaatggagccaataatgacttcagagtcagagtggttaagaaagatctgcatggggagaaataaagcctttgatgaagattttaaaagatgagtaccttcctgggccgggcgcggtggctcatgcctgtaatcccagcactttgggaggccgaggtggacggatcacttgaggtcaggagttcgagaccagcttgaccaacatggtgaaaccccgtctctactaaaaaatacaaaattagccgggcgtggtggcacatgcctgtaatcccagctgcttgggagactgaggcaagagaattgcttggacccaggaagcggaggttacagtgagccgagatcgcgccattgcactccagcccgggcaacaggagcgaaactccgtctctcaaaagagggggaaaaagaaagagtaccttcctaaaagaggaggcatttcttcaacacacctttccactcacaccacccactccctgcatcccagtgttcctgactctgtttctgtaaattaatctatttttccatattggaaaaagggcattctgtaactgtttgtaactatgaaaacagttccttccacaatgaaaagatcaggaaagtactgagtacattcaagcagatgtgtgccttagaacaagtttcaaaaaaggacagtagagcttacctatcgtgggatcagatacttcagggatacaaagtaggtcctattaaagcttaacatttgtccctttagtaggtgggacagtcttggaaattatagagaaattagaagaaatgcaattaaaactttcgttcattgcttcaggaagaatttctttttctgttttagttctaatgtaagagattgttaacagtgagagtcccggagtaacatctttatacttaagaaaatgtatttggaatcgtaatgtactcatgctcatgcctttacatgttccaggtctacaggtccaactgctgccactggcagtaatcgaagacttcagcagacacaaaatcaagtagatgaggtattgctctgaaatgttggaaatatgaattttaaacaaatatgagtactctggaaatctgtttagaaaaagtatcatcaaagtgtgaatgtaaagcaaattctgactgtatcataattgtaacgaaactttgctccctgctgtgctggaagatctaatctaagcaaaagtcagactttctaggtttcacgcttgttttcctgtgatagaaacctgctcataacatttagctcaggagaaataaaaaatcatatgcctaaaacatgaacatcactccctgagtgcattccccaagaagcactttataaaatcggataatacaatgttaaggattaggtctttagattgctcaagccaagaccagttcttctgatcagatttttttatcaaaatgctttgtcttcttactaattgtccagcctgagcaagcctctctgtagaattcatctctaatggttgtccattgacacacacaaagtagatactgtcaaactccattagctcagcaaatctctgtttgtagaattcttgagctagaggacctccatcttttgttctgcgccgtatgtggagaaccacagcagaagattgagaaattcagactagtgtttccacattcctaaaagccgtcactgtccgacaaatatatttcggtctttctgcatttagctgccctgaaaaaacagttaaagttatgtcagatactgttgttaaataatatagtaatgttttgatctgatggttttgttcatgaacttatacaattttagattttcacagtaagaaacccattgtaattctgtcctgcctggaaattctgtttacttacaaaatcaaattggatttttttttttagccaaaggaattttaaggagagttgtttttttattgaggcaaaattaccataacatacaactaaacattttaaactgtatataattgagtgttatttagtatattgataatattttgcaaccattacctctttccattttcagaactttttcatcaccccagaacacctcatgcccatttagtaatcattcactatttccccttcctcccattctctggttacctctaatcagctctctctttctgtggatttgcctgttctgggtatgtcatataaaaggaatcatacaatgtgtggccttttgcatctgccttctttcacttagcacaaagttttttgcattcattcaagttgtaacgtgttgtaccgtgttcctttttacggttgagtaatattccattgtatgtgtatacacaatttgttgagccatccatttgttaatgagtcttcgagttgtttccacctttcagcaattatgaataatgctgttataaatattcacaggaaagattttgtttagacataggctttcatttctcttgaatgtatacctaggagtagcattgctaggtcatagtagctgtatgtttaattttacgaggaactgccaaattgttttccacaatagctgcaccattttattttcccaccagcaatgtccaagagttcctgtttctccacatccttgccaacacttgttttccattttgattataaccatcctactgagctctttgggttttcatttgcgtttctctaatgattagtgatgttaagcatcttttcatgtgcttattggccatttgtatgtctttgaagaaatgtctgttcaggctttgcccattttttaattgggttgtttgagttgtgagagttttttatgtattctggatattaaatctttctttatcagacatgtgatttgcaaatactttctcccattctgtggcttgtcttttacattttttttattttttttatttttatttattttttttgagacggagttttgctctgttgccgaggctggagtgcagtggtgcaatctcagctcactgcagcctccaagccccaggttcaagtgattctcctgcctcagcccccagagtagctgggattacaggcgcccgccaccttgcccggctaattttttgtatttttagtagagacagtggttcaccattttggtcaggctggtctcaaactcctgatctcaggtgatccacctgcctgggcctcccaaagtgctgggaatataggcatgagccaccgcacctggcctgataatgttctttgatgcacaaaagtttttaatttttatgaagtccaatgtatctgtttttccttttgttgttcttgattttggtatataagaatccacagtcaaatccaaagtaatgaagatttacccttatgttttcttctaagagttttatggctttagctcttacacttagattattgatccattttgagttactttttgtatatagggtgaggtggggattcaacttcattcttttgcatgttggctcttcaattggcccagcactgtttattgaaaagactgttggatggccttcgcactcttgtcaaaaatcaattggccatagatgcttaggttgacttctagactctcagttctattccatcagtctatatgtttgtccttatgccagtatcacactgttttgattactgtagctttgtagtaagttttgaaattgggaagtgactttggggagtactgccctcttagcaatattaagtcttccagtgtgtgaacataggatgttttcccatttaatgatgtctcttaacaatttctcttagcaatgttttctagtttcattgtccaagtcgttcaccttttggttaaatttattcctaggtattttattctgttagatgctattgtaaacacaattgtttccttaatttccttttcagattatttgttgctggtgtatagaaacacaactgatttctatgtgttgttgttgtaccctgcaactttgctgaatttgttagctctagcagtttgttgtggattctttggtattttttatatagagagaatcatctgcaaatacagataggtttattcttcttttccaatttggatgccttttctttctcttgactaattgctctgttcagaacttccagtacagtattgagtggcagtgtgaaagtgagcatccttgcctcgttcctgatcttaggggggaagtctttcaccatggagcatgatattagttgtggattttcccataaatgccctttatcatattaaggaaattcccttctatccttaatatgctgattgttttgatcatgaaagagtgagcccattttttctaaagtgaaagtttggctcaaagtaataaagtgctgacctgaaagaacaatgtgcctgtagattgtctttgaagtctctgtgcctccattttttttgagacggagtctcactctgtcacccaggttgaagtgcaatgacgcagtctcacctcattgcaacctcctcctcctgggttcaagcgagtctcctgcctcagcctcctgagtagttgggattacaagcgcccagcacccctcccggctgattttcttatgtttttagtactgagacagggtttccccatgttggccaggttggtctcgaactcctgaccacaggtgatccacccacctcggcctcccaaagtgctaggattacaggcgtgagccaccgcacctggccctgttcctccattctttgtgcattacttgctgtgatcacactcatctaggtggtggacataatgcgagttaacgtggacaaggttctggaaagagaccagaagctctctgagttagacgaccgtgcagacgcactgcaggcaggcgcttctcaatttgaaacgagcgcagccaagttgaagaggaaatattggtggaagaattgcaaggtaattatcttttaactgacctttacatttaaccccccttctccattctcagagaattaacaggctacagataatggactttcacgactctgggaggtgggtttgacttcctccacatggaaatgtgggtccactgtgaatccgaaacactgactgcataccctttcctagccccacactaggaatcctctatgtgctgtggctgatcttcagaagatgcaggtagaacaggaatatccaaaatcactcacagtcatcagcccctcccaaccctctaccccagcagggccccaaacagataggagagggctggaattggtcagttttctcgtagttctgtgaatggttccaaggtcaagggaaagaaatgctagaaagccacagtgtgcccaacagaagagtagaaagcagctctcccaggagcacgagccaaagcagattttatacagttagcgtgctgcaatcagatccagatgtatcctgtcctctgccttgtttacaagtgacactttgagacacagggcaagctgagcagcctttccatatgtggaaaacttgtatacacaaacaaatgcctagctagaggccacacatcatttgaacatcttttaaaagcagataagttaccttcaggccctaattgagaacatttaatttaggctttagaaattattaattactccagactgtatgcacctgaatttccctttcagtgactagatgaatattatataatactcttcaacaagcacattatgtctgcatttgaaatgtgatatggacatatgttttgttacagatgtgggcaatcgggattactgttctggttatcttcatcatcatcatcatcggtgagttacccttttctaaactgattggaaaagtcttctccatgtgttcacagaccattgattttgtgtacaagaactcagattaaaatttccctccgaaatgttagttttggctaggtgcggtgactcatgcctgtaatcccaaagctttgggaggccaggagtttgagaccagcctgggcaacatagcgtctctacaaacaattgttaataattaaccaggcatggtagtgcacacctgtaagtcccagctactcaggaggctgagacaggaggattgcttgagcccaggaattcaaggctgcagtgagccatgatcatgccactgccctctagtctgggtgacagagtgagaccttttctcaaaaaaaaaaaagaaaggttcatttattccaaggttttcagttttctttaataaatgttttaagtacttgagttttgtataagtctgagatttgatacaaacattaatcctttgaagttagagaaaatctattcatttccacttcttttctctgaatatatttttttcacatatttccttttatgtaatgtagtggttaaaagcatggagtgcctgtgatccatcctggctccaccaccatccagctgtatggccgtggacaagcaatttaatatctctgggtttctgtttcctcatttgtaaaatggggataataatagtccctgtcttgtttgtttgtttgtttgttaaaggacagatctggtaaatatataaaaattggccgggcttggtggcgcacgcctgtaatcccagcactttgggaggctgaggcgggcagatcacgaggtcaggagatcaagaccatcctggctaacacggtgaaaccccgtctctactaaaaatacaaaaaattagccgggtgtggtcgcgggcgcctgtagtcccagctactggggaggctgaggcaggagaatggcatgaacccgggaggcggagcttgcagtgagccaagatcatgccactgcactccagcctaggtgacagagcaagtctccgtctcaaaaaaataaataaataaaataaataaaaattgcttaggttggtgcctggcatataataataaaaataatagctatataaataatatatatgtatacacaaacacacacacaactattattatataatattcaaacaactcactgccatcggtagcccagtatatgagaaccgaaacatgacttctttcattgatagatggatgttagtggatgtttccttttagcaggaaggtacagttacttggatccttttgactctagtctccttcctctagccctctatagaatggagagaagccagtagtaggaaatcagcccagtctaatttctgatcacatttagactgcagcattggatgttggcttgggattcacactgagagactaacctgctgtttcccctgcctttttgcatctctcctccttcttagtgtgggttgtctcttcatgaagaaccagcggaactcaaaactgctgttcaagaaacctcttcaagacttttgacttagaacctgctatattatcaagcttacctactgttatctctaaaattttttttgtgttaatgtaaagttgaatttctaggaaacgtgcctttgttttttaatatgcactccaaattagaaggccggccccgtccacattttgcacagtgcctttacagatttacgtatgggctgatgaagaggccttcttaagttccagagtgctataatctagatgtaatgttgtcactaattaattgccattactcccagttagttacccttgtcatttggcattattttcagaaccacattttaaacctttgggtaatcagatttccaacttatgccttccagaaaaaaacactactgcctaacacaaatctgtgataacaacaggctgtgccttattttgataattttctgattccctagaagagaaccctctactttttgtaagcactactgactctcgctgtatttaagatgctggtgaagagcttttgctcttgcattagatttgaagatgtttacattgttgttattgttatgtatcacttgctaaaaatattgttttaatcagagataacctctttaaaaaaatttttaaagaactatggctatgaccaaagcttctattttgccaaaaagttaaataccgataaaatggccttaagtgtattcctgacagttaaattcagaaacgtgccaaatggaactcaaggtgccccttcagaattaaaatcattaccttgtgtgtgaaccttctacatcttcataggcctttcttccttttgaaaggctgtagacagtgtggctccccttctgattcagtattttgcatgggggttagagaaggtttgaggtagactctgaccgtctcataaaagagttctacccagcagttggcagattatcagctgtggactccagcatgtttctgataattatgcaagcaacaattctgtagcctcaagtaagaccacctgtgaacttgatcattatctggcccaaatatgaagataaactataactttggagtttgtttcctatttgtattcacattctgcttcctaaatcagttttctaaattatgcctgcaattaggcattggtcaggggtgaatggctcttttcacagagagtagccaaccagagacctttgctttgatatcatcaactgcagagaatgctgttgatgggaatgctggaagcagaaactttgtcatcggaaaaacttttcttgtatgcatgagactcaacatcaggatccacagcttaaagatgggaattcaggtatgaaagaaaacaggcaaggaggcactgagggagaaagacacagactttatcgctctgtggctcattgttactggaatattctaaaactcttgttcacatgctattatgacttataaagcagcaacagctgaggcgcaccaggacacagcttccatttctttaacgtctgttcccttaacatcgctgaaatgatttactgttgaagagatgccttgcggtgtggccagctgtgaggagaaagcagctggcagtgttaggacattagtccaccttcagcgcagggtctctggccgggtctgactcagaaaccttggtactcgccccttggccacagtgcccagacccatgtaacccactggctcctgcattaacccagaaatacctcgcttctatctgtgcacttagctgggaacttacccactgtaatcacctaaataaagtgtttataaacatga

SEQ ID NO: 786 - DNA, 11940 bp, Homo sapiens
  source 1..11940: mol_type = other DNA
gaggtgtttcctcctcctccgtgtggggcagctgctggctgggctgcctgttgagtcagccttcttccctcacggctcttctcccggtccctgaaactcggctgccaggggagctggagccacctgcgaaggtgtcctcccatactggacccctacaggtaacacgtgtcggtgccagggtcccctgccagggtccagagacgcaggcactgccacctggtatcctgagcaccctccagcaccttggggttgggggaggtgggcacatgtctggaactggaacagctggacagatggacagaccctcctcttgaccaatgggtctgtcccaccgtgtcaaaacagcagagaagaccaaactcctacctaactctggtaggagattctgcctctggttggtaggagaggggacttcagggagggggcactgctgaggacgctgggctgatgcccatggcccagctcaggcaggcctgaaggacagaaataggctcagttctgccgaacgtccccccggcctccatccacactcagacacacacacctggtggcccccaaggcaccaggggacaccccacagcacacagcccagtcacacatacagcacaggaggaaatgcacaatgcatactgtacacaccccacacggcgctgtcacctagaaagtcactgaacacaccacacagacaatatagtcaccatgcagcatcacactgcaacaggacacaaagacacacagcaactacacagctcacagactcacgcaacgcagacatgcccaccagactcggacccacacagccacacaacagggcacagagagggacgtgggctcacaccccaatccacaggggaggccgaacgtgggctcacaccccaatccacaggggaggccgaacgtgggctcacacgttggccacagaagtccagggaaactgctgttgtggagcacacaggtatccacagagtgaatgcacaccgtgcagccgtgctgaggccttctgctcctgagggtgtcaagagggatcgctggggctcggccactgactcagctgggaggggacagagcatagcaggcggcggacacaagccaggacctgcccgccaagctgcctccgccggtctcagccccacctggagccgtggcaatggaaggggcggggaagagaggagaggccgcccagtgggctcaggacacagccctgaccaagtcatgggccccttgccacgtctacatgcccctcagcgctgggcaaatgctttctttccggagtcactgtggtacctgagcatgggctgctgcgctagcctaggcctccaccgccgggaccccagcctggtctggggagaactgtgtggccagaacagaggggccctgtggctccaggcaacagggcagggctggcggcgggggcatccctgggttggaggcctccgtgggagtgggtgcggcagttacctcaggagaggaagttgggggtgtgggctgaggaggaggttgcctcagacaggaaggccaagtgggccagggcagggtggaggtggtggcaggaggggacccaggctgtgaggttcctggtgcgggggagtgagcagatgtgtgtgtgtgtacgtgtgtgtgtgtgtgtatctgtctgtctaggtgggtggttgtatgtgtgcattcccatgtgtgtgcaggcatatttctgcatttaattaatcaaacttttaccaaccatctgttgtgtgcaaagtaatggctttgagggtgactccctctccctgcctccaaggagctcacaacccagttagccgggcaatgtatgtgtgccaaagtctgtatgatttttatgtacatctttatcgagggacatatttgtccccagacttgttcttgtctaggtgaacccatccgggtgggcctatccccattggtgtgcatatgctgtgtgcaggtttttttgttagtttttgttttgagacggagtctcactcttgcccaggctggagtgcagtggcgccatctcagctcactgcaacctccttctcttgggttcaagtgattctcctgcctcgcttcccaagtagctggaattacaggcatgtaccaccatgcccagctaattgttctgttcttttcattttttttggaggagtttcactctttttgcccaggctggagtgcaatggtgtgatctcggtttaccataacctctgcctcccagtttcaagcaattctcccacctcagcctcccgagtagctgggattaaaggcatgcaccaccatgcccggctaattttgtatttttagtagagacggggtttctccgtgttggtcaggctggtctcaaactcctgacctcaggtgatctgcccgccttggcatcccaaagtgctgggattacaggggtgagccactgtatctggccataatttttgtatttttagtagagaagggggtttcaccatgttggccaggctggtcttgaactcctgacctcaggtgatcggcccaccttggcctcccaaagtgttgggattacaggcgtgagccaccgcgcctggccactgtgtgcagatttaagaacatgtgtagggccgggcgtggtggctcacgcctgtactcccagcactttgggaggctgaggctggcagatcatgaggtcaggagttcgaggccagcctggccaacatggtcaaaccccgtctctactaaaaatacaaaaattagctgggcgtgatggtgcgtgcctataatcccagctactcaggaggctgaggcaggaggtttgaacccgtcaggcagtggttgcagtgagatgagatcgtgccactgtactccagcctgggcaacaaagcaagactcctcaaaaaaaaaaaaaaaaaaaaaaaaaagaatgtgtgtgcatgtctctcgtgggcatgggtccgggtctgtgtctgcagagggccctttctgggggaacagctgtgcatgcgcctgtctttatgcaggtgtctgtgtgcatgtgcgaccatatctatgcctacatggacccgcgtgtgcacatgtgtctgtgtgttccatcgctgcagtcctgtgtggccctacctcagggtgtgtgcatgtgtgtctcttgcttcttccactgtgtctccaagtgtgttcaagggctagtgtatgcatgtgtgcatgagtgtctctcaccccaccttgagctcagccatcctggggtggcaccctacccatacccggccaagtgtttggggagaaaagggctgttggttctaggatgtgccaagcatttgtgcagggcttgacctgaccctcggtctgcccccaggaagctccgtgtgcccagctggggcacagccccagctgatgccccagaggggccacccatcgcaagaggggctttgggctctgccctccctccccatggcgcatgggccaaagcctgagactgaaggactgttggacctcagcttcctgacagaggaggagcaggaggccattgctggcgtcctccaacgagatgcccgcctgcgccagctggaggaggggcgggtcaggtaaggcagggcagaccctggccggggagcaccaagaggcttgagtggcccccatcctgctccctaccgacaccactgcctgtcagatgtctgcgtggttcttggttttgcccttcagtctcctctggccttggccagctcacagctcatcacttctccaggggtgactgcaccagctttctcgccagcctccctgcctccaggcttgcctcttgggcccacctcctgcagctggtgctccccagatctgtctgcttttttttttttttcttgagacagagtttcattttttcgcccaggctggagtgaagtggcacaatcttggctcactgcaacctccacccctccgggttcaagcgattctcctgccacagcctcccaaatagctgggattataggcacatgccaccatgcccagctaatttttgtatttttagtagagatgggttttcgccatgttggccaagctggtcttgaacctctgatctcagatgatccacccgcctcagcctcccaaagtgctgggattacagacgcgagccaccgtgcctggccagatccgtccttaatatccccgctgaaaacttcccctggctccccagtatcaagggcaagctcctaggcatggtccactgggcctccctggtcggtccttgccagcccccaccatctcctctttcaccataactccgacccgacacacagacacaaagtgacccctccagccactcaggtgctccccagtccctgaacccactcttcacttctatgcctatgctggtacttcttcctggaagagcacagttgtagaagagcatgggcgttacaagcaatgtttggggacagacacttcctagctacgtagccttggcaactcacctgacctccttgagcaccatgctcgtcgtctgtaaaatggggctaaggagtcctacttcactgatttaagaggaattggccagagatagtggcaacgcctgtaatcctagcactttgagaggctgagacgggaggattgcttgagcccaggaattcaagaccagcctggacaacacagtgagaccccattcctacaaaatataaaaaattagcctggcgtggtggtgtgcgcctgtagtcccagctatttaggcagctgaggtgagaggattgcttgaacccaggaggtcaggctgcaatgagccatgatcatgccactgcactccagcccgggcaacagagcaagaccctgtctcaaaaaaaaataataaaattaaaagtataataattattatccttctctacctggagagttccaatttgtcttttaagaagaaattcaaggctgggcacagtgacttacaacattgtgggaggctgaggcaggtggattgcttgagtccaggagttagagaccagcctgggcaacatggaaaagccccgtctctacaaaaaaatatataaaaaattagctgggcatggtggcacacgcctgtagtcccagctactcaggaggctgaggtgggaggatcacttgagcctggaaggtgaaggttgcagtgagctgagattgcgccacagcactccagcctgggcatagagggagactccatctcaaaataattaagtaaataaataaataaaggcaattcaaatgtcacctcctctgggaagccctcctggattctcacaggcagagctggctcttcttacttctatcacatcatccacctcactacagtgtacttgtctcttctggacttggtctccccagcagcccgagctcctccacagcacagatcaagtctgatttgctgttgggtccctggcccctggtcccaagcctgttaacaatgtaggtggcgggaatgttgcttgggtgagtcatgacagccacaccctcccccttcctccagcaagctccgggcctcagtggcagaccctgggcagctgaagatcctgacaggggactggttccaggaagcacgctcccagcggcaccacaatgcccacttcggctctgaccttgtccgagcgtctatgcgcaggaagaagagcaccaggggtgagaggagatcctcggggcagggcaagccatgtgccgtccagggcgctggctgtatgtggacagggagagaggaccactagggctccagtcctggctgcccccagtactgtgtgtctttcagtgggcaatgcccctccgtgggcatggggtgggtgggtatctcccagggcctctcccgagtcacagccaggcttcctgagcatgggggctcacagaacttctcacctgcgcccaggagaccaggctccaggccacgacagggaggctgaggctgctgtgaaagagaaggaagaggggccagagcccaggtgaggaggagtctcaggaagggggagatggtgcccaccagtcaccagggtccctccctctgagagcgtcctctccctactcctaggctcaccattgatgaggcccctcaggagaggctcagggagactgaggtaagtgaatgagccaacatgtgagtacagtgtccctggaggggaggtggaatgtgcagggggcaggggggaaagagccccagcctgggaatggggagaccctggaaatgttccttcctgtgtctgcacctcatcacctcctgggtggaacagtggtgaacggtggggaacggtggtgaatggtggtaaacagtggtgaacggtggtgaacagtgagtggtatatggacccagcctctaagggaacttctgaatctggctattaaggggtgaagtggggccaggcacggtggctcatgcctgtaatcccagcattttgggaggctgatgtgggaggatcgcttgagccgaggagttcaagaccagcctgggcaacatagcaaaatgccccccatgtctataaaaaataaataaaaaaaaaaggccggtcgtggcagctcacgcctataatcccagcactttgggaagccgagatcacctgaggtcaggagctcaagaccagcctgactaacatggagaaaccccatctctactaaaaatacaaaattagctgggcatgatggtgcataacctggaatctcagctactgggaggctgaggcaggagaatcgcttgaacccaggaggcggaggttgcagtgagccaagatcacaccattgcactctagcctgggcaacaagagtgaaactctgtctcaattaaaaataataagaataaatttaaaaaaagaaaaaaggttgtctaccaatgggtcaatataaaaaataaaaataaaaaaaggagtgagaaaggaatgggactggcctggcctggcagaggtggaggactcaggtacgaatgaccccaccaatgggagtagggagtcaggcggcacaagccctgcggggtgggctgtgaagcactggtctcaccgctcctgcagctggctgccagccctgcccggagggctgccctaaacctgaaactggggtagctggctggagccctatgacctctgaccccaatatgacctttgacctcttcctcaccagcccccgtactgtgacctctacccctttcttccttcagggacctgatttcccatcgccttctgtccccctaaaggcttcagatcctgaggaggcgtcccaggcccaggaaggtgagtgggagcgcctgttggggagcacggagaggtttcgcgggtcagaggcagctctaaggggccccaaccacctgtgttcaccctcgtcacccccactcccaccccgcgtcggaggtggggacgatcccagggcagcaccggggcctgaatctgcagctcgctggggttgtaaaccagttcctacaaatttgcttaggggagggcaggagagggctcgcttagcatctcgtgccccaccccagatcctggccaaggagaccaacaggtctgtgccgaggaggctgacccggagctggagcccgcgtcggggggagagcaggagccgcggccccagcaagcccaggtaggcgggagtggcccgtggctgctctcaacatccggagcggactccgggcggggagcgctcctgcccagggctgcgagccgcccgcgacccagggcgctcggggcaggggtggggaaagaaggggcgccccgtcacttgccccctctgcagaccaaggccgcgtcccagatcctggagaatggggaggaggccccggggcccgacccctctctcgaccgcatgctcagcagcagctcctcggtgtccagccttaactcctccacggtgaggcgggagggaggggacccgggcggccggggggtggacccgttccgatgcgtagcccctgcctgcccctccctcgccgcgggacccaccgctgcagccccccagcctgccacctatgacccgggtctgaagcctccgcgctgcccgcggccccgacgtgagccctgcgagcggccctgactcccacccactcccgtccgcagctgagcggcagccagatgagcctgtcaggcgacgcggaggcggtgcaggtccgcggctccgtgcacttcgcgctgcactacgagccgggcgccgccgagctgcgcgtgcacgtgatccagtgccagggcctggccgccgcccggcgccgccgctcggacccgtgagtgccccgccggccaagcggggcgcggctgtcacagcccagcccaccattcacagggtctcggcctcctcgtcctcatcttcaaaatgggaacaacagcgttattgggaggcgtgcgattaagcgagacaatccctgtaaagcgcttagcacgaggcctggcacgtgttcgggatggtggctgggggagcccacaggcaggggagaaggctctgggagggcccctcctcacctcgggttctcacctccccagctacgtcaaaagctacctcctcccggataagcagagcaagcgcaagacggcggtgaagaaacggaatctgaatccggttttcaacgagactctccgggtgaggctgtgaccacgatgcggttccccgttaatgaactggacgcccccttcctgcggggctaggtggcaagggcagccagtaacgtcattgcccggaggatcggcggagggggcccattaactcgttatccagtgttgtcagcctcgtggtgggcgtggtgatagtgcaggtccccattaatgcccttaggggctccccagaattccatcatggtaggaacgcggtaggacctgcctcagccaactcgcgcagcatctacgcgggccaccagcagtgctccactaaagctcacctcctgtcctcagtactccgtcccgcaggccgagcttcagggccgcgtgctgagcctgtctgtgtggcaccgcgaaagcctgggtcgcaacatctttctgggcgaagttgaagtgcccctggacacgtgggactggggctctgagcccacctggctccccctgcagccccgggtgaggcagccaggccgcgtggggagacctgcggcccgggtctcctgcatttaccccaccaggctctcccgcagccccctcacaccccgccttcgacagaacctcccctcaacctcttaacctcatggccccaggcgaagcccggccggccacggccccttccccgagggcgctaggacccctaggttctgcccctgcaggccccgccgtctcttctagccgcaccccatccgggtctgcagaccccaccctcctgaggcccctttccattagcccctgctccacgataagcccgcctctcgcaggtcccaccctctcccgacgaccttccgagccgcgggttactcgccctgtccctcaagtacgtccccgccggctccgagggtgagtgacagccggagaggccaagctggacacgccctgaaaagcgggagactccagtccccgggtttgggggcggtggactccatccgtgtgcgggcctgagccgagcctctccgcaggcgcaggactgcccccgagcggggagctgcacttctgggtgaaggaggctcgggacctcctgccgctgcgggcaggatccctggacacttacgtacaatggtgaggagtgctggccctccgggcttcccattcttttgcctgcagtggagtgcccaacctccacaaacccttactaatcaacctttgatcacgcagcctgggctttcaccactgagcaggggtgaaggggacggtttgagcaaaggcctggagtcagggaagttgaggacacctttgaggagctgcatttcagcgtgactggcgcctataggacttgttgaaaagctgaggctgagggctgcaagggtccttccatagagaacctgggaggccaggctgtggggcttggctgggaacttatagttcagtgtaagcttctaggggacttctaggggtgcctccaggtgctgcccccactgttagagagtgaaatggaggtgggcgggtcacttctgggtgtccactctgatgcagccagaggctgcagtacagaggtactgtacttctgagcaacactgtattttgcagagggggttcccaggctttgaaaaccttggaaacaggccaggcacggtggcttatgcctgtaatcccagcactttaagaggctgaggcgggtggatcacctgaggtcaggagtttgagaccagcctgaccaacatggtgaaaccccatctctatcaaaagtacaagaaattatccgggcgtggtggtgggtgcctgtaatcccagctacttgagagactgaggcgggagaatcactcgaacccagaaggttgcagtgaaccaagatcacgccactgcactccaacctgggcaaaacagagcgagactcgatctcaaaaaataaaaaaaaaccttggaaactgcttgaggaggggtggtggtggagcaacagggagataataaaagtcactgagccagcgagaatagcagaactgcatttcagagacattgctctgcagccctgtgaataggagttgtaacattattattattattattatttttgagacggagtctcgctctgttgcccaggctggagtgcagtggcaccatcttggtgcactgcaagctccgcctcctgggttcacaccattctcctgcctcagcctcctgagtagctgggactacaggcgcccgctaccacgcccagctaatttttttgtatttttagtagagacggggtttcaccatgttaaccaggatggtctcaatctcctgacctcgtgatccgcccgcctcggcctcccaaagtgctgggattacaggcatgagccaccgcgcccggctattattattttttttaagatgcagtctcactctgttgcctaggctggagtgcagtggtgtgatttcagctcactgcagccgcagtctcctgggctccaacgattctcctgcctcagcctcccaagtagctgggattacaggtgcatgccaccatgcccagctaatttttgtatttttagtagagatggggtttcaccatgttggccaggctggtctcgaacttctgacctcaggtgatccacccacctcggcctcccaaagtgctgggattacaggcgtgagcaacctcgcccggccaggagctgtaacttttaaagccaggagacctgagaggaggctggtgcaaaggtcccagggcagtgagggtctaaggccaggcaggcaggagccaggggacatggacatatgtgagagagaatgagtgggacgtggtgactggatgactctagggagtgtgaggggggtcacctgatgccaggccacctcccgcacagcttcgtgctgcctgatgacagccaggccagccgccagcgtacaagggttgtgcgacgcagcctcagccctgtgttcaatcacaccatggtgtacgatggctttgggcctgctgacctgcgccaggcttgtgccgagctctccctctgggaccatggggccctggccaaccgccagctggggggcacacgcctcagcctgggcaccggtaagtgggacagcaccctgagacaggccctgggacaggccctgggagatgggggctcagtgtgtggccctggatacctctctgtcctttcctgagctttgatatctactgagaactgagggtggtaacgggggacagtgcataatctgggaccaggcaggtgtttgggggccccaaggtgtccagtgtgatcatgccctcaacccctgcccacccacatccaggcagcagctatgggctgcaggtgccctggatggattccacacctgaggagaagcagctgtggcaagccctcctggagcagccgtgcgaatgggtggatggccttctacccctcagaaccaacctggcccccaggacgtagccccaccaagcctctctctctggacccccatctcagggcctgcccttggctaaagtcaataaagtctattctaagagcaa

SEQ ID NO: 787 - DNA, 21693 bp, Homo sapiens
  source 1..21693: mol_type = other DNA
agtatggcttgggtaccacaacttccggtgcgcctttctttacagttcgtaaggttcataggtaagagaacagcgaaggttccggggctagtttgtgtttcagacttccatatttccatttgcagttgggtgaagtggttagagctgaaaggggacagctggagtcaaacaacttaactcaaatatctgggaacgatttcgcgctgaggaagaccctttgggacttgtagctccactccggggaacggactcgccgggactgacagttgccggaagtgaggctgcggggaatggccgccgctgcgaccatggcggctgcggcccgggaactggtgttgcgggctgggacctcagatatggaggaggaagagggcccgctggtgagagcgcggagctgtttctcctccgtagttccggtgctcctagcttcagaaagacctgagctgggtttaggcacaagggtgggaacttggctgctacccgtgatattacctgtttggctccccgtacccttccctgtgatcagacccgaccctgagcgggaccctagtggctgaaactcatgttctggggcacaaaatttcaacttcactccacattttggggtagagtcacgaagtagtatagtgtaaaggttaagaacatggcctctgaagccagactgcctgagttctatctctgccacttacacgctgtgtgcccttgggcaagttaaccagcttctctgtgccatcatttctcacacctttaaggtgaggaagatagaacctattgtatacatcgtcgttaggattagatgaatatgtgtaagattgcacctggcatgcaggtaaacactatgtgttttgacatttctagaaagcctggggttccccagaggtgtgatagaacacccaagatggcaggagtctgagggtcttaaatttaagtgcaagttctgctctatcctctgcaattcctagctttcctcattcggtcatctccactgcacttttttttttttttttttttttttgagacggagtcttgctctgtcgcccaggctggagtgcagtggcgcgatcttggctcactgcaagctccaccttccgggttcacgccattctcctgcctcaacctcccaagtagctgggactacaggcgcccgccaccgcgcccggctaattttttgtattttttagtagagacggggtttcactgtgttagccaggatggtctcgatctcctgacctcgtgatcttcccacctcggcctcccaaagtgctgggattacaggcgtgagccactgcgtccggcctccactgcactgtcttgtcttttacctttttttgttttctttagacgggtttccctgtgttacccaggttgaccttgaactcctgatctcctcaaacaatcttcccgtctcagcttctaagtagttgggactacaaggagcccaccaccatgctgggctacctccactgtctcactggatcgtctcactccttgtcgtattccttacccatcagcacaaaataggagagtgggtacaacgtgagactcttagaatttttcaaagcagtacctgtggctcccagtaaaagcagctccttctcacttgaaggactggggatatccaattatattttttctttctgtctttcaccgtaccctactcccattaacttatccctttccaggcgggtggtcctgggctccaggaaccactgcaacttggggagttggatatcacttctgatgaattcatcctggatgaagtggatggtaagcgatggcatggggtgggtgcagtacctgtaatctgagaggcatgggggctggaaggaataaggtagggattggtgtgcagatactcaatgtggggagagggagctgtggagctggacccttatgataaacttctatttccagttcacattcaggcaaatctggaggatgagttagtaaaggaagctcttaaaacggtgaggctttcccctgtactaatctgcccttctatctattctaccccaaaaggaaaaacaacagtctcttgcttttgttgtatcagcctggtatctgaccctttagtccttcactgattctgttacagtgtccctttactgagacttccttctgacctgtcatctttatgttctcccagggtgtagatctccgtcactattcaaagcaagttgagctggagctacagcagattgaacagaaatccattcgggattgtatcctccagcagagggaaggggtggtgctattgacatggggattttgtggcgtgtggtacagatgtcccagctggggtcaacatctctgaggtttctatcacttcaaagagaaattggagaggtactacaaatctgaggatctcccatcttcaccatgaggccccttgactttttgtggatcagatattcaagagagtgagaatatagcatctctacacaaccagatcacagcctgtgatgctgtcctggaggttagtaatcatgacctgtgacccctaatagctactctgaaccagatcatggactctggtgccatttttaggtcatcagcctcaagatggggacaggttagggtcattttcaagatgacttcaggagccttttttgttattactgccatatttaatgttatttcctgataatctggggtgtctcatcatctgccaccctcaaggactgataaatactgaagacttcacaaagagtctttggtggcccacttatcccctacaaaccctatagcactccggcaacatctaccctccctacagcgaatggagcagatgttgggagcttttcagagtgacctcagctccatcagctctgagatccggacactgcaggaacagtcaggagccatgaacattcgacttcgaaatcgccaggcagttcgggggaaacttggggagcttgttgatggtctggtggtgccttctgctctggtcacgtgagttaccagtttgaagggttataatgtccatagcaggtggatgggctggggtgacccaccctatttaccatatgggtctcctggctccaggttaagtgctttttagaaattagtagccaggttaaccaccatttctttaggtatgcattaggcatcaaagattaagattaagaatgatgtaagatcaggtgtatagtggggaggtccaggaatagaaaactttgtacatgtgtcctgactatatggtacaatgcaaggtggtagagatgacaggggctggaggtaaggagtgtggtctgggtctggtttagggatgtctgggtctcccttgtaactcatcccacccctccctgctaaccagggcaattctggaggctccagtgacagagcccaggttcttggagcagctacaggagctggatgccaaggcagccgcagtcagagagcaggaagctagaggcacagcagcctgcgcagatgtcagaggcgtgctcgatcggctccgggtcaaggtgggaagtagggatggataccctggaggctactggaagcagccttcccaagatcttcactatggatttccttggcagagctcactgtagcctgtctccagggacttcaccctgccttttctgggcagccccattcttgtctctctgggtttccctgaaaatcttgagaaataccaaagagatattcaccacccttctgcctatgtttaccatttgttgcttcccccagttcctctcatacagcaaaagggttgcagcttcatgccctgtgtttggttccccacatctaggcagtgacgaagatccgagagtttatcctccagaagatttattccttcaggaaacccatgaccaactatcagatcccccagacggccctgctgaagtacaggtcacaaccccaaggaagtgcatgggatggcctttgagtttttgagcggcctagtgtgggcatctggtttcttgggagacaggtagactgacatgttcctgaccccctaggttcttctatcagtttctgctgggcaatgaacgagcaacagcaaaggagatcagggatgaatatgtggagacgctgagcaagatttacctgtcttactaccgctcttacctggggcggctcatgaaggtgcaggtaaggtcaggagggagaggtattcctgggcacatggactgggaggaggggacatccctgggcaaggaatattttattgtgttgtgggaagagacggttatcagttctcttttctctttccttagtatgaggaagtcgctgagaaagatgatctaatgggtgtggaagatacagcaaagaaagatatcctagtactggggaaccctcatgccaggccttgagagtgggaggactttcgactccagccaccaatgcactgctccttaccttttcctatgggactgaaaccttttagaatgtgatgaaagctatagcctccctccccagaaagatgcacacattattttgacacatagttttgcatatgattgcaagggagggagagacaccctgaagcccattcacagatgtcagcacgtggggccctagtactgggaaagagggctggctaggccacgtctgcctgtctggggtccccacagatagtgagtctttgggcccagttatggtctcattgttttccctgactctgacccatcttacgattcttctcaaagccatcgctccgcagcaggaacaccattttcaccctaggaacccgcggctctgtcatctcccccactgaacttgaggcccccatcctggtgcctcacacagcgcagcgcggagagcagagggtatgaggaggaacaagcttcagtcacgaaagaggctctgagcacggtggggagggaaggccagacctcagggcagagcttcccaacctgcaggccctgtcttaatccccttagacttgggagtggccttctccaatcactccagcctgctgtgatgtgaaaagagctgggaaccattgacttaagggcatgcagaggggagagactggatgaggggaatgacagtcagaggcaggtgttgaggtggatgcaggagtagcaacagcaggtgggtgtaggccctttttgtacccctatgttcccccaccttttcagtgcccattcagcttgctcttagacagcccggacctagatagatgcgaagggtctgcctagctcttattactcaggtttactgattttccagccatatccatgggaagtcagtgttggggtccatcccttctgtttttcttctttactcctcctctcccagtatccatttgaggccctcttccgcagccagcactacgccctcctagacaattcctgccgcgaataccttttcatctgtgaattttttgttgtgtctggcccagctgcacacgacctgttccatgctgtcatgggccgtacactcagcatgaccctggtaagactcctgtttcctgtaccattcaacacctttgtccccagtcttcatcagcagcatagtggggtcatgactctggtagaactgaaatcaggatcgcctcattctaaaatgtctaagccttggctgggcgtggtagtgcacacccataatcccagcactttgggagtccaaggcagtaggattgcctgagctcaggagtttgagaccagcctgggcaacaacctcatctctacaaaaaatgaaaaattagccgggtgtgtgttgatgtgtgcctgtggtcacagctactaaagatgctgaggtggaaggattgcttgagcccaggaggtcaaggctgcagtgagccatgcactccagagtgagacctgtctcaaaaaaaaaaaaaaaaaaaaatagccaggtgcagtggcttacgcctgtaatcccagcactttgggaggctgaggcgggaggatcacaaggtcaggagtttgagaccagcctgaccaacatgatgaaaccctgtctctactaacagtacaaaaattagccaggtgtgcgcggcctgtaatcccagctactcgggaggctgaggcaggaggattgcttgaacctgggaggaggagattgcagtgagccaagattgcgccattgcactccagcctgggtgacagagcgagactccatctcaaaaaaaaaacttgttacttagacttgtcacagtgttactcccccatgaaatcctcagtgcgtagggtccctgagactacccctactgctgacccacaatcaggcaatagcacgtgaaaactgagggtcccccaaatcttggtgctcaaacccctgacccaagctcagccctgaactctgctgtgataggcttgtgatcatagatcctggtgtggccaggtgcagtggcttatgcctgcaatcccagtactttgggagaccaaggcaggaaggttgcttgaggccaggagttcgagaccagcctgggcaatgcggcaagaccttgtctctacaaaaaatttaaaaataaacttaaccaggcatggtggtacacacccatggtcccagttgcttggcaggctgaggtgggaacatcacttgagcccagatgtttgaggctgcagtgaactatgattgtaccattacaatccagcctaggtgacaaaacaacctgtctctaaagccgaaaacaccgggtgcagtggctcacacctgtaatcccagcactttaggaggctgaggtgggcggatcgcctgaggtcaggagttcgagaccagcttgaccaacatgatgaaaccccatctctactaaaatacaaaaattagtcgggcgtggtggcaggcgcctataattccagctactcaggaggctgaggcaggagaattgcttgaacctgggaggcaggcggaggttgcagtgagccgagattgtgccactgcattccagcttgggtggcaagagtgaaactctatctcaaaaaacaaaaaaaaagccaaaaacatagatcctggacaggaaagcagggggcagttccattttacgtctctcccttctgtcctgtccagtgcatcatccccaaagaaacaaatgcgtttgttcatagtcactgaggacaacaaactgacattctcttttaatcctctgtttgttccccaatcacacagaaacacctggattcttatctagctgactgctacgatgccattgctgtttttctctgtatccacattgttctccggttccgtaacattgcagcaaagagggatgttcctgccctggacaggtcactgaattctggtccttgatgcccaacaggccacgaactctcttggtcttgcatgactctgccctgaccttagactcctactgacctggtatcatcaacctttattcccattcatttgctccggaggcagtagtgctgctttttgactcacctttctccaaccactgccccccaacccccacaactagctattgaccattaaactgaatgatgccccactccctcccatccccctccaacattccttgctggctgacctctgattctgattaagcccacaggtactgggaacaggtgcttgccttgctatggccacggtttgaactgatcctggagatgaatgttcagagcgtccgaagcactgacccccagcgcctaggggggttggatactcggccccactatgtgagggagggcaagggtaacaaagggttcttgaaaggcagggctctaagcatcattgtgggggttggccaaggtcacagttgtgtcatgggccacgctatgagcaggtgttctgggagggtggtgaaactcatggtgagtggtgcactgtgggtaggagggactgaaggtagagtcacatcacatggaggtgggttggctaaggaagttgggaggttgtgttggttgggccaggaggtgggtgtgattttccttcccactctctcctagatcacacgccgctatgcagagttctcctccgctcttgtcagtatcaaccagacaattcctaatgaacggaccatgcaattgctgggacagctgcaggtgagggtcggacaggagacacttcccagcagcagggctgcttccagtgggtggagtctgaggaggagccagatggggcccagatgaccttgctttctggtgtcacctcttcctctctgccttttcaggtggaggtggagaattttgtcctccgagtggcagctgagttctcctcaaggaaggagcagcttgtgtttctgatcaacaactatgacatgatgctgggtgtgctgatggtaataggtgctccttctccttgccttcctacccagaaaattcggtttcccccactgctgttagctctgtgagggcagagatgatgcctgtcttgttcagtgttttactcttggagtctggcacagtgtccagcttagtacaataagtgtggaatgaaggggacatcctgaagtgaaggactgctttccccaaactagacatttccctttgtcttcccttaggagcgggctgcagatgacagcaaagaggttgagagcttccagcagctgctcaatgctcggacacaggtaggggtgtggggaaaagggaagagacagccttctgtgctgttttcagctctctctctctctctctctgtgtgtgtgtgtgtgtgtgtgtgtgtgtgtagggagtggcataatggatctcaggtatgcggaattactgtaactcttgattcacaacatactgtcattattggtctattttattttattttgtctttggtttttttttttttttttttttgaggcaaagtgtcactctgtcacccaggctggagtgcagtggcatgaacatggctcactgcagcctcaacagcctgggcttaagtgatccttctaccttagccccctgggtagctgggaccacaggtgcgagccaccatgcctagctaattttttatttttagaatgaattttatttttttctttatctatcctctcaagcatttatcctttgtgttataaacaatccgattacactaagttattttaaaatgtacaattaagttataattgactatagtcaccctgttgtgctgtcaaatagtaggtcttatttattcttcctatttttgtttgtacccattaatcatccccaccttctccccagccttccactagccttcccagcctctggtagccatccttctactctcttcgtacatgagtacatgagttcaattgttttgatttttagattccacgaatcagtgagaacacatgacgtttgtctttctgtgcctggcttatttcacttaatataataatttccaattctatgcatgttgttgcaaatgactgagtctcattcttttttatggctgagtagtactccattgtgtatatatcccacattttctttacccattcatctgttgatggacacttaggttgcttccaaatcttagctattgtgaacaatactgcaacaaacatgggagtgcaaatatctcttcaatgtactgatttcctttcttttgggtatatacccagcagtgggattgctgaatcatatggtagctctacttttagttttttgagcaaccttcaaactgttctccaaagtgtttgtactaatctacattcccaccaacagtgtataagggttcccttttctccacatccttgccagcattgctattgcctgtcttttggataaaagccattctgactggagtgagatgagatctcattgtagttttgatttgtatttctctgataatagtgatggtgagccccttttcatatatgtctgtttgccatttgtattcttttgaaaaatatctattcaaatcttttgcccattttttaataggattattagactgtcatgtagagttgtttgagccccttatatattctggttattaatcccttggcagatgggatgtgcaaatattctttgtctcttcactttattgtttctttagctgtgcagaagctttttttttttttttttttttttttgagatggagttttgttcttgttgtccaggctggagtgcgatggtgcgatctcagctcaccgcaacctccgcctcccaggttcaagcaattttcctgcctcagcctcctgagtagctgtgattacaggcatgtgccaccatgcctggctaattttgtatttttagtagagatggggtttcaccatgttggtcaggctggtctcaaactcctgacctcaggtgatctgcccagctctgtctcccaaagtgctgggattacaggcgtgagccaccgtgcccagctgtgcagaagctttgtaacttgacgtgatcccatttggccatttttgctttggttgcctgtgcttgtggggtatggctcaagaaatttttgcccagacccgtgtcttggagattttccccagtgttttcttgtagtagtttcataatttggtcttagatttaagtctttaatccatttgatttggttttcatatgtggcgagagataggggtatagtttcattcttctgtgtaatggatagccagttttcccagcaccattattgaagagactatctctctttttttttttttcagacggagtcttgctctgtcacctaggctggagtgcagtggtgcagtattggctcactgcaacctctgcctccttggttcaagtgattctcctgcctcagcctcctgaatagttgggattactgatgcctgccaccacgccgggctagtttttgtgtttttagtagagacgggatttcaccatgttagccaggcttgtcttgaactcctgacttcaagtgatcctcccacctgggcctcccaagtgctgggattacaggcgtgagctaccgtgcctgaccaagagactatcttttccccagtgtatgttcttggcacttttaccaaaaatgagtttactgtaggtgtgtgccagctaattttttaattttgtaaagacagttgtctttacaaaagacaactgttgcctgggctggtcttgaattactgccctcaagtgaaaaatcttatgattcttttttttttttaaagacggagtctcactctgactcccacactggagtgcagcgatacgatgtcagctcactgcaacgtccgcctcccaggttaagtgattctcctgcctcagcctctgagtagctgggactgcaggcacgtgccaccatgtccagctaatttttgtatttttagtagagatggggtttcaccatgttggcccagctggtcttaaaactcctgacctcaggtgattcacccgcctcagcctcccaaagtgctgggattataggcatgagtcactgcacccggcctagattctgtttttaatgacactggaaaacaacgaatttttgttttggcatatatatagctttacttttaaaagcaagaacacacacaaaaaaagggggaaaaaagcaagaacacaataaatgcaacatttagatcaacgagtacctgtgcacgagaagcacagggatggtttcagtaggatttcatagtttgatggtgacttttgccaagctgctgctacttggattgtgtggtgtgtttgtgagtgtttatatcattaaaaaacaaaacagccactgcactgggttgttttattttttaatgatataaacactgatgagacaaggcaagaaaacagcaaggcaaaaaagaaaaaaaaaaaagccaggcatggtggtatgcacctgtagttctagctatttgggagacaaaggcgagaggaccactttgaaatccaggagttcgagattacagcgagccatgatcatgacattgtagtctacccttggcaacacagcaagaccctgtctcaaacagcaaaacaaaacaaaaaaccccagaatcacaggatttttttcatgcataatttttctaatattgtcatgttattgcatatggctatagctcattccttttcactgccatatatgacttgtgtgattaaacatattctataaatggattgtttccagtttcttgcttctgtgagcattgttttatgaataatcatgtcttttagcacacatagatattgattatcttcatcaaaagtttctcttgggtataaacctaggacagtagtcttgctgctaataagatatgcagtattagtctttatgagacaatgataaattgttttcctaagtagttccttctcaccagcaatatgtaagaattcctactgagccacattttctccaacatgtggtattatcaggtctttgccattttttttctttttttttttagagaccaaggatgctgctaaagatgctcgggatcagaaatgtttcagattttgatttttttcggattttggattccttgcattatttttactggttagcatctgtagtctgaaaatctgaaatctgaaatgctccaaagagcattacctttgagcatcatgttgatactcaaaaacttccggattttggagcattttggatttcagattattggattagggatactcaacctgtatttcagtgggttttatttgtaattttctgattactaataacattgagcatcatttcaaatgtttagtaactatatgtaggggttcagtcaggctggtgggaaaaatattagtgatgatagccacaaaccctcttggaaggcctaagagtttgcataacttcagtaatagatatggttgaaggcgacctgatctttacctttagttaaataaattagagtaataacaaaggaatgtggggaagttatctaggtagcttgtttactcatatggtcttaagactaatctttgatgtaccgcaggtgcttaactgctttctactcaggaagtccacaatgtcagttaccccgtagtggtgttgactcaagtctttgtcaattaatctttactgaataaatgcgagtctcactagctggtcagggccgccattgcaactgtttacagtactcttcagggagtctgtaaacagcctggacacactcagctggactggcaaagcagagtatctgtgtgtcagtgtacctcattcatccgttgccgggtcaggggtctgcaagggacagactccctgaagctggtgctctgtgtgaggagcgtcaccacaactatacaatttttttttttcctgtaaaatggctgtcatagcatttgaccttttaaaaatcggcttgtggctgggcagggtgtacacctgtaatcccagcactttgggaggctgaggcggatggatcagttgaggccagtaattcaagaccagcctggccagcatggcagaaccctgtctctactagaagtacaaaaattaaccaggcatagtggcgcatgcctgtagtcccagctcctcaggggcgctgaacctgggaggcggaggttgcagtgagccaagattatgccactgcactccagcctcagttacagagcgtgactctctcaaaaaataaagaaaaaaataagtctgctagtattttttatttataagagttctttgcatcatctacatactaatcttgttgattatacgtaggttacagattatcttttagtatgtatctttttacttttttttttttttttggtgagatgagggtctttctgtgttgcccaggctcctgggctcaagaaatccttgcacctttttttttttttttttgagatggagtttcactcatgttgccgaggctggagtgcaatggtgtgatctcagctcactgcacctctgcctcccgggttcaagcacttatcctttctcagcctcctgagtagctgggattacaggcgtgtgctaccacgcccggctaatttttgtatatttagtagagatgggttttgccatgttggccaggccagtcttgaacgcctgacctcaggtgatccatccgcctcagcctcccaaaatgctgggattacaggcatgagccaccgcgtccagcctttgtttttttaatgttgctttttgattaaagaaatttgtaattttaatatgattgaatttatctgtccttcatttttatgtctttgtttttagtaacagtcttgctctgtcacccaagctggaatgcagtagtgtgatcatggctcactgtagcctcaacctcctgggctcaggcaaccctcctccctcagcctcccaagtaactaggactacaggtgtgtgccatatgcccagctaatttttgttgttgttgttgttttgtagagacagagtctcactatgttgcccaggctggtctcaaactcctggcctcaagtgatcctcccgcatcagcctcccaaagtgctgggcttacagccaccatctaccacgcctgactatttttgtcctgtttaagaaattcctgggctgggtgtggtggctcacgcctgtaatcccagtactttgggaggctgaggcgggtggattacgaggtcacgggatcgagaccatcctggccaacatggtgaaacctcgtctctactaaaaatacaaaaaaattagctgggcgtggtgatgcgtacctgtagtcctagctactcatgaggctgaggcaggagaatcacttgaaccagggaggtggaggatgcagtgagccaagatcgtgccactgcactccagactggtgatagagtgagactccgtttaaaaaaaaaaaaaatgaaattccttattactccaaggccagaaaaatattatgctacattttcttcttaatattgtagaattttggccaggtgcagtggctaaagcctgtaatcccagcactttgggaggccaaggcaggaagattgcttgaagccaggagtttgagaccagcctaggcagtatagtgagacctcatctctacaaaaaattaaaaaaatatattagccaagcatagtggcacacacctgtagtctctgctactcaggtagctgaggtgggaggatcacttgagcctgggaggtcgaggctgcagtgagccctgtttgtgctgctgcactccagcctgggcaacagagtgagaccctgtctcaaaaaataataataaaattaaagaataaacaaatatatagagagaatttttttgttacctttaagtctcaaatttacttggaattaatttttgtgtgtgatgtgaggtagggatctatttcttttttttatgtggatggttggcccagaaccatttatagaaaatctttttcttttctttttttttcttttctttttttttttttttagacagagtctcactcttgtcacccaggctggagtgcagggccacaatctcagcgcactgcaacctctgcctcctgggttcaagtgattctcctgcctcagcctcctgagtagctaggattacaggcatgtgccaccacacccagctaatttttgtatttttagtagagatggggtttcaccgtgttggctaggctggtctcgaaaagttttcacattttaaaaagtctttaaggattttgattagaattacattgtctatagactaatttggaagaattgatactttatgatattgaaacttcctatccatgatcatgatcatgggctccctatccttttttttttttttttttttttttttttttttttttttttgagacaggttttgctctgtcactcaggttggagtgcagtggcacaatcatagctcactgcagccttgaattcctgggttcaagtgcttctcttgtctcagcctcccgagtagctaggactagaggcacacagcaccacacttggcttttttttttctgtagagaatacaaaatttaaaaatttaattttttgtagtgtctcactaaactgggattacagatgtgagccactccacctggcctcctcctccaatttttaagagagtcttttaatgtcttttgataacctttttaaattttcagcacaaagacactgtaagtcgtttgccatatttttaggtgggtataatacgtatgtttagttctactaggaataaataaatcttttctagttttttgtctttaacatcttatgtttttgatttcttattctactggctaacactcccaggatgatgtttagaagttgaacagaaaggtgatagtgagaacccttttcatattcctgattttgaaagaattgttgctggtgctgtggctcatgcctgtaatcccagcactttgggatgctgagatgggagaatctcttgagcccaggagtttgagagtttgaggggatctgcctgggcaacatagtgagactccatttcttttttttttttttttttttagacagagtctccctctgtctcccaggctggagtggtgcagtggtgcaatctcagctcactgcaagctccgcctcccgggttcatgccattcttcctgcctcagcctcccgagtagctgagactacaggtgcccagcaccatgcccggtattttttttgtattttgtatttttagtagagacggggggtttcaccatgttagccaggatggtcttgatctgacctcgtcatctgcccgccttggcctcccaaagtgctgggattacaggtgttagccaccatgcccggctaagaccccatttctttaaaaaaaaaaaaaaaaaaaaaaaaaagccaggcgtagtggcatgcatttgtagttctagctgcttgggaggctgaggcgggatcattgcaggagattaaggcacccacaaagatgcacttaaaccagttgtttctgctgagagcagctgggatttgtcactggatttgccaggtatagagactcgccagctgccatcaatgcttctggtcctttttggtcagctgctgcttcatactacgtaggaaagattgttaaagcccagtgcactgtttcctctggtcactcctctgctatcaaggtgttctcttttgcgttatagaaagcttaaagttcatctaagtccagaccagtactcctataggaatataatgcatgccacaaatgtgagccacttaaataattttaaattttctagaagctacattaaaaagtaaggagaaacagatgaaataattttttaaaccactacatccaaaatattattatttcaacatataatcaataaaaaatagtactgaggccagcacggtggctcacacctgtaatcccagcacaggccaaggcagggaggatcgcttgagcccaggagtttgagaccagcctggacaacatggtgaaaccccatctctacaaaaaataaaaaaaaaatgagtgggacatgttggcacatgcctgttagtcccagctactcaggaggctgaggtgggataatcactgagccaggaaagttgaggttgtagtgagctgtgattgtgccactgcactccagcgtgggtgatggagcaagaccctgtttccgaaaaaaaaaaagaaaaaaaagatatacttaaaatttattctaagatgaagtcttcaaaatcaggtgtatatatcatgcttacaacacattatataatttatggctcctgcctagcaggggtcatcactgttagttcaacttttctttggcaagtctactccctgtgccccaccgtacactgctacattattgtttgtatatgtgtgtgtgagactgcatttaggcaactgtaataggttgaatttggttatttaatctctgtccaaaatcacatcacaaagatgccttgattatagaaagatccttccttgcagcatattagttatttgacaccctcagtggatataagtgaatattttgagggaagaatagaaaagatacaatttttatttatttatttatttatttatttactgagacaagttgctgctctgtcgcccaggctggagtgcagtgacatgatcttggctcactacaacctctgcctcccggttcaagtgattcttctgcttcagtctccctgagtagctggggttacaggcatgcaccaccacacctggctaattttagtattaataatttatttttaaatggaataataatttcactttcttcttaccagatctttctgtctgggttgtttgcttttatgagtttttttgtttgaatctcccttttacattaaacaaaaattaacattttattatgggaaatttcactatgctattagaaaagcatagtgaacccccaggcatcatcagtgatattcggtgtatagcagttcacggacagttttgtttcatctataccaacacctattgcttatcctccttctgtgtcccccagttactttgaattaaatcttatacatatacagatgaatattatcacttcatctgtatcagaatgttatttttattaagaaaattatttttgagatagggccttgctgtagtgcccaggctggagtgtagtagcatgatataactccctgcagcctcgaactcctgggctcaagtgatcctcccacctcagcctcctaagtaactgggactacaggtgtgtgccaccacacctggtaacagatggttttaaaaactacaatacattatcacacttaaaaaaattatcttatctaaaataactattcagattttcccagttatttcataagtgatttttttttttttttttttgagacacagtttcactcttgttgcctccaggctggagtgcaatggcccgatcttggcacactccaacatctgcctcccgggttcaagcaattctcctgcctcagtctcctgagtagctgggattatagacacccaccaccacgcccagctaatttttgtatttttagtagagacaggatttcaccatgttggccaggctggtctcaaactcctgacctcaggtgatctacccgcctcagcctcccaaaatgctgggattacaggcatgagccactgtgcctggccttcataaatgatttttatggttcaaatcaggatccatataaagtccatatatgtgtctttttttagtctatagatttcccttccatctcctctgcaatttatttttggaagaaactgagttattgagtcatttgtcatctagaatgatgtacagtttagattttgctgactgcattccatggtgtggccaaacttcctctgtctggtgtatttctcataagtgtgtaattagatggaaaggcttggtcagatttaaattagtttttttttttctacagggatatttgagaggtagtggtatgtatttccatcaggaagcacataatgtcttcttggctctctttgtgatgttagtagccatcaatttcagtgcctagatacattaattagatttctgtatctcctactatctcaaaattttccatcttctgtctgtgctacattctgagtcctttcttcagttataaattctaattcattgtataattcttgttaatctgttgactttctaaaactggcttttcatatctaaaaaaatttccttttttcaagtctgttcattcctcatagttcttactaattggtcatttttacatcctttttttttttttttttttttgagacggagtcttgctctgtcatccaggctggagtgcagtggcatgatctctgctcactgcaacctccgcctcccaagttcaagtgattctcttgcctcagtctcccgagtagctgggattataggcatccaccatcatgcccagctaatttttgtatttttagtagagatggggtttcatcatgttggccaggctggtcttgaactcctgacctcaggtgatctgcccacctcagcctcccaaagtgctgggattacaggcgtgagccactgtgcccggcctatccttaactttagacattgcacacagtacaactgctatccgtatcggatagttcttaaggtcagcagctattgcttattgtgtctgctgactctcttggtagctgcccttcttttgtgtctagtgatctttgagttcattgtttgatcttaaccaggggaactgtatgggccaaaattaggattgaggatatttttctccatagaggattttccttaacttttgcagcagctgaaagatgccattcagatggatctacattagtcatgatgccagaattgggcaaatctgctgacaccaggacacctgtgtatatgtgtttgtgtctttccaggaattcattgaagagttgctgtctcccccttttgggggtttagtggcatttgtgaaggaggctgaggctttgattgagcgtggacaggctgagcgacttcgaggggaagaaggtatgaggaaaatatggtaatgatgggatcagtggtaagggaagtggaaaagaaaaatgaaaggatgcagattacatggtgggggaatagagtatgaaagactggattgagagaataccagaaaagagggtttgatgataaggatggctataccttggggagaacttagtggagttgaagatcagccagatccctctctgacactgtttcctcctgctattagcccgggtaactcagctgatccgtggctttggtagttcctggaaatcatcagtggaatctctgagtcaggatgtaatgcggagtttcaccaacttcagaaatggcaccagtatcattcaggtgacctgcaagtcccaggccccactcagatcccccatcattaattattttccccatctttttgctgggctcagcatcatctaagtgacccttggtcttcagttactagctgtgcccaaagttctgtatgagccctaacctgattcttttttttttgtttgttttgttttttttttgagacagagtctagctctgttgtccaggctggagtgcagtggcacagtctcggctcactgcaacctctgcctcccaggttcaagtgattttcctgcctcagcctcccaagtagctgggattacaggtgcctgccaccacaaccagctaattttcgtatttgtagtagagatggggtttcactgtgttggccaggctggtctcgaattcctgacctcgtgatctgcccgccatggcctcccacagtgctgggattacaagtgtgagccactgcgcctggccgcctaacctgattcttaatcatcactattagcaccattttacggtttgatccctcaatgactttctttgaccagggagcgctgacccagctgatccagctctatcatcgcttccaccgggtgctgtcccagccgcagctccgagccctccctgcccgggctgagctcatcaacattcaccaccttatggtggagctcaagaagcataagcccaacttctgatgtgccagaaaccgccctgagatctgccggtcatctccatggacttctgcaccccattccatacccttcttcacctggggtaccccttccagttttccccttgcttcccaggcccttgacatggcttacctgccttcactcccagcaccttgcccaacaggataagctggatccccttggccttctgaatatcccagtgtcttcaggtttcccaagaccacttccctgtgggcttccaaaatggcctttatcatttctccagtctgtcaccctcctttcctgctcccatacacccaaggcttgtttcttcccctgtaaaaaccactgcctcaatctctggttcactcaactagtcaccatgtcctgaggcatgaagcctcctcagctcttggaattgctggcaaggggtgactgcctctgagtcattgtgtttttcaaagtgatttcttttctgtagctttttgacctaagatctcagcaatttgaacactaacctctcccctcctggctcaagaattactccgaagtcagtctgcagaaaataaatatttagtatgacatgacactt

SEQ ID NO: 788 - DNA, 32742 bp, Homo sapiens
  source 1..32742: mol_type = other DNA
gagagagagagagagaggagagagaggagagagaggagagagaggagagagaggagagagaggagagagaggagagagagagagagagagagatatatgccctggtcacgtgagcggggtgcggaagtcgtgtttcaggcggcgttcgtgattggccgcggccgagggtcccgggggtggggtcaggccctccgacgcttcgggaggagccgggactggaggctgccgagggggccggcgcccgagtccgggattcggccagtggtgctgagcgagtgctggaccagcggccgtcctgtgcacctggcctgtgcgcgtgcccgctgctcggcttcacccagactaaggcgcgggcagctgcgggaacaggcggggtgggcggagggagaccgggaggcacgggcgccctgtgcgcggaggaggtgaaggcggccggggccgggacgccatgtccatggaggaccccttctttgtggtgaaagggtgagtgtcggccgagcgctccaccggaggaagaggtggcggtgctgcctgcccgcacctcctaggtcttctcgcagtggggggaggggaggcaagttggagctggggagggggaacagtggagacggcttagtcttgagggccatgaccaagcgtcaagagacgttccctccatccctacctggaccgtgaagccactgtccccagccaagcccctggtggtggggggccctttttggcctgtgtgctgcggtacaatttatttgggggccgaggggctcagcagctctgcaggtggggaaggagacacgcgggtcctggcgcacactggccgtctagtcgagcatgggatcttgcttcgaaggagcgaaaacagcatctgggcaggaaaagggaaatggccctcctgagctttgtagttcgcgttgacgggggtgagctccattgtccattgagtttggagcgcttgtccgcagactggcgagaccacaacaagcccagaggcgtctgagcacgtttgctgggagggaggcgggggcgggggccgttctgggaggctggggagcagggcaccggaagacaattcaatgggggagtttttactgagtaatgtgaggagaggaaagcagtcgttcatactcagtgatgatttggaaggaaaacaaaatgaaacaagccaaaccaaactttcctcagctttctattagcaaccggaattttctcacagtgctaaaggaaatgagtgttgcttgttaactccttgatttcatccaggttgtttgacaggtttctcctatttcttctgcctttcagaatagaaaggactgccttctgttcccttacaagctatcctagctcatctttgattgctcgattgtttctttggagatagagtcttcaactgcactttgtaatatccacttcgtagccattaaacacatgcaagaagatcaattctgatgtaacttttagtttcttattagaaacttgtcagttttctgttttaaatgtcaaacatgaaaaatctgaaaactgcaaagttcccaggtcagtactgatcaccacagaatgtcccttgctttttactagttgctgctagcttcctatttctgtagtggtgcaagctggccgttgtatagtcaagtgttgtagaaaatttaaatggtattttaggtgaaatactttatcgattatgcagtaaaatacatttatactacttcttaatatttccctggaaagttttttttcttcaccttactctaatttagatgggaaaatgctgagttgtaaatttactggtaatatgtgtatccctacctagaaaatgtgatatttattagaaggattgatttaggggttaatttttaaaatagatgttttttccttgattgaaagttcttaatgcttaggttggcaaaggttatctctggcggtagagatcagagatgatcagaaattttttgtttgactttttatggaatttgtcaaaagcctaaattcttctgtcttggcatttttttttcttgatggtatcctatacagtctactaatgcttgctcactgattaaatatcactactttatcggaacattggcttggagggagttttgattgatttttacatcattttagctcctatctttaaggttcttgaaggaaaagagattctcagttccttctgctgtggaaaggtaaagtcacccatgaaggtgtatccagatttttggggagtcatgtacctgtgtttattaaaagtatcaaaaatgcattacacagcatgcaaaaattaaaggtgcctaaattatggcccttagcctaggagcttctggtctaatctgagaaacaaattaccccaaaattaaatagaaatgacaggtggcaaatgaatgagtgttgaagtgaatgctacagataagtgcctcaggagttcagagaaaggtaactccttgggaattgttaggattaggagagcttttggaggcagtagtgtatcttgaattaggttttgaagatgggcagaatttagataatcaggcctgtctctcttacctggatgcttatcagagtctttttaattgttcttcctgcttctggtctcatttcctctttcagctgtcctgggatctattggatcattgctgtccaatagaagtataatgccagccatgtatgtcattttacattttctagtagccgcagtaaaatataaaggaacaggtgaaattaattctaatgtaatctctaatacattcaaaatattcaacatgtgattaaagattattgatgagatattttacttttgtactaagtcttctaaatctgatacatattttacacttactgcacatttaaatttggacattaaattttcatcagaaataattgatctgtatttaaagttcattaaatacattttttttttttgagacagagtcttgttctgttgcccagactggagtgcagtggtgcaatcacggctcactgcaacctctgcctcccaggttcaagcgattcttgcacctcagcctcctgagtagctgggactataggtgtgtaccacctcacctggctaatttttgtatttttaggactatgggcagggcacccgccaccacgcccggctaattttttgtattttttagtagagacggggtttcaccatgttagccaggatggtctcgatctcctgaccttgtgatccacctgtctcggcctcccaaagtgctgtgattacaggcgtgagccaccgcgcccggcctacatactctttaattgttccaaacatacataaaaggtttttgataactgaattgctatcagttaccaagtttacattaattaaaatttaatttctgtcacactagccacatttccagtcagtagttgtatgtggcttccgtgttggacagcacagtgtaagcttttctagagtcctagacaggtgtaccctacttaatattattcagtggctgctgctggcctgcagaataaagtgccaacacttcctgacctcactgatctagcctctgctctcccttagccttagtactccagcagtgccagactcaatacagtgactgtgattgctgtactggatgctcttactctacatgcacccacactgcctgattcacccacgcagctttctggagtcagtgtaagcatctcccttgcctccaggaagtgcttcctttgtcacccctaattattggacctcttcctctgtctctctttcattattagactatgagctctgaggtttgggactgttttttttttttttttcctctgtatttccagcctacaccttgaatatatagtgtaaatgttgaacacatactctttgttgatggtggtgattgtgatggaatggtgcctcatgggtgagaacaccaccagccaaaggcctaagttgggcaatgtgtgttagaaatgatctggaagagcagcccaggtggagtagacagtttagggaagtagtaacagctcacatttaaaggatgcatctccagtgccaggcatacatgtaaagtgctaagtaagcactttatatgaattttcactctgtaaaaacacccatatgatgaatactagccacattttagagatgagaagctgaggaagtgttagaggggttaacttacttgcctagggtcacacagctaataagtggtgtactcaggcttcaaattagaacaacctgatttcacactactgtcaatacttcccagtgcaggtaaaatagggtcaagttatgttggcctaaggagaatctcatcttgaggccattacagatttttaaagcaaggaaatgacatgaaattaggattttaggaatattgatttggtggtagtgttggatgcatcagtgtgaggaaagatgaaaaaggagaccagttagaaagctgttgtaacttatacatgcagtggttagtgcttggaagtttgaagctccttttgggaggttttgacattgtcaatgtcctgttcggaacagaatcccacaacagggattgctcttttatccttatgaagtaggtattattattgtcatcatttcacaaaaaggaaaatgaaacttagtaaaaaacttcaactttataagcttgtacgtagaagggccaggatttatatatttattacaaatatatattatatatataatatggtcattttaaaaattgggattatacgttatatatggttttatcactttttcttttcttttttttttttttttttttttttttgggacagagtcttactctgtcgcccaggctggagtgcaatggcgatggcgtgatctcagctcactgcaacctctacctcttgggttcaagcgattctcctgccacaccctcccaagtagctgggactaccaatgtgcgccactatgcctggctaattttgtatttttagtagagatggcatttcaccctgttagccaggctggtcttgaactttgacctcaggtgatccacacaccttggcttcccaaagtgttgggattataggcatgagccaccgcgcctggcctgttttatgacgttttcatctgtatttctttatatccttcagacttctgggtggcagcttttaatgactgcattgtattttgtcatataaatgttcatcctggaagatacattatatttatgatcacactacaattaatgtggtgataagcctacttgtcataggtctgtattgctgcttctgattttcatagcctgtattcctggagcataattgctaattcagagggcaggcacagcaaagcgtttgatgcatactaccacgttgtcctccagaatattcccccttgcccctcaaagtgtttgagggacccaattcccttgattccagtactgggattttcattaaaaaaatctttactaatctccgggtgaaaatatcatatttaaatcttgtagtcttcatctttgtattcagtaaggatgtactcagtgtttgttgagtgaacccattttgattgtttagttctgtagtttttttcctcccttgttggcaagtttttagaattagcctccttttagaatttgcaccttctaatcagacaaaccctgaagaaaaccatgtaactgagcatgtggagacagagtataagtgagccactcctgtggataaaaggtacaaataccatggctctttgctattttattgctgtggaggttttgtgtgtctgatgaggatagttttttgtttgtttgtttgtttgtttttttgagacggagtctcactctgttgcccaggctggagtgcagtggcgcgatctcggctcactgcaagctccgcctcccgggttcacgccattctcctgcctcagcctcctgagtagctgggactacaggtgcccgccaccacgcccagctaatttttttttttttgtattttcagtagatacggggtttcactgtgttagccaggatggtctcgatctcctgacctcgtgatcctcccacctcggcctcccaaagtgctgggattacaggcatgagccactgcgcccagccgaggatggtttttttgtttgtttgtttgtttttgagacagagtctcattctgtcacccaggctggagtgcagtggcgcgtcttggctcactgcaacctccgcctcccgggttcaagcacttctccctgcctctgcctcccgagtagcccgccatcacgcccggatagtttttgtatttttagtagagacagggtttcactgtgtttaccaggctggtcttgaactcctgacctcaggtgatctgcccgcctcggcctcccaaagtgcttggattacaggcatgagccaccgcacccagcatgataacagttttatttccaggtttttggctgtggattgatgttgaaataatgacataagtaagctgatgagtaagatggtatatgttatgttgtgttctttaaccttctctgtctgcatatctagctttattaacactagattatgagctcctcgagggcatcacgcattctattcactgttgaaaaactgtattggtatagtcactgtgaaaaaaataacccttgtttgttaattttggcctagtaaaattgaatgtaaatcaaatttaatactttctaaaaagcagaatccagtgtttcgttgtaagaacaaatttgcaagcctttattataaatttgagtgtttaatattatttagctccttagtttggagaacactatgcagataagtgaaagatatattgtgtaagattttgcagtagagttgagatgctgtggagattgaaaaaaaaagaaagacccatgctgggaatgctggtcaatctgggccttaaaggaagtgtctgctgaggtgtaaggctcttctaggctggggaaacaactgagtggaagtcaagaaccaggaatgagaaagataaagatgggaagaagacctgccaactgaaacagaatttgttcagtgagaaaccatgcttgatactaaagtcagccagtttgggttaggaggaggagtgggagagggtttgaatacctgcctgaggagtttaaatttaatctgatttctatcataaattctaaatcaggaggcagtttttaaactagcagttactattcacttgcttatagtcagcttttaagggttcaaacccagatcttctgattctacaaagaaaacagatttgtgggccaggtgcgatggctcatgcctgtaatcccagcactttgggaggccaaggcaggcgaatcatgaggtcaggaattcgagaccagcctggccaacatggtgaaaccccatctctaccaaagatacaaaaaattagctgggtgtggtggtgggcacctgtagtcccagctacttgggaggctgaggcaggagaattgcttgaaccctcttttgcagtgagctgagatcacgccactgcactccagccctggtgacagtgcaaaactccctctcaaaaaaaaaaaaaaagatttgtgtggaagttttggaaaaatgcaattaaataagtcttggtaatagaaagtgtcttataatcagggttggaagaacttgaggcaagcagccaatatgtctgagccccaaggtctcttatttatgtttaaggagcacaaactagattatcttgaaagttctttccagatctgaaaattcagtgattggatttaagtagaggttgtgcaaggtaaggaggaggaggagtcaaaaatgactcttgtctagacaagtgttgaaacttggaaaatggtggcactattggctaaaatgaggaagctagaaagggaagcagatttttctattttgtttgttttgaatacattatgttttgtagggaggatatgattaatttggttttaggcaaatggaatgatcctataggcagctaaaaatataggaattaagcctggctgagtggttagggttggaagtatagtgggggagtcatcagcttaagaggggtgctttgaacttgtgaatgctgatgagcacatagaggccacaaagagtactgagaaacattgggatccagtggaggaagaggaaggagaaaactggtagaaaactagaacagcacaatgtcacagagacagagaaagtgagagtttcaagcaaatagatataatgggccatagtgtcaagtgcaccaaaaatgaggacaagttaaattcactcgtgactttgacctgcagtgtcattggtggagttgtggaagcagcagtaagttagggtcaaaaattgtatataattgtaggtaactgagtaaaaatgatgtttcattttcacaagagtaattacaaaatatgtcacagtgtggttgaatttggaaatggcaataaagtcaagtaaagggtgtgcatgtgtttcctttcaaatacaaacgatgtgaatgtagaagtcaagcaataaaaagagttcctctctttctggagagatgagtggtgaaaccaggtttgtggggtatggggcaggaaccagttggagaagagtgaggagtgggagtctgatgtgttgcagaggctcactcaacctgaatttttcatgtttcattactagaatggaaactttcagccttgactagcctcttttactgtattgatgaaatggggatccctctgtaaagacttgcagagtaggtgctgtcccagataaaagagttgtggcagattgtattttttccattgatggctgcaccaataaatgttctgtcctgtgttgcttttctttctttttttttcttttttttttttgagatggagtcttgctctgtctcccaagctggagtgcagtggtgcaatctcggcttactgcaaccttcgcctcctgggttcaagcgattcttctgcctcagccttctgagtagctgggtttacaggtgcatgccaccacacccggctaatttttgtatttttagtagagacggtttgactgtattggccaggctggtctcgaactcctgacctggtgatccacccacctcggcttcccaaagtgctgggattacaggcgtgagccaccacgcccggctgtttgtttttattaaattgtgaagctggcattcttttatcaaactggagtttgtattcccttcctttgaacctgggcagacctttataaactgctttgactagcagattgaagcagaagtgacgctgcttgactcctgaagcttaagtcataaaagacaaccactataccttccatctgcatctttcatcttggaacacaagtataggctaccctgagctaacatgtaacaagtccagttacattgaagccactctgttagagcatgtgtgcagactgtggagagatagagagatgtgatgcctttacagccccagcctgtttaatattttcagctgaggtcccagacattgtggaacagggacaagtcagctctgctgtgtctgattcctgatctacagactccatgacatgataaatggttgttttacaccactaaattttggggtcattgttaaacaaccacgataactagaacatgccaattcagagtctgccagcatgggcaaagaagaaaggataaatcaaaacgatgaagggggaggccaaggcaggaggatcacttgaggccaggagtttgagatcagcctgggcaacagcgagaccctgtttctacaataaataaaaaaaattagcttggcgtggtagtgtgcacctgtagtcctagcaacttgggaggctgagacggaagaatcctttgaacccaggaattcgagattacagtgagctgtgattgcaccactgcactccagcctggttgacagtgagaccctgtctcaaccacaacaggaaaaaggatgatgggggttgtggctacacttacgcaatttgttggtacaactgaatgacaaatactggggaacaaagctccctaatggctgagatactctttcttctcattttacttggcaaacttggttagatgcaagtaagaaaactttgtgattttttttttttttggactgtatttggactgaatgtattacttgtggccccagaggctagtttggtgatgtaccatattgggaggttgtatggaagaggctcaactatctgacgagggatcaatgttgggctaacttcaaaaataaatgaggttggtttgccagaatcaactttttatttatgaagaatggaagaattggctgggcgcggtggctcatgcctgtaataccaatactttgggaggtcaatgtgggtggatcacctgaagtcaggagtttgagaccagcctgaccaacatggagaaaccccgtctctactaaaaatacaaaattagccgggcgtggtggtgcatgcctgtaatcccagctactcaggaggctgaagcggggtaattgcttgaacctgggaggcggaggttgtggtgagctgagattgtgccattgtactccagccagggcaacaagagtgaaattccatctcaaaaaaaaaaaaaaaaaaagaatggaagaatctgaatgctcagatgactttattttgtttttcccaaaagatgcattcttcaaagatgtgggcagtgtttccatttttgacagctacttactgggaaagttctgcattgcaagtggtcctgtgggcattgtggtgacttgccatgaagagccttcattctggtgtctgtagggagtttaatccttgagaagatgacaggttccatgattttgatgggctgttttgtagacagcagggaggaaaagccacatccctagaattgccaacactggctcttggtatctacgaaatgctacctgtatcagatgaaactgatttgggcagcatgtgtgacggatagcgcaagatttgcttgatgtgtggagatagccgtctttctctttcaaggatttgaaaaaggcttctctgggtcagcagctaaaactataattcctaggaaagtcatcagcaagttttcagtgaaatgctgccagatgtgattctccaagctgtgggtgagcagattgttatttaccaagaagtttgctaagctgaagaactctgacaattcaaggtatacctgcttcaaggtatatactgcttcatggtatatactctctcatggaaagttctgggtatcaaactttaatttttctgattacatagttgaggaaaaaaatagctaaatcagacataaagataagggataaagaagcactatctgtgattgtcacctttctggagacagacaaaaatggatctctgttgcctgagcagtcagcagttgtatctgctcactcaacgggaagtgctcctcaaagtgaagtgctcctcccaaagtgaagtgctcacacgggctagttgtgtagaacggacaacagtggtgggtagacatttgtgggtcatgcctcactagccaactgatactgaaacaactcccttgcctttcctgagaaagaaatgtgaaatcaagtagatgggcacttctcttataaaaaccctcacaaatctcaaataggtgacatgattatatgttactgttttatgaattgacttacttggaatgccaagtaatcttcagtttttagttgcaagtacttacaagtggttctggattgagagggttgtctccctggttagatttgtacattattaggtgtgtcttgtggctcttgaagctgttagaaatcccacatgctttagaaaattctggttaccattaatagttggcttccaaataagacttgtgaccaacattgttttctgcttccagttcatgccttctttttcaggctaacactgaaatgatattggaagaacagttgggaggttttccacttagagagacctctttgcttgctattgagatgggattccctgatacactgcagattctggctgtctttcaagatctgagccattgctggcagtttccacctttgtgatcccttaaaacatccatcttaaaaatgtaaaataacgactagtttacctttcttatgtctgtgttactaaatgaaaactaaacatgaatcctctttttaaaaataagagctttagaatggaataagccaagttgctggtcaggcctgtagggtgctgagctttattctgcaactgctttgtagcatttttctaattcctgccatttctttcatttttttcctcaggacatgctttgcttcttgcatacttaaggattccttggcttcacactcagtgctactagaatccacccatgcacactcctcaacttcagtctaacagtgtcttaagacattgtagttctgaaagcatggcctgtaaatcacaagggatccccaagatcctttcacagaaagatccactagctcaaaactcttttcatgataatattcagatattatctgcctttttcaccatgttgacatttgcactgatggtgccaaaaaaagctgtggtggctaaaactcctggtgccttaccaaaaatcaaggcagtggtgtcgtgccatgctttctgtggtattcctcatcagcttgtactaacagtaaaaaaaaagaaaaaaaagagtcatattcccctaagaatattcttcatgaggccgggcgcggaggctcacacctgtaatcctagcacattaggaggctgagccggttggatcacttgaggtcaggagtttgagaccagcctggccaacatagtgaaactctgtttctactaaaaatatgaaaattagctgagtgtggtggcgcatacccataatatcagctactcgggaggctgaggcaggagaatcgattgaacccgggaggtggaggttgcagtgagctgaaatggcaccactgcactccagtctgggtgacagagtgagattctgtctcaaaaaaaagaatattcttcatgaaacagtaaaaattaataattttataaaatcttgaccctcaagtataatttttctcatttttttaaagttataatttacctacaataaaaagcaacctttttggtgtacacttctgtgaaattgactaattcatatagttgtgtaatcatcacttccacaagcaggatatagcacagatccatcaccccaaaacgtttctctgtatgccttctggtccttcccccatgtcgagcacctggcaaacactgaactgttttctgttcttataattttgccttttccggaatgttatgtcagtgaaatcgtatagtacgtggccttctgaatctagcttttttcacttagcctaatgcatttgagattcatctatgttgttgtatgtagctgtagtttgttcctttttattgctgaatagtattctgttatacatatatactacagtttatccactcattagttgaaggacatgtgggttgtttacaatttttggctgtgtgaacataagttttcatttcacttaggagtgggactttggggtatggtaaatatatgttcaagaaacaaccaaactctcttccaaatggctgtactattgtgctttccaccagtaaggtatgagaattccagttaccccaccacctttccagcatgttgcattgtcattttgttttcattttaatccattctaaatatgtagtagtatgtaattgaagatttaatttgcatgtcattaatgatattgggcatcttttcctgtgctatttgtcatatgtatgtctttggtgaagtgactggtcaaatcttttgcttttttttttttttttttggaaacaacagtcttgctctgtcacccagattggagtgcaatggcacgatctcggttcactgcaacctctgcctcccaggatcaagtgattctgctgcctcagcctcctgagtagctgggattacaggcacccaccaccatgcccggctaatttttttgtatttttagtagagatggggttttaccatgttggtcaggctggtcttgaactcctgacctcaagtgatccacctgccttggcctcccaacatgctgtgattacaggcatgagccactgcagctggctttgtttaattgggtttttcttattaagttttgagagtttaaaaaaatatatattctggatatgtcattaatcagatatataatttgtaaatatcttctcccttagtatatattttaatattccactggcaaaatggaagtttgcgtgaagcatttttgtgatgtattgttaaataaaatggttgtctctaggaaaagcacttatgtgattgagttgtgagttgaaatagctgttttccccccgccccgagcaaaatctcatttttactggagagaatgacaaactggtttctcagacttgcaggctttctcaaatctcaaatttatctaaaaaattctcgagatattttctcacaaatgagtgaggtgaacctgtcacttcatggaaaataaatgacagtatttttaccagtgataaaattagagccttttgtttaaaaaaaaaaaaaaaaaaaaaacaattttggaaagcttatatcaactactatgctcttacagatttccaacacttaagtttttctgatgaaactggtggtgataataacaaatatgattttggatactgtgtattgaaatgagctggcatttggaggttctgcaatactcagtagactaatactttcctaatgaccactatttgatgttataaaatcatccaaaagtaaaagatccaaattacaggttgagcatctcaaatgtgaaatgttccaaaatccaaaactttttaagcaccaacaagatgctcaaaagaaatgctcactgggggcattttggattttggattttcagattggggtgctcaactggtaagtacaatgccaatattctaaatctgaaaaaatcccaaacatttctggtcccaagcattttggataacggaatctcagcctgtacaagattgaccaatggatcgtagtataagggaaacaaagcgccctaatgactgagatactccttcccattttacttggtaagctaagaaaaacaagaaaattattactgtaaaataagaaaatctaaaaagttctttaatacagttttaggatccacattgcagctaacctttaacagccagttgtcaagttttggtatactatcaaaaaagtacatccacaattgtccgaaaagactattaaaattctcctcccttttccaagtatgtatctgtatgaggctggattctcatcatatgcttctaccaaaatgtatgtccacagactgatggtagaagtggatatgagaatccacatttattgaagagatttgcacaaatgcaaaacaatgccattctcactacattttttttgttttagaatttttaaaataaaaacattgttaacatgtaagctcacattttaaagttgacaaatatttttaaaatgtctgtttgaattcctaatatagtaaatagattagatacatagtatacataactctgagctcttcggggtcttcagtaattttgaagagttcaaaggagtctcctgagaccaaaaaagttcatagattgctacttagaatttaattccagcatcatcattgtgtactggtggtggagaacaaacctaagccctagcccaaggcttcttggtttgaggcttctagttctcaagaaggaattcatatttactttacagaattgatatattttatattctttaaaagatgtctttacagataacctcttcaactctgtcttccattatcataaatgatactcagtacttacaaataaaccaatgcaatcagccctccatctctgtgggttccaaatctgtggattcagccaactcaggattgaatgtattcagtaaaaaaagaatggttgcatccctactgaacatgtacagacttttttttcttgttccctaaacaatacagtataacagcaatttacatagcatttaaattacattaggtattataaataatctagagatgatttaaagtatgtaggaggatgtgcgtaggttatatgcaaatactatgccactttatgtaaggacttcagcatctgcagatttggtatcctgtggaggtcctggaaccaatcccctaaggataccaaaggatgacttactttgcattaaggaatgatacatagctctttctccactaaatcacccagatcccataaagagtaaagaaagtagattttcacctcacttaattcttccccattttatcttaaatagggtttctcattagcactgaaagtctaaaggctgacatgaaaggaacaatgaggtgacttgcctaagccttaaactagatgaatagacgttggtagatttgttgtccatatagtttgcttatttactcagcctgcacctagaagctgtattctctgtttaacgttccgcctcttagctctcatcagtatgccatagacctaaatattgtaaggtgctttttttcatttttgttagcgctttcttttttccaatacttgaaacgtcagagggtataggatgcgtgtgaattctgttttaaagccatagacaacaaacaccctaatcagctagaacacgtttttgtggtctttgttccagaagaaatcatagaaggatcaaaacagttcttatagttcaggagcagtgggattatcatctttgaacatgagagaccatatgattataaaatgactcctttttggcttttatatgtgatagtattagattataacatttaaatagtggatattggcccaatggtgggggtaaaagttcttaaaatcttgtgactatatctaatctaaaggcatgctagatcatagcacttaatggcctagtctcattctctaaacaagaaaaacactaatgtggctgggcgtggtggctcatgcctgtaatcctagcactttgggaggctgaggcaggtggatcacctgagatcaggagttcaagaccagcctggccaatctggcaaaaccccgtctctactaaaaatacaaaaattagccaggcgtggtggcgggcacctgtaatcccagctactcgggaggctaaggcagaagagtcacttgaacccgggaggtggaggttgcagtgagccaagatcgcaccatttcgctccagcctgtgcaaaagagtaagactccctctcaaaaacaaaacaaaaacaaacactaatctggtatatggtattgcttaattaaggaaagtaggtatatttaaagctaataatgtttggaaattgaatgagattttgggtttaagaatttctcggattaaaatacttaacctataataaaatggtagctatgtaagagtaaccttccctccagcattctcattcctcccacaccaagaaaagaaaggccatattaggacttatcatctgagtataaattattaatactgtcacaccaagtggaagcatgtgggaatgctcattgccctttagttaatttgtaggattgcttcattatacttttacgtatagtctgttcagagaaaaatattaaatttgtccttccccaacaaacttgatattgtagctgcttaaataatggctattgtattccaagcatcagctgagaacataatactcagactgtgtatcaaagttttgaactttgatatttgtctgtgaagagccttctgtgggaatggtggttgctgaggatggtgtatgatcataaatgttaacctaaatcatgcagtaacttgaccatggaatgttgtctgtgatttctctcctttgcctcatcttgattacagagaggtacagaaagcagtcaacactgcccagggattgtttcagagatggacagagctcctccaggacccctccacagcaacaagggaagaaatcgactggaccaccaacgagctgagaaataacctccggagcatagagtgggatctagaggaccttgatgaaaccatcaatatccttttctgtggtgtctgtgccattcgggataaatagacaaatggacaagtttttctccagttgtttccagtatgtagatgaaacattttataatcgattaatgtttgttgctcttacttgtaccatgacatgtttaaagtatttgcccagtaacttaaggtacagtagccaaattcttatacagtgtgtgacaaatcctgtactataaatgtatatatatatataaaggcagcatagtgtaatgattatgactgtggaccctggagtcagatttctggtgttcaagtcctgcctccaccaatgtaaagggaaaaaaaaaaaaccctttttttcttttttttttaagtctctaccctcacactcaagtcagtatgatatttctgacactgtctacttggagatagcatcaggtccacaggttaagagctcagtcccacaagactgcccccacttcagatgccagttgcaagccctaggttgtgaccagcgcttccaactgaccacgtataaattggagttcccacgaccccctccatagatcgaattaatttaatttgcaagagcagctcacagaactccgggaaacagtttccttaggtttatccatttgttgtaaaggatattacaaaggatacagatgaatgaccagatggaagagatgcatgcaaggtatgggagaaaaggtgcagcacttccaggccctcttcaggtgcctccaggaacctccacatgttcacctatctggaagcttcctgaactctgtccttttggtgtttgtggaggattcatttcgcaggcatgattgatcacatcagttggccattggtgatcagctcagccttcagcccctttcccctggggtggggttaagcagggggctgaaagcttcaactgtctaatcacatggttggtttctctggggaccagcccctcgtcctgaggctatctagaaacccccagccatcaattatcccattaacatacaaaagatactcatctggagattccaagggatcaaggagctgtgtgccagaaatgagggggcagagaccgaatttgcatttattacagtatcacaaccagttaccatgtgacttgggctcatcacttaacctcctgtgcttccgtttcctctttagtggaaagttaggataacaagagtacctagctcataggattattgggattatacaggtaaagagtttagaatggcacctggcacacagcttatgtaatagtgttagcagtcattatcatatagaggtccatacaggccagtgttacacttcggtaattagagatcaaaaaatctttttgtagactgtcttcatgtttaagaagtgatgttacagtgctaccgtccattgaagagatgtcttgttccatgaaactgcatttagtaaaagcagatctgctctgctaattcatggtattgatgtgaagtaagtccactgatctgactcatgcactggagaactgtaaaaacttcattatatagcctttttttccaactggaaatcccacttaaccaaaactttagatggaagatatgccacttgcatgttctgagttctgttttgttttttccctaagtgagataaaacataaggaaaccagcttctgtcaggatcaccttatagttagcacaggttcgtatgcagttgatacatggagtaaataatttttgttattcatgatgaccctggtaccttttacattattaaaaggcaagtatgttctctaaaattagtggcaaatatgtgagggggcaggatcaaaagcacagttacagggagataattcttcccttgagaaaggagggaaggaaaaaaagttaggggagatagagaaaatgtgagattaaaaaaacaaaagttttaatagatactcatcattcaaccagcaagtgtttattgagtatactatgtgccaggcattttgttggttacagagattagattaataaacactataccagccctcacagaactttgagtggatagggatgggggacagatggtaatcaagtaataacacaaatagatacctgcagactatgaacgagaagtatagagagctatgcaagtgtctgacatggtgcgtcggaccaggctagagggtaagggaatgagggcagcttctctgaagaaggcccgatctctctagattaagaagtagggttagcatcttggcataatgggaagtggtttggaatggcaggagaaaaaggcttgcaaaagctgtcttagtaaaggtgatcaggagtcaaaaaaggatagacacaagtgttggcaaacaggaagagcccagctcacctgtggtcagatagccctaagtgtttgcagtgaagctcatcagcaggggctatgcttcctaaccagacagatcatctctgtcttggagcaaagggatcctccctcctgtggctgtgggcagaggaagtctgagaatgattggtgtccagctgactgtgttttcagaaagtttgagccagattttatttgtttgcatgtgagagattcagtgagttaacaggatgttgtcaggctttgatgatgaaattgttttaccttgactttttgacctacgcatagttgaagcaaatcctagaaaatttaaccttgatgcaactgaattgagtataagaaaagccttcattacaagtactcggcaagttgtcagggtaaggaatatgatcttattgtgttatctgtataagaaatagccagacttcttagagctctttcccttaattgtaaactaataggtcacctctgaaaccactttttaaatatgaattaaatgtgagcttccccatatataatttctctgattggctgcgcatggtggctcatgcctgtaatctcagcactttgggaggtggaggtgggtggatcacttgagcccaggggtttgaaaccagtccgggcaacatgatgaaaccctgtctctacaaaaaaaaaatataaaaattagctgggcatggtggtgcacacctgttgtctcaactacatggaagaccaagatgggaggctgaggtgggaggatcaggttgaggctgagagctatgatcacgtcactgtaccttaaaaaaaaaaaaaaatttccgtgattgaagaaaaagaaatctgtttttaatctttctttttttgacacaaggtctcactgtgttgaccaggctgaaatgtagtggcatgatcttggctgactacaacctctgcctcccaaatagctgggactacaggcgtgcaccaccacaccaggctaattttttgtagagacagggttcaccatgttgctcaggctggtcttgaactcctgaactcaagtagtttgcctgcctcagcctctcaaagtactgggattactggcgtgagccaccatgcccagcctgtcaggcttatttccgagagcaaaaatgagacagtaatctgctggctttgggcagggtacattcaaatggtgtcatcctgaatgattagacccttgtccatacctctagtttcttcaagctagttatctttctcactttttatttcttagtgtactctatttcttgacgaacaaaacaattgctattgtagaaaccatttggttttttgattgattggtaatcacttcgcattgttgaagagtgactcttagtgggtttggatagcggcctcttccgccatctgaattgcttctggaactcttgcaacccaagatactgacatttccatatgtaactacttgacagccgttccagagttatccagagcaaacaagcatctatcagagtgtaaaaaattgatccaagtgaacaaatctttagttctaagttatttagaataatacccattattaaagaatctgagaaaaaatattaagtacaatcttgtgtcattaaaatgtttcatattttgaaactatatggctaagccatttgattagcataactagatgtaagagaaccagctgtctttaacatatgtactagaaagcagcttccttgaataaaaagacttgggatcataccagtgctaacatacggctttttaagagtcatcttaggcaggaaccttagtttgtgtttgccaaagtctttatatcatgtgatttccttttgaaattatttcaaatggtagattatcactgaactttatatattcttgttacttgttttattcattagttgcctttctatatacatatacgtaaattgtttatagataaacccacattttaatgagggagaaacctttctggacctcagatgccccatccacagtgagtgtttggattggacattcttaatttctagccagttcaaaatactgttctgatgaggaagccttgttgttaggtgacatattttttgtaagataagtaaatccccaattattttgtataagcttttttttttttttttttgtagtagtaggttttttgaaggatactcctatagacgttaatatttaagtggggccttgcagtgaagcatatgtccttaaccttaatcattatatttatttctgcaaggtagacttaggaagtttgcaaattgaaatttagaggttcgtatattaaaaattaagttcattggtataatggaaagaagaatccaaagttcattttctaatatctgaaaagctttttaaagtacattcttagaaagaggttgatatgatttagctgtttccccacccaaaatctcatcttgaattgtaatccccataatccccatgtgtcaaaggagagaccaggtggaggtaattgaatcatgggggcagtttcccacatgctgttctcatgatagtgagtgagtctcatgatagctgatggttttataaggggctcttcccactttgctctgtcactcttccctgctgccttgtgaagaagttgccttgcttctccttctgccatgattgtaagtttcctgaggcttccccagccatgctgaactgtgagtcaattaaacctctttctcttataaattacccagtctcgggcagttctttatagcaatgtgagaacagagtaatgagaggtattccaaatcaagtcagtacttcaaaatcttactgtccttttagagttgagatctaaaccatactcaactatgtgatccacctgaatattttagggttttaaatcattcttgtttaaatttatgacccctttgggggaagctgttagtatttaccagtggtaggctaacagtacctaactgagcttttgctgatctgattgtaataaattctagttgaaagtcctatagaagaggaggaaatagcaatggtgctaactcgattaaaaataaaatataccttgtataattccacattaccacatttagctaaacagtgtttgtatgtagagatttctgggttctgggtggaagagctcgatagagagggagcagagggttagcagatttggaaaatgagatgaaatgaagttcaaattaggaatttgtacaaatttatgttagttcttctgttactattactagtgggctttcatttaatattgctccaaaattttgattgactttatctttcaaacagtgtattctacttatgctttctcttttgtaggcaggggagtcagtgatactctatgcattttgtggttttttttttctttatttgcttcaacctgaagaagtaaatcgcctgtttcttcttgattaatgtccattggttatgcctttagtaagctttccttgtttagagttttgtgtatgtttttccaagcatcttttaagtctgtacaaatccagttttgctggcagtttttagtgaagaaccaaaatactcacatttttgtgtaaatagctttcatatttttgaggtaatcatttttactcttgtggagtcacctatacatcaaagattccacatgtgaaatttttgtgttttagaaatatatcctagaagtgactttggttttactttaggatcaagaggttttgcagtatatggcagaataatggtgaatataaggggtaagggaacctgagttctaggctaagctgtgaccttaataaatcttaaccatggtaagtcattcaacctccctggatctcagttttatctatgaaataatcctcactaacattctctgactttaaaagttagaactattaccctctccatgaaaaaaccgaacctgctccaatgtaagaattgtttacagtcaattgtaagtcaagatggaaatggctttggttaatcaaaaagggtgaagtatccagtgtgagcacagatgaccttgaaatgtaagaattatgagtgggaagcactggggtttatgatgtctcattcattcagcttggaagacagtgtgaaatgggaacagaagcataaataaccaggacatttgttgttcctttggcagatgaaccatattttattgggacttgttgcttgactgctggttctaaacgtcatgtgttagaaagaagatgagtaattatgtttttggcatgatagattgttataaaatgtttaaaactatttagtaacatagtttaagatcccgaattccaatatgaaggtgttgtgtggtatctgctaacttttgacctacatggataaagtgccatcttagaagtgaaagctggcggggtgtggtggctcatgcctataatcccagcactttgggaggctgaggcgggcagatcacttgagggcaggagtttgagaccaccctggccaacatggtgaaactctgtctctactaaaaatacaaaaattagctgggtgtggtggcagctgcctatagtcccagctacttgggagacagaggtgggagaattgtttgaaccggagacagaggttgcagtgaactgagattgtgccactgcactccagcctgtgagacagagtgagactcctcaaaagaaaaaagaaaaaaaaaagaagtgaaagccatagatccttagatccttacccgcggtggtggtggtcacatacaggatgcctacccacagggctattggaggaatctgcctcatcagggctaacacccatgcaggcacacacataaccccacatggtttttattaagcataaaactttaaaaactgcaactttagaatacacatttaattatgataatgcaagctcaaagaaaattagagaaaattttcaagaagtaaaagtaggaaaaggaatctaaactcagaataatacatagcacaagactttgcattttcttcataattttcctcccaatgcagggcagttgtatttttacatagttgtgatcatactgttatgcaatcatagcattttattttcttaggttaaaaataatctgtacttggtatttataaaatgcaaataatcctgatgaaaaaactttgaagagaaaatgcctcttcgttctccaatttcactccctagaaataattagtgtcaacaattttatttttcacagccattttatggacattgaaatatgcaaacttttaaaaagcagtggcatgataatctgtaactttttttctatgaaaaattacattgtggacatagtcttacaatgacacagataaatctagagaagtgctgttcagtagtaataaaatgggaacctcttggtcatttttagttttctagttgccacattaaaagagtaaaaataggtgagcttaatatattttatttaacctgatatatccaaaacatgatcatttaaatatgtagtcaatataagagatattaatgagagatttaaattttttaaactgtttttgtaataaatctggcatgtattttacactcaagcatatctcaattcagatgtgaaattttcattggaaatacttgatctgtatttagagtttacagaacttacaattgaaaaagtagagtcacaaacccaattttttctagacatacttcaaagttttctaataactgagtatcaattaattaaagtaaaattcagttcctcggttgcactgaccacattttaagtgctcagtagctagtgggtcctgtattacccaggagcagactatcctttttaatagttgcatacgtttatttgctgataatgtttattgagtgcttactatattgttggctactgttaatcaggcttcatgtgttacctctattaatccctacaatgattctaaaagatattattctaaatgtacagaagaaatagaaacttagtgcagctattaaaaagcataactaagtcttaaacctaggtctttgacatgaaagatcatgctgtttccctctcctttaatgtggctctgttatgatttatttaatcattgacctaccagtagatattttggttattgtttattagtggaaattgcaaaccatgcttcagtgaccatctttgtgagcataacttacataattgtttcgtaaaaaattcaatgagaatacacattttaaatattcattgccagtcatgatggctcatgcctgtaatcctaggactttgggaggccaaagcaggaagatcagttgaattcaggagttcaagaccagcttgggcaacatagtgagacctcatctctaccaaaaatttaaaaaataaataggcatggtggcacgtgcctgtagtcccagctacttgggaggctgaggtgggaggattgtttgagcctgagaggttgaggctgcagtgagctgtgatggcaccaccgtactgatgatgcctgggcatcagagtgaaatcctgtctcaaaaaaaaaaaaattgttttcaaagtatcctacaaaaagaccttatcagtcatatttctgatagagtatcagaatataccttcactaagtattatcaatctttttcatctttcttggtctaattggagaaaatgtctcttagctacacttctttgattaccagtgggttattgcatctattcatgtttgatcatttgtggggtttttgtgaattgtctgttcactgaactctcttcataagcacaatgcctagtacataatgcctagtatataatactgcattgtgtggattgtgttgctgttcccttatttgggcttgctgcttatttctactttttttcttattataaataatactgcagtacacatctctgcatgtctttttttgtatctattttatgttatctccttaaaataaattcctgttagtggaattactgggtcaaggcagtgaatattttgagactcatggtacagaatgacaaatttattttcaaagtgctgttctagtttaccatccagccattgtttgggaccagtagtattaaaaatacatatatttactaaaatataacggtacagaaaagtgtaattaacctaaacatatagcttaataaatttataaactgaacacagccatgtcaacagcacccagaagcattgcagggtgttaccagcacccccagaaggtgcctgtgctcctttttagccaatgtctctaccccccactgcactgacttctaacagcaaaagtatgttgtacatgtaatgttcaaaggctaacatgtcactttcccatacttgcatgttgatatttttattatgcaagtaatgtgttgttttaaaaaaacactattataaaatgcactgactatatttttattttattaattttgtagagatggggttttgctatgttgcccaggctggtctgcaactcctggcctcaagcgttccgactgccttggcttcccaaagtgctgggactataggcgcaagccatagtgcccagctgagtatatttttaaaggcatgtattatccccctagtgaatgttgctctgcgtagtttttaataatattaaataaatcgggctgttggattgactgtcagaatgtcatcttaaactctgattgataatcagaaaacgaatcctgcagtccaggagatactagcatagtgatcagtttctcttgaaggcttctagatttccattgtaagacaaggaatggggatggggagggggcttgttaaaaatgtgccgtcaagagtctgacttcgtaggtctcataggggcctagggaactacatttaaaaaatatttttaggccaggcatggtggctcatgcctgtaatcccagcactttgggcggccgaggtgggcagatcacaagatcaagagatcgagaccatcctggccaacatactgaaaccctgtctctactaaaaataggaaaatgagctgggtgtggtggtgcgtgcctgtagtcccagctattcaggaggctgaggcaggagaatcacttgaacccaggaggcggaggttgcagtgagccgagattacgtcactgcattccagcctggtgacagagtgagactgtctcaaaaaaaaaaaaaaatttttttttaaatttcttgatacatatggttgtgcatatttttagggtacatgtgatattttgatacatgtatataatgcgtaatgatcaaatgaaggtaattggaatatccatcattttaaacatttatgctgcaaacatttgaattattctcttcttgctattttgaaatatacgatagattattgttgaactatagtcaccctactgatctattgagcactaggtcttatttcttctaactgtattttttacccattaatcaacctctcttcatcctcctttccccctgcactcttctggcctcaggtaaccacctatctattctttgtcttcatgaaatccaccgtgagtgaaatctcatccacttatgagtgagaacatgcagtatttgtctttctgtgcctggcttatttcactgagcatagtgacatccaggggaactgcatctttaacaacactcacgtgactgactcaggcatgtcatcatgatgtgaactccatgtgggcaggggcctagctagtatcattcactgctgtatgcctggccacatagtagacatcagtgagtgtttgctaaatggatagatgagtggtttgaaagttgaatcaggtggttctcactcacatttaccacagttctgggattgtaaaagcggtggcactgtctcatctgtttacttgtcatgggtctttaaagaagtttctaaaagtcttacactttgatgtttgcataaattatattttgacgaccttttaaaaactgttgttgcagtcatgtattcagttcaaatcattctatagtagattggattgtagctaaataagcagaatgactcatatttaataaagtgttttgcttcagataaagtaatggatctattcacttttcattccatacaaaattatttttgacaccactctggaaattcactctgatgttaggaatagtctatacctttcatgaatccaactcagaaataaaataagtgacctgttgtaccactatttggaagtattctttggtgtttaatggtaaatatactttatactaaaagcacatggttttttacatatattgtaaaaaagatgcaagcccttgaacacgtgcttttgtgtttgtaccccagggatgttctttattagtgatgtgactttgagaaagtatcatcgtctttttggacctaggtctcctcaaccttaaaatggaaatagtaccagcttcacagggtccttgtgaaaattcagtgataatgtgtgtatgtgtttagcactgtttctgacctgtggtaggtacctggtaaatgttaattcctttctctttcctcctattcaaattagtatccaggttacttctttttaagggaccatctttctttttattttattttctttatttttgagactgaaaataaagccaagaaatgcggtcttctttttaaaaagtaataataaattgtgtgttttgctaatgtatgaaatgttaactgtgattttgtttaaggatatttttcatttgttttcgtatcttctttctcattaggacatgaaagatcagatgtcaacttcatctgtgcaggcattagctgaaagaaaaaatagacaggtgagaaaacatcagaatataattatcaatgacagaaagcatacagttagatatttggaatttaaaaatgctgaccatccatggatcatgtaatcaagaggaagacttctgcttgcaggccctggtgtgaccatgggaggttttgtgacagtccaggcagcctgtcccagcaccctgtcaacatttccctcccctcctcttaccctctggtcttcttctctgggctccatagcaccttttgcctacccttactatagcacttatcacagagtacttttacttttttaatgtgtttattctgtacctattgaacacattttgtgtgccaggctctttgaagggctataattactgtctttctctctgctgggctccaggccctttgacagtgaggagagatgtgtgtcatggttttttgtttcttgtttgtttgtttgttttgagctctctagcagttactacattgcctacccatggaacacattagacatctaaggattgacatttgatgtaaagacattagaggaaccttaaacttgtgtgttaaattaagtttctctttgttttaagtagttttaaaagaattacatactttggcatattgatagaagctcctttctaattgttaaaatacagtccttttaaaaaatgtagaatgatcatctagaatttggactttcatttagattgagatttgatttagactttttttggtgggatagaatgtttttgcctgttgctaaactgttaggtaatttttttgacagaagtagttttttaaattctgtggatatccattttccttagaagtaaaaaagacttcatgaaaaatgatactatttgctttaaatgacttaccttagtctcattttattaagattccagaaagttatgaattgtccatttagtaggctcttgagaaatttcactatttatactaactagcaatcagtacttcatacctgtgggtatttgtcaagacacttaattttgaaaacaaatattatggaagcttgaagaaggggcagggttctataaatatcacctaacttaattttcctgtttccttttcttgcattccatttttcaagtcattgttttgtttttggctttttaatcttatttgcctcctttgctttctttttgagcaatatagctaggaaaagccactagctggtccattccatctggctccctctcttgaaagaagctagtgaatgccctcaagttggctagttttggagttctcttctcatttgcacttgagcttataggaagtggaagtaactgaagtagttgtgacagtgaggtcagtaacacctatgctgttactcttaatttgaatgttttattctctagatagtatagttgggctaacgtaaataaaatttatatttatatatttataaatatatatatataaatttaaatatattttatataaagtatatatacatgtatgtatttatatattgcctatctagttatggcttggaattttgttttaggctatgagtgaaatgtcaagttgcaaattttcaaggaatagcaggatcagggctctctaagcactccagcaggcatgggccttgccacgttgtgccaggtgccaggctctgtgctgctccttgcctcaccagcacccctgctctggcacccacacacaggtgcatcttccagtccttgggccctctctcaatctctatcctattatcacaaacatttgggatcagactgatgaactttaagctatttcacaataaaacgtggatgatttgccctatacttagctctacctaagtgtacaccatggaaaacgtaggaaaaatagccctgtgacctcaggagcacacaaggccctggtggtgtcccagttctctgtccttaggccagtgatgcattatagcatttttctgaccctaaaaaaattgtcactatttcctcatgtcttccatagaggtccttagagtgtggatcataatgagcaggatcttttcagtcttgatagccctaagaccaggtcagggcagagccacccacaaaaagccttggatctgctttacaccagagacagtcaccatccagctggactgaagctctgggcccctggaagctcttgtaagaaaagcttctaataactgagcttccctgatcctagcccctgaagtctggccatttgatggagttcacccctcgcagtctgagaagaggtcagtgtcagtatggaggaaggtcatggggctgttggaagggttttcagacagaaccaagtaaccaggcaggcttttaatagtgcctgagattttttttaaattacccgataggaaaatttggcaactctacaaggaaaaagagtcttagttgctagcgtcttctggctcttgcctgcggggctggtgtgagcagttactttgaccagtcaggaaggcttgtggggatctggtcagaaccaactgctgagatggaactctcacattcctgcctgtcttcttcatgtgaggaagacatacccatttatggctgcaaacttccttgaattcatacttgggaaacccgacccttgtgtctgggagccctggtggagaactctgactttagggcagcccttgcctcggttgccagggtcaggcattccttgtggtcatacctgcctgtaaagtaacccccagttgtcatctggaaagcctgaaggaccctggattctattcatgggttaaacttaacagacattgatggttcttgtgcctttgtgtgtgaagggctatggcttaccttcttgtcattccagggaactctccctttccccccaccaaaaaaacccacaacttcccctgggtcacactttttttaaaaaagtactctagatcttcggaatcaggttgactggaacctatgggttgctgaagttccacaggtaccaggaagagctcttttacaagagattgaatgcttttcaattataacacagtatatagatgggtgt

SEQ ID NO: 789 - DNA, 32742 bp, Homo sapiens
  source 1..32742: mol_type = other DNA
gttggtgacttccacaggaaaagttctggaggagtagccaaagaccatcagcgtttcctttatgtgtgagaattgaaatgactagcattattgacccttttcagcatcccctgtgaatatttctgtttaggtttttcttcttgaaaagaaattgttattcagcccgtttaaaacaaatcaagaaacttttgggtaacattgcaattacatgaaattgataaccgcgaaaataattggaactcctgcttgcaagtgtcaacctaaaaaaagtgcttccttttgttatggaagatgtctttctgtgattgacttcaattgctgacttgtggagatgcagcgaatgtgaaatcccacgtatatgccatttccctctacgctcgctgaccgttctggaagatcttgaaccctcttctggaaaggggtacctattattactttatggggcagcagcctggaaaagtacttggggaccaaagaaggccaagcttgcctgccctgcattttatcaaaggagcagggaagaaggaatcatcgaggcatgggggtccacactgcaatgtttttgtggaacatggtgagtgcttttcaaaatttctgctcatggttttcctcatgcattcatcttaggccttcaaggaactttgaacaacagtacttgcgacagttccttccaattccacttaataaatttgttactgtagttatctcttagtggaactttctttgtataagaaaaagttacttcgtgacttcggctttattcaaaatctatttgagttgcttatttcttgcctgattcctctgctaattcactgttgaccttggacaagccactttactgttccagggctttagtttcctgaggggctggacttcagtggtttcttagggtccctggttctatgattctgctctaaccgaagtcgtgggctcttctgacaagcatggattctttactgctttgtctacagagagcttttatcatattctcaaagtggtttgtgttcctgagaaagttaagaatcatagatactggttgacgctaatatccttgaccttttccttcgtaagtaggacttgaaaatactcactttggagccatgtgggaaaaatcaagtggggaagcagcattccttgtgaattttagatagacagcttctgtcttaccttccataaggagtaatctcttcctcgttgatgaagctttcatcctgtcttctccctgtttagaatgatatttgggccaataaaggttatctgtgacatttttatgaacatatttggcatttgaatgctgcccgtacattttatgttgttcatgtccagtaattctgtgcgaagttaaagctaagggtcggcttacactgatgtctataaccagttaattagggttactgtttgtactgttgcagcctgacattttttggattgtgtcctttatattaaaaaatcagttgagcccacctatcctataagcaaacgtatgaagtgtgccagtggcttatactttgaaattcattcagaaataccccaacattgggtgactgcagtcaacaaaggcttctgttggatgaacttgcatttgacagctgaagttttactttcttacgggaaaatattcacttcatctaaataaatccgggtgcttggattttactttgccttgaaacattagttctattttagctttgtttttaggcaggcaaatatggtaatgtgttgttatgatggttcccaaattcaggatttaaaaagtgaattatttacattttaactagtgatgatcatgcaccttacatagtgaaaattggaacagactttttggagagctttggcggaacttatcagaatttgaaatgtacgtgccaatgacccagtaatcccattctgggaagctagtagagaaagcagtgtagttccctgtgtgtccctgatatctcttcaggggttgagaggctaaaactattttcttgttaatagagtaccaaggtcttgtctcttttgctgtgttgacgtttgcagtaatggtacaaaagtaaagcaggtgtcttagcatgattcagggttgtggcacctaactatacttgtagtcattgcattcttcatgacgtgcactcacagttaaacaaactaaatatatatatacacacacacacacacatatatatccacttttcactgaaaaatgtccttttttttttttttttttttttttttttttttgagtcagagtctctgtgtgtcacccaggctggagtgcaggagtgcagtgtggcgatctcggctcactgtaacttctgcctcctgggttcaagcgattctcctgcctcagcctcccaagtaggtgggactacaggcacgcgtcactgacgcccggctaatttttgtattttttagtagagacggggtttcgccatgttggccaggctggtcctgaactcttgacctcaggtgatccacccaccttggcctcccaaagtgctgggattacaggagtgagccactgcgcctggctagttttcactggacaataccttgatgaagcagcaaaaattattaattttattacattttgacccttgtgtatgtcttcttaatattctgtgggttaaaaaggggggtatgcatcaagcacttctgtacagtaaagtataatgattatctccaggaaaagcactttggtggttgggttgcaaactgaactagccacttttttcatggactgccatttttacttgaaactatgacaaactatggttattcagactaaaaagtgtatgaaggaatctttcaaagaaaacaacaggtagcatttgttgccaatgatgaaattttagctttccagtgaaaattaggattttggagaattttttttttttcctcttcggggtagagtttcgctcttgtcgcccgggctggagtgctgtggtgcaatctcggctcactgcaacctctgcctcccgggttcaagcgattctcctgcctcagcctcccaagtagctgggattacaggtgtgcaccaccatgcctggctaatggagaatttttatctgcctctgtgatatagagattggtggtaatatttacagatgccatattttaatatcttataatgaaatgtattatttggaagatctacataaatcagtaaatcaatattttcttttttgttcgtttttgcgacagagtcttgctgtgttgtctaggctggagtgtagtggcatgatctcggctcactacaacctccacctcccaggtttaagcaattctcgtgcctcagcctcctgagtagctgggattacaggcatgcaccaccacaagtgaataatttttgtatttttagtagagatggagtttcaccatgttagccaggctggtcttgaactcctgacttcaaatgatctggccacctcagcctcccaaaatgctgggattacaggtgtgagccaccgtgcccagccaaaccattattttctaaatgatcaatgcatgatataaaatcatgcacaggttaaagatccattcaaagtgcaaaatggaggccaggtgctgtggctcgtgcttgtaatcccagcactttgggaggccgaggcaggtggatcacctgaggtcaggagttcgaacccagctgtgcaatctagtgagatcttacctctacagaaatttaaaaaattagccaagctcccactggagccaaagagtcgaggctgcggtgagccatgaacacagcactgcattccaatttgggcaatagagggagaccgtgtctctggggggtaaaaaaaaaaaaaaatacagttcattggtagagtttcttaaaggcagccagcctttaagaaattcctggctaggccgggcacagtggctcacgcctgtaatcccagcactttgggaggccgaagtgggcagatcacctgaggtcgggagttcaggaccagcctgactaacatggagaaaccctgtctctaccaaaagtaaaaaattagccgggcgtggtggcacatgcctctaatcccagctactcaggaggctgaggcaggagaattgcttgaaccccggagcggaggttgcattgagacgagatcacgccattgcactccagcctgggcaacaagagcgaaactcttgtctcaaaaaaaaaaaaagaaattcctggctgggtgtggtggctcacgcctgtaatccgagcactttgggaggatgaggcaggcggatcacttgaggtcagtagttcgaaactggcctggccaacgtgatgaaaccccgtctgtactaaaaatacaaaaattagatgggcgtggtggcatgcacctgtaatctcagctactcaggaggctgaggcaggagaatatcttgagccccgggggaagaggttgcagtgacctgagatcgcaccactgcacttcagcctgggtaacagaatgagactctgtctcaaaaaaaaaaaaaaaaaaaagaaactaccatttaccatgttttgatgtagcatcaaagaacaatatctacggttatctagaaagtctgttttggggggagaaaacagttattttccagtaataaaaatatttgtttttaaatgaataattatgtttttaaatttcagtattcatttctaatgtggtaactattgatgagataacctacacaaactaagcctcttaggggccttcggttatttttcaagagtgtgacaagggcctgagattaaaaagtttgaggccaggcactgtggcttatgcctgtaatttcacactttgggaggccaaaggcaggtggattgcttgagcccaggagttcaagatcatcctgggcaacataagaagaccctgtctctacaacaagaacaaaagaaattagccagacgtgttatcacacctgtgttcccagctacttgagtggctgaggtgggagggtcacttgagctcgggaggccaatgctgcagtgagccatgatcacgccactgcactgcagcctgggtaacagagcaagaccccatctcaaaacaaagtttgagaactgttgctatggaaagtctatcaagaaggcacatagggatgtttgttgctgaagtactaacactgaatgatgtctgtgttgtggtgagtagaaaaaaagcaatttgaaaatcattatttatggtatggccccatttttgtaaaacaaaaatatctgtttatttgtgtatgtccaggaaaaaaaagtatggaaggattttacaccgaaatttttatctctagggacttggagctttaggtggaatcggagaaaactttctctttttggtttgtgtgatgttccaagtgtctttttacaacaaacttgggttatcttataatacgaaaaattcgaagatttaaaaactgaggccaggcacggtggctcatgcctataatcccagcactttgggaggttgacacatgtggatcacctgaggtcaggagtttgagaccagcttgaccaagaaggtaaaaccctgtctctactaaaaatacaaaaattagctgggcgtggttgcaggtgcctgtagtcccagctactcgggaggctgagacaggagagttgcttagacccaggaggtcgaggttgcaacgagctgagattgcacgccactgcactcccagcctgggcgacggagtgagactccatctcaaaataaataaataaataaaaataaaaactgaattgatgacagcccaacctgtcacttttttcagatccctttttatgaaagaatttgcttaagttgtgtctgaagacaaaccaatttctttggaccctgggtattctttttctaagggaataccatgttattttgtgttacagattgtttgcgatctttcataggctgatctttctagagttggttaatatccatgtaggttagattgaaaaacttgaattcagaaatgtacggtgttggagcagacatggatctggaagccaagaatagcgttggtgttgttgttgatggtgaatctgaaagagtgggcagatggcaactttttgccagaatcattcagggtcaaagggctagtcatatttacaagggaaaagaggaaaccatgttattaaatatttcatgcaccatatgttcctttcaaatttcagtggcttgactaagaaaattcacttttgggagagttggtacaacaattgaaagcacttagtagtcaactttttccttagtgtttccttcttccttcaacaaacatttattttattgagcacagactatgacaggtcgtgttgtagtcactgatgatatatttgtaaacaaaacaatccctgccctcctagaacttacattctagtgggaggagacacatcataaataagctaagtaaataaaatacagatatgttagtgatatgtgctgaggagaagaataacatagagaaggggacagggaatggggtaggaggtgtaattttagttagggtggctagagaggcctgactgagagggcggcatttgattaaagacccgaaggaggaagatgagcagcaggccctgttgaaatatgtgaaagaatttcaggccgagggaaccaggatgcagaaacctgaggcagagcttgctagtttcaaggagcagcctagaggccactgcaccagagcaaagagcaaaaggagagatgcaggaggtaaaatggagggtgggaagagaatggctgaaggagagggtggccttattggcccatttcaaggattttgactttgattcatatgatgtgggaaggccttggagaattttccgaggggactatactatctgatgtatgtttcagtatgaaatagaatctctctggctgctatgatctgaaggaggacaagggagcagggattccacgggggcattgattgcacagagccaggtaagagtgatgatgcttggaccaaagtggtggcactgggtggagggtcagaaccgacaagatttgctctcggattagatgtgggatatgggggtgtgagaggggccaagtgtgactctcaggttttcgaactgaataactggaagaatagagttgccttttattgaaatgaaggtcgaggctgcagtggtaagctgtgattgcgccactgcactccagcctgggcaacagagcaagaccctgtctcaaaaaaaaaaaaaatatttaccatcaggtaaaaccacttatggttctcaaaactttatttaaaataatagacacttgataaatcaacactgtaggccgggcgctgtgactcacgcctgtcatcccagcactttaggaggccaaggcgggcggatcacttgaggtcaggagttcgagaccaccctggccaacatggtgaaacctcgtctctactaaaaatacaaaaattagtcggcatggtggcacacacctatagtcccacctacatgggaggctgaggcagagggatcacgtgaacctgggaagcagaggttgcagtgagccaagatcatgccaccgcactccagcctgggtgacagagcaaggctctgtctcaaaaaaacaaaacaaacactaattctcattactcttaaaattatactaaggccaggtgcggtggctcatgcctgtaatcccagcactttgggaggccaaggcagatggatcacttgagcccaggaattcaagaccagcctgggcaacatggcgaaaccccatctctactaacagtacaaaaaattagctgggcgtggtggtacacgcctgtaatcccagctactcaagaggctaaagtgggagaatcacctgcgcctgggaagccaaggctgcagtgagctgtgatggtgctattgcactccaatctgggtgacagagtgagaccctgtctcaaaataaaataaaataaaattatactaagtatctgtatacattagaaggtgggaggaagtgcaattattggatcctataggcattaaagttaaatttgtcaggtttttttttgtttttttttttttttttgagacagagccttgctctgttgcccagactggagtgcagtggcacaatctcagctcattgcaacctccacctcccgagttcaagcgattctctttcctgcctcagcctaattttttgtatttttattagagacggggtttcaccctgttagccaggatggttttgatctcgtgacctcatgatctacctggctcgacctcccaaagtgctgggatttcaggcgtgagccaccgtgcctggctatccgattctcaaagaggttatttggacaggctgggcgtggtggctcacgcctgtaatcccagcactttgggaggctgaggcgggtggatcacctgaagtcaggagttcgagaccagcctgaccaacatggtgaaaccccatctctactaaaaatacaaaaattagcagggcatggtggcatatgcctgtaatcccagctactcaggaggctgaggcaggagaatcgcttgaacctgggaggcagagattgcagtgagccaagatcacaccactgcactccagcctgggcaacagagcgagactccatctcaaaaaaaaataaaaaggttatttggaaagattatatccatctacttaatgctagggattggattgtggcacgtggactgtgaaaatgcaaaattggaggtatgtactttattttagagacagggtcttgctttgtcacccaggctggagtgtagtggcacagtcatagctcactgcagccttgaactcctgggctccagtgatcctcttgccttagcctcccaaagcaatgggatcgtacaggtgagccattgcacctggccatgtatgtacattttttataagcattcagttgtttccaatagtctaatacattttgtatggccttcttatttttcatgaaaccttactacccattttaagaaatttgtaatatagaagaaaacagaagtttcaattgtggggtaagtaaagaaagatgatcaaagatgatttgaccaaaagagttttacttcatttaaatgaagcatgttgtcaaagaaaatgaaagtgggaaaaaatgtgaaatcattttgtatcagttcaggacagaaccgtgcttgtgcttcagatctccaagtgtgaacacactgatgtgttgtgaagtgtgttgcaaatagaagcattttttgaatgggagggagagggatgtgttaacatgatttagctgggaattaaacccataggaatgtgtcgggcatattttctgtgactagggggtaaaaagattaaaatggctactgaggatgggcttcagtaagaggaggtctcccgaaggccttctctgccctgtgcctctgcagttccctgactccttgctgtgttcgtccctgcctttttggtagttgtgcccctgatgtcactcccctgtgtgttcagatcctacctgctggccaggtgcagtggctcacacctgtaatcccagcactttgggaacccaaggtgggacggtcctctgagaccaggagtttgagagagtggcctggacaacatagcaacaccctattagtactaaaaataaaaaagttagctaggcataataatgtcctgtgcttgtctagctacttgggaggctgaggcagaaggattacttgagtccaggagttcgaggctgaagcaaactgtgatcatatcattgtactccagcctgtgtgataaagcaagaccctatcctttaaaagtaaaaaacaaacaaacaaacaaaaaacaaacctgcttaacctttcaacactctcttccagtcccccctcccttctgaaaccatattttacatctctggtcctcattaaattttctgtaacttctgcccttgtaactcttctgcaacacaaatgaatacataatcatatacttcctagtagtatttcctaatagttttatgtgagtttcatggaagagagtgttgaaacgtaggtaggtttgttttttattttttaacttttttttaacttttttttttgagatggagtctcgctctgtcacccaggctggagtgcagtggcgcgatcttggctcactgcaagttccgcctcctgggttcatgccattctcctgcctcagcctcccgagtagctaggactacaggcgcccgccaccacacctggccaatttttgtatttttagtagagaccaggtttcaccatcttagccagtatggtctcgatctcctgacctcgttatccacctgccttggccttccaaagtgctgggattacaggcgtgagccaccatgcgtggccttttaaaaaaatttttaagagataaggtcttgctttgtcgcccaggctggagtacaatgatatgatcactgttcactgcagcctcgaactcctcaagtaaactgtaagcttgtgaatgcaggtttcatctcattttctgtttccccagcataatgctgaatacataggctctccataaaaaaaattcttgataagaatgatattaaatggactaaatgagaaattaaactttttattcacttacaaggaatgaaagttctcaaatagctaacttattttcttatgtatcctaggactttttatctggttctggggtttctttcccaatgaatatacttatatatgtttattttatttatttatttttgtatttttaaaaaccagaacatttattgtgtggctaatctttgaaattcttggctgggctcggtggctcatgcctgtaatcccagcactttaggaggccaagatgggcggatcacttgagctcaggagtttgagaccagcctggccaacatggtgaaaacccatctttacttaaaaattagccaggcgtggtgacgcatacctgtaatcccagctacctgggattgtgccactgcactccagcctgggcgacagagcgaaaccctgtctttaaaaaaaaaaaaaaaaaaaaaaagcaaataaattcttgagatgaactggatgctgcaacagctgcccttttgggtttaggtgttgttcctttatggaaatccacgccgcttcattcgcccagtccctgtggcctttagtcttttagccttggcacaccagtcatacttcctcttgcgcttggcggggtagccacatttgccacaggtagacttcggaaggtgacaggccttagagccacagtggccgcacaacgtgtgcatcatattgcaacgcttttcaaacgataacgttccctttgtcatctcccttctgtgtttatttttttattgtggtaaaatatacagaaaagttaccattttaacctgtttaggtgtataactcagtggcattaagtatattcccagtgatgcagtcatcatcactatccattttcagaactttttcatcatcctaagtagaaactctgtacccattaaaaaataatatcccatttccctctttccccacttcttggtaaccacttttatgctttttctctctatgaatttgctcattctaggacttcatataactataataatacaatatttgcccttttgtgtctggcttatttcacttagtgtttttgtttgtttgtttgtttgtttttgagacggagttttgctcttgttgcccaggctggagtgcaatggcgcgatctcggctcactgcaacctctgcctcccaggttcaagcagttcttctgcctcaccctcccaagtagctgggattacaggcatgtgccaccatgcctggctaattttgtatttttagtagagatggggtttctccatattggtcaggctggtctcgaactcctgacctcaggtgatccgcctgcctaggcctcccaaagtgcggggattacaggcatgagccaccgtgcctggcctcacttagcatgttttaaaggtgcatctgttgttacgtgtatcagaatttcttcttttttaaggctgaataatatcccattgtgtgtgtatatatatatacacaccaaattttgtccatctgttggtggaacttgtgtatggtggtttttttttttttttttttttttttttgagacagtctcactctgtctcccagactggagtgcagtggtgtgattgcctgagcccaggagttcaagcttgctacaaccttgacctcccgggctcaggcagtcctcccacctcagcctctcgagtagctgggaccacaggtgtgcactaccacacctggctaatttaaaaaaaaaatttatagagacagagtcttgctatggtgtctaagctggtcttgaactcctgggctcaggtgatactcctgcctcaacctcccaaagtgttaagattacaggattgagctcccttgcgcgacctgatattttaatattttttttaaaaaagtgtaatatgcatacagaaaggggcacaaattgaatgtacagcttgatgaatgatcacaaatgaatacctctgcattccactatcttgcttaagaagtagaaaattgtgagcacacctcagaaagccttgtgcccccttccagtttcactcctgccttcctcctcctcagagataactactgtcttacgttttagcaccatcgattagtttcccttgtttttgtttttaatattcccttgttatccttttaatgtctatagggtctgtggtgatatgctttttccattcctcacattggtaatttgtgttttttctctctgtttctctctcacacacaccttttcagttagttttgctgagggtttaccaattttattaatcttttcaaaaaaaatttgttaactttctcaattgttttccattttattgatttctgctctttattttctttcttttacttaaaaaaatttttttttgtagagatagggtcttgctatgttgcccaggatggtctcaaactcctggcttcaagcgatcctcctgccttggcctcctgaagtgctgggattataggcgtgagccactgcacccagcctactttgggtttaatttgttctttatttctagcttcttaaagtagaaatttagatcgattccaaacccttcttgtccaacataggcatttaaagctgtgtatttcctactaaacactgcgttagctctatcacataagttcatcacataagttttcatgtgttattatcaaagtgtttgatttccaagtatttgggaattctagatatcttggtttctaatttaatttcattgtggtcagagaacatcttctgtagaatttcagtcttctgacatttaccaagactaattttatggcccagcatataacctgtcttagtgaatgttccatttgtagttgaaaaaagtttgtgttgttgcatgtagttttctataaatcaagttgtttcatgcttttgtttaaacatcttctatattcttactttttattttgtacttacttcatctatagctttgctgaggtttttttttttttgtagagacaaggtttcaccatgttacccaggctggtcttgaactcctgagctcaagcaatctgccctcctgggcctcccaaagtgctgggattacaggtgtgagccactgtgcctggcggtatctctcttttttactgagagagtgatgctgaagatcaacagctataatgatatattcgtttattttttcctttaattctatcacttcttttactcttaaaagcatttattccgccgggcgtggtggcacacgcctgtaatcccagcaatttgggaggctgaggtgggtggatcacaagttcaggcgttcaagaccagcctggccaagatggtgaaaccctgtctcttactaaaaatacaaaaattagctgggcttggtggcagctgcctatagctactcgggaggctgaggcaggataatcccttgaacccggggtacagaggttgcagtgagccgagatcgcgccattgcactccagcctgggtgacagagtgagacaccgccccccccccccaaaaaaaagcatttattaggaaacaggaaagactgaacaagaacaagagaactaagcatgtaactcaagaagccagagaaccaaagtaatcccacagtacacagaagagaataataaaaataaaaacaaattaagaatggaaatgatcaataaaaccaaaagctaactttgaaaaatattattgatctaggcacacttctggtaagactaatgaagaaaaagaaaaggtagaatatttagaaaaggaacaatatttagaatgaaaatataactataaatactctcagtttttgcctctttttttgtttgtttgttttttggagacaagatctcactctgtcactcaggctggagtgcagtggcaatcatagctcactgcaacctccgtctcccagactcaagctgttctcccacctcagcctcctgagtagctgggactatgggcatgcgccaccatgtccagctgattttttttttttttttttgtggagacggggtttcatcatgttacccaggctggtcttgaactcctgagctcaagcaatctgccctcctacgcctcccaaagtgctgggattacaggtgtgagccactgtacctggctggttttttttttttttcttttctttcctttttttttgagacagtgttttgctctgtcgcccaggctggagtgcagtggagtgatcttggctcactacaagctccacctcctgggttcatgccattctcctgcctcagcctcctgagtagctgggactacaggcgcctgccaccacgcccggctaatttttttgtatgtttttttagaagagacggagtttcaccgtgttagccaggatggtctcaatctcctgaccttgtgatccacccgcctcagcctcccaaagtgctgggattacaggcatgagccactgcgcccagcctgttttttttttttatagtttgtatttttctgctgagattcaccatgttttcattcattagacctgtcttttcctctaaatcctagaaggtatttgtaataaagaccgtgcctgctaatttaaatatctgagtcatcttggggtctgtttttattgattgctttttctgtacattatgagtcagattttcctgcatttttgcatgttaaataattttgattgtatgccagacatgtgggtgttatattgtagggattctcaatcttgttatctttctttaaagaagttttcattttgttttgacaagtagttaggttactgtagttacttaaattactgtaagtgactggtcgttaagttagtttgaccctgccaggtttggttttatgctttgttagtatgggtttatccttggtccagacacccggcccttagaatagagggtactctttagacttaatgcttggcctttttggggtcgaaacaaaataacagaggtgctcagcaaagtctctccaccctggatgaactggtacttgaatgtcttccagcactgtgaaacctctgtgtctgtgcagttctcagcctcacagccaccgctgtctgctaaactgcatagaatctggaagccatggacccacaggatgcctcccaccttcttctgcctacctctgtgttctgtcaccccacccatgccctcatcttctctcagatttcttgccctacaaattctacctgcctcagcatcctcaaatccaagtctttgcttcctcagttcacagagatggctgctgtcagtttaggtttcatctccctgcactgtgtttgggaaggtgccccaggcaggaagttggaagcaacatgcaacttaccttatgtttttctctttcctcaagggtcacagccttgccttgccttgcctgtcatctaatgcctgaaaacagtcgtctcaaatattttattcagccatacagttgtttaggacaaaaggatatctaataccacttttactgcattatggacagaagcagaagttcaattctgcatattctttttttttttttaagatggagtctcactctgtcgcccaggctggagtgcagtggtgtgatcttggctcactgcaacctccacctcctgggttcaagcgattctcctgcttcagcctcctgtgtagctgggactacaggcatgcaccaccacaccaggctatttttttttttttttgcatttttggtagatagggtttcatcatgttggccaggctggtcccgaactcctgacctcaagtgatccacctgccttggccccccaaagtgctgggattacaggcgtgagccactgcgcccagccagacttttttttttttttgagatggaattctgctcttgttgcccacgctggagtgcaatggtgcaatcttagctgaccgctacctccgcctcctgggttcaagtgattcccctgcctcagcctcccgagtagctggaatatggacatgtgccaccaaacccagctaattttgtgtttttagtagagacggggtttctctgtgttgatcaggctggtctcgaacgcccaacctcaggtgatccgcccacctcggcctcccaaagtgctgggattacaggcgtgagtcaccgcgcctagcctccggccagacttttaaatgttagccttgcaggtagttgtgcagtagtatctcccagccttaatttgctcttctttgatgactcatgaggttaagcaccttttcatatgtttactggccatttggaatatatgtgtacctatgtatctcttgccagttcacctcttttgtccatttttctatttatgtttattcctcattgatttttaggagttatttatattttttttcctttttttttctttgtttgaggcagagtcttattctgttgcccaggctggagtccagtggcacagtctcggctcactccaaccttgacctcctgggctcaagcggtcctccaacttcatcctcctgagtagctgggactataggtgtgtgccaccacttctggttaattttggcattttttgtagagttggggttttaccatgtggcccaggctggtctcaaactcctgaggtcaaaccatccacccacctcggccttccaaagtgctgggattacaggtgtgagctaccgtgcctagcctgtgtactctcaatacaggtccttcgttgggtgtatttattatgactattttcttacactttgtggttcaccttttcactctttatttacataattatagccattgtgcgttttcactctatctctcttttttttttttttttttttttttttgagacagagtcttgctctgtcactcaggctggattacagtggtgtgatctcggctcactgcaacctccgcctcccaggttcaagagattctcctgcctcagtcccccgagtagctgggattacaggcgcccaccaccatgcccagctagtttttgtgtttttaatagagaaggggtttcaccatgttggccaggctggttttgaactcctaacctcaggtgatccacccaccttggcctcccaaagtgctggggttacagacgtgagccactgcgtccggctgctttttcactctcttaatggtgtctttgataaaccttaattttgacttagtctaatttaatcttttatggttagtactttttttgtggtctgtgtaagaaatctttgtgtctaccctaaggtcacaaagaagtttcactctcttacatctcatgtttatagttggcctggaattgttttttctgtgtaggggcgaaggttcattttttccctcatattgacctagctgtttaattgaaaagaacatctgctgctgtgtaaatcaggtatacatgtacgtgtggatctgctggggaactccttcctgttaatttgtttgtctttccttgcaccagtattacaatgtattactgtagctttaaaataaatcttaatgcctggtagaataaggcctcctgttttgttcttcaatattgtcttggcttgctcctttgtatttccatatacattttagagtgggttttatcagcttccatacccaaacagaaatacccttaaggattttcttctctgattgcactaaatctataggtttctttgatcctagaaatgaataatagaatataaagaattcttattgatgaaagaaagctatttcaggaaacttttttttttctgttaatgataaaggctaaatgattcctgtcaattgtttcaaattttcaactttcaaaatacctgctgcttctttccaattcacctttctctattctttttttttttccaattgtatttttctttgacactcagtacttgtcccttgatagtggagaccatgtttatacattttcatggatcgaacagtatttttttttaacagactagctacttagtgaatacgcagttgaatctacttgtttggcaggttcaggcattgaacaagtactaagtgcctgttctgtatcaggtactgtgtcagtctggggtaagagagccaggaacaacatagccaacaaaaggctctttgtgtctaatttatattcctgaggaccaccactggccatctgcttgggagaatggttatggcttgaataaacagtgtggaatgggtccagggaaccggctgaggaaaggggacatttactcaacctgatcttctttgttaagcagtggagagacccctggtggagccagcagtatcctttatctataatagcttgcttttcatcttttttatatcagtggctgcctgtggcctctcaccaaatctggtggactcattttctctgtgtatttagtttttctcctggaaatgactaacagctgcttaagtccttattcctttctccaggtttctggtgctgccataatttgttctatccacttgggatactgctgtagtgggaatattgtccctgttaccatcttcaggttacaaaccttttccccagcttgtggtaaaatcccgggggtctggtggatcccacgcattttaggatgtatatgggaagctaacattataggcacagtgtttttttttttttcactgtgtccgtctgttcttcagaggagcaaaggctagcatgacctttaagtcctcctttaagagtactgaatttctgccaggagcgtggcttgttcctcaagtgtcgctaggtgaattgttattagcaaggagggatgaaattgcgaaatcttaaaaagtagagaattccttcagatttcattcttgagaggtagaaaacaggaaatagaattgctaaacagagaaggggagtgtttttaatagagatatttgtatgagaataagaggatggagccataatctgaggatgcctgtcttgtttgctctttggcttagttggatcttgggttggtttacttcctgtacaaactgtgagttagtagggactgaatttacagtaatatctaaactgattggaaccttcacttgaacagaattgagttttggcgtgttcacttttaagagaaagaaacaaaggcagccaacccagtatcaagagtttagtcaaaacaaacaactcccagatttgccttggtagtgaatagattcagcatgtttgtactttctatttcttcagtatcatatagtaatttattgtttcattggtgattttgcagcatcctaggttgcaaagaatatctcttgtggatgtgtaaagttaaaaaaaaatttttttttcttgtagcagggtctcagtgttactcaggatggtcttgaattcctgggctcaggtgattctcctgcctccgcctctcaggtagctgtgagtacaggcgtgcaccactgcgcctggctgtaaagcacttttttttttttttttttttttgagacagagtctcactcgttgcccaggctggagtgcagtggcgtaatctcggctcactgtaagctccgccacctgggttcacaccattctcctgcctcagcctcccgagtagctgggactacaggcgcccgccaccgcgcctgccaccacgcccggctaactttttgtatttttagtagagatggggtttcaccatgttagccaggatggtctcgatctcctgactttgtgatccgcccgcctcggcctcccaaagtgctggggttacaggtgtgagccactacgcctggcctgtaaagcactttcatatacttttttgtgaggtctatggtataggcaggatacgcattattcctttctttcagtaggaaaacttgtgctttgggtagtcgtgtttttagggttacattgctgattagttttagagctgtggttgaaatcaagtgtctcttgacagcttgagtgtttttcaattggaaacattactttttgaggatagactaatgcattttgaaaacatttgcatcattgaaatgagtggggtctagctttagaatttaatcaaatttttaattttttcacaatttcgtggtatgatttttaatactctattgaatattctttttttttttttgagatggagtctcgctctgtcacccaggctggagtgcagtggcgcgatctcggctcactgccagctctgtctcctgggttcatgccattctcctgcctcagcctccccagtagctgggactacaggcacccgccaccatgcctggctaattttttttgcatgtttagtagagacagggtttcaccgtgttagccaggatggtcttgatctcctgacctcgtgatccgcccgccttggcttcccaaagtgctgggattacaggtgtgagccactgcgcctggcctgaatcttcttttttttttttttttgagacagggtctcactccgtcacccaggctggagtgcactggcatgatcttggctcactgcaatctctgcctcccaggttcaggcaattctcctgcctcagcctcccgagtagctgggatcacaggcgtgtgccaccaagcctggctaatttttgtatttttagtagagacagagtttagccatattggctaggttggtcttgaattcctggcctcaagtgatctacccgcctcagcctcccaaagcggtgcaattacaagtgtgagccactgcgcccagcctctattgaatattcttaccctttggtagttgagtgttttggaatggcggtgtgtaacaaacataccttatgtatgcttttatgatttataattttatgctgttatgaaattttataattataaaattatttataatttaaaaaatttatacattgtcctacaagctttgtggcagttttacgatttattttaaaattaaattgaactttttttgttgtgtttttttgagatacaaccttgctctgttgcccaggctggagtgcaatggcatgatcttggcttaccgcaacctccgccgcctgggttcaagcgattctcctgcctcagccttttgagtaactgggattacaggcacctgccaccacatctggctaatttttgtatttttagtagcgatggggtttcaccatgttggccaggctggtcttgaactcctgacctcaggtgatcagcctgcctcagcctcccaaagtgctgggaatacaggtatgagccactgtgctaggcctaaattgaacacttttgaatagataatacattttctaatttaaactacaaagctacagaacaaacatgtattttcagaagcttgcttgcacctctgccactctgtccttttccttctcctactcctctggaaaattttttgtgtgtggttttttttttttatccttccagtgttcttttttgcaaatacaagcaaatatatatttattacacaaaagatagcatacagtatataccgttctgtaccttcttttttgtttttcccttaatagatcctcaggatctccccatattggaatatgtatatcttccttctttttatggctgcattgaattccactatcttggaagtatcattggttttccaaccagttccctttctggacttttggagtgtttccagtctttagatatgataaacagtgcttcaggggtaacgttatagctgtgggagagattcctaaaagtcggggcactgggtttaagggtacatgcgtttgtcatttctgttagtagatggattctacttggtagatagctaccattttgcgtatgtctgtgtgtatatatatgtgtgtgtatatgtgtgtgtatgcatgtgtgtgcatatatatatatatatatatatatatattttttttttttaagacagggtctggctctgttatgcaggctggagtgcagtggcatgacctcggctcactgcagcttcagtcctcggggctcaagtgatactcctgcctcagcctctctagtagctggaactataaatgtataccactatgcctggctgttttttgtattttttgtagagatggggttttgccatgttgcccaggctggtcttaaactcctgggctcaagtgcctccttggccttccagagtgttgggattataggcatgagccaccacacctggcctgtattaatatagagtaatagagatctatattggtagatatttccacattttcttccgtagacatcattctagtttacagtcccatcgctggtaatacagaggttgccttcatccccaaagcctagctaagagagtgtattgtcaagctttgggactttttccaatctgatatctaagaaatagtattttagtatggttttaaatggtaggtcttctgtgagtgaggttgaacattgttttgttttgttttgttttttgagacgaagtttcgctcttgttgtccaggctggagtgcagtagtgtgatctcggccccaccgcaacctccgcctcctaggttcaagcaattcttctgcctcagcctcccaagtagctgggattacaggcatgtgccaccacacccggctaattttgtatttttagtagagacggggtttctccatgttggtcaggctggtctcaaacttccgatctcaggtgatctgcccacctcggcctcccaaagtgctgggattacaggcgtgagccactgtgcccggccggttgaacgtttttaacatgtttaggggagatacatacttatctttctgtgaaccatctcatcaggttctttgtgtggcagatatttaaataggaaactatgtagggcctagttgattgcctatatagaatccagtaccctgtctatgccccttcactgcccaagcatgtcacaaggaactgccctattccaagctccagaggacctgctgagtaggtgcttttcaggagcttgaaaagactgtttccaggtctacccccaggggttaatttaattggtctggggagaggcctaagtatcagtttttttgttttgttttagttttttagtaaggagagactttattgaaaaggatttttgcaaggaggggaaaacgactgttgaaatagggaggacactctgaccataaggaggtgtgcaggcatcttctttttcaaaaaatgttttcagttttaaaatttaaaaaaaaatttattttatttatgtatttattttgagatgaagtctcactctgtctcccaggctggagtgcagtggcgtcatctcagctcactgtaacctccacctcccgagtttaagtgattctcctgcctcagcctcccaaatagctgggactacacgtgtgcactaccacacccagctaatttttgtatcttttgtagagatgggggtttcaccatgttggccaggctggtctcgaactcctgacctcagatgatccacccgccttggcctcccaaagtgctaggattacaggtgtgagccaccacacccagccacctggacatgtttaaagaacccagtacctcaggtttaaggagcttttatgtttggtccagactacgtttcagggaagccacaagcagagtttaaagcctgctgagcaccgagctggttcttggtgctaacagggctgagactagtgaaaaagtcatgttgaggcatctgctcagttccagtgtcttccttggcatctgcttgtgcctactgtttgccccctttgcctgtgtgttaaaacagcctctgtctcagaacagtgtctttttttttttttttttgagacagagtctcactctgttgtctaggccggagtgcagtggcacaatctcggctcactgcaacctccacctcccaggttcaagatattctcctgcctcagcctaccaactagctgggattacagatgtgcaccgccacacccagctaattttttgcgtttttaatagagatagggtttcaccatattggttaggctggtctcaaactcctgacctcgtgatccgcccacctccacctcccaaagtgctgggattacaggcatgagccactgcagtgtcctttcttgaggaatggtggtctattaggagaaaaaccaaaagataagacccgagaccaaggaaattgtagtctcaatgcaaagatacaatcagaacattgcacaagggggaaagaaatgtcatgctagtgtttgtattttaattgtctttccttatttagaccaatagtagtaacaggtaacttgggttgcatgcttactaagttccaggcagtagtcgaataacttttaatatttaatattcagaacaataaggaagaaatgaaaactaagaacttactagcaatccggagtttatatttcttgaaaagctcattacaggtagttgctggaatgagatagtttgtgtgcatgaagaagaacacacaaaaatattaaaacatgacatgagtgatggtaatacagcaggtccccagataatggcctttcattcactattgtttcattatcatgttgatgagaaaaaaaaatcaattccctgctggagctactgtctatttggaatttacacattctccagtgtcctcgtggaacttaactcttgtttatatcaattaccttgctgattgatggacaaatcatggaaaattggttttgttatatgtcattttgctcaaagccccagtttccaagaacctatcaatgacattaagtgagaacttactgtagttattccctccccattcaaaacaaatttattgtttagaggatataaggagaaaacattttttccctcagatgtatccttctgtgtgttatgtgtctttttcttttgagacagggtcttgctctgtcgcccaggctggagtgcagtggtgcgatctcgattcacggcaacccccacctccctcgttcaaacaattctcctgtctcagcctccagagtagcggggagccacccgctacaggcgcgtgccaccatgcccggctaatttttgtattttttttagtagagacgtggtttcactatgttggccaggctggtcttgcactcctgacctcaagtgatccacctgcctcagcttcccaaagtgctgggattacaggcgtgaaacactgtgcctggcccgatatgtgtctttttaggcaagcagtgcttatgttgtttgttagtggtaagctgcctttgtagctctgtgttaccttgagtgagacatgatgtgatgtttagttcgtagcatcctcagcactgtcttattcacaatcattgtcaatctaaatgcatagtccttcctgattttttttttttgaaggctttttaaaaaagtttaattgagatatggttacaatggagaaaaaccttcaggaaatataaatgtaaaaaaaatttttaagctttattatttattataaaaacaacatacatttttgtaaattattcaatcaaggaaaattgattcagaaagctatttgaaattcaatcagcatgatcaatgatactttaacccctattcaaatgaaagttatcctaattaaaagtaggtgccctaagaccatttttcagggtgcatttgggttctattgcttccacatcaggaactcataattactgtatggattttataagttgatccaaccatggtatgacttctgtgggtactggtaagtccacatcattgctttgtaataatgtataatcatgactggatgcagtggctcacgctgcaatttcagcactttgggaggctgaggtgagaagattacttgagctcaggagtttgagaccagcctccaacatagggagaccccaacatagggagaccgcatctctacagaaaataaaaaataacaataaaaaatgtgtagtcacaatgttaaagtgaatcagaagagttgctaagttatgatcctttaattgaatcaaagttttttgtttaaattggcttgctgaggagtttccagtaaattaataatgaattatgtaattaatattatgttaatattaaatgttattttaatcaggtcactgccctgcatgccaacttccactgaagtgggaatgtttcacagtgattcagtggccaattagcaatgctcagattcgccatttattgagagattcacacacacacaatcaatcaaacattcacaatgtggttattaaaggctgtaattagggggacaatgaaccacagggatggctcagaaggtcagagcactgatggaccctcaagtgggttggaagtcccttggatgctagtaagtgaggagtggctgttcctctcctggagagccgctgggcggcaattgtcatgctaggaggaggcctcagagttctcatgggcaaagattccaaaggcgccccagacatcatcagctccttgctgtgtgtatgattctccaaaggtctgcccagtatcatggtctcagccagctcttggctccatttttccatcggtggtggtactatgccacagcaggtgttattatctcaccaccttattctattagacgtatgtttatcacttcgaagaaaaacaattttactatgatctcagttgccaggctagtacacatgtgcttatcattctttgtttgcttttcttttgagtcaaggtcttgctctgtcacccaggttgaattgcagtggcacgatcatcgctcacttcagcctgtaattcctaggctgaagggatcctcccacctcggtctcttgagtagataggactacaggtgtgcaccaccacacccagatttttttttttttttttttttttgtagagaagggtctcactctgttgaactcctggtggcctcaagggatcctcctacctcggcctcacaaagtattggaattacaggtgtgagtcactgcagctggccttcacttatcactgtgaggagtaaacagctgcatggtgggcttaatgccatctaacacgagtgactccatgttcagacagtaggatcacaaatgattattatatagcaatgaatggccacaggtacatagactaaggagccacatccctgctcctgggatatcctttagtcaaagggctagaagggtcctggaggtttgccacttctccgtgttgaggtacagagttcctagactaagggactggctgcattgttatgtgtgagtgctagtcatggtgctgcctggcacccacaaatgccacagcagacccatggtcgagggagaggagcaggaataccagttaccatgccggagtaacagttacggcactgatgcaccagttaccatgccagagtaacagttacagcactggtataccagctaccatgccggagtaacagttaccacactgatataccagttaccatgccggagtaacagttaccgcactgatgcaccagttaccatgccagagtaacaattatagcactggtataccagctaccatgccagagtaacagttaccacactgatatactagttaccatcccagagtaacagttaccgcactgatgcaccagttaccatgccagagtaacagttacagcactggtataccagttaccatgccggagtaacagttactgcactgataataccagttaccatgctggagtaacagttaccacactggtataccagttaccatgccggagtaacagttaccgcactggtataccagttaccatgccagagtgactgattttgaccaagacctttgggttgtacagaaggggtgagaccatacctgtcctcaagcatttccaacctagtgtagagaaaaacaggagcaagataagaacaacgtactgaaaaggaaattggatgagggcctggaaaaaggggtaaagtgagctggttgggattggtgagtgccacagcttcctgccccttaacagatcagtgccatggtggctgtggtgtccctggcccagaccttctcagacagggcctgggtgccctttacagagcagttgggaagagaagggaacctagccttgtgaccttttgctccacagacctagtcctttgttgtggtgcgaggctcagtcgtcagcccaccgagtcatgtatgttctctggttgcccctggttttggctgaactcaaaggatggctgtctgtgaggagtactggtactttttgccacttgtgtgccctaactgtggtggatgccattttggggattatgctcagcagtgagtcacgtgagatgcacacgtagcttttcggtgattaatccaggtcaatgcccttacccacatacttctgagatgtactgatgatgactacatttaaagctttttctccattggctagaagttgagacccatttcaacaaaagcacttccacctctcctgaagtgcattgggaaaactggaggccattactagatttacagatgatgggccgtgcttaaataacccatcttagctagactccaggtttcgtcacatattccctacctgttgctgccattgagggctttctctgtgctaggcactaccaaataatgctttggtaactttggtaatttggtaaacttggtaatttggtaaatttggtaataaagagcctttattctaaagtgcaaatctaagtttggggttcagtagctcaaaactctctggtggttcccattatatagagtaacagtcttcattttaaaaaaggtcatgtacccttattagaattttgtgagcaaacaaatatgtgtgtatcgtatgtatgtttatatgtatatcagatgtacgcacattagtatgtgctattaagatactttatattatataatatatactgtataataccgtatattataaagcattcataaaatgaaaatgaagatgaaataaattgcattgtaaatatttaaaactttaaaaaatgcgttactggtacaaaatttttttgtttctaaaaaattattattaatgagcaatgggactgaatttgcttcaccgtttttttaaaatcttgatttaacatttgtcatacagctattttaacatcttacactaaagttgattcttgttttttggagacagagtttcgctcttgttgcccaggctagagtgcagtggcgtgatatcggctcactgcaacttccatctcctgggttcaagtgattctcctgcctcagcctcccaagtagccaggattacaggcttgcgccaccatgcccggctaatttttgtattgttagtagagatggggttttgccgtgttagccaggctggacttgaactcgtgacctcaggtgatccacccgtcttggcctcccaaagtgctgggattacaggtgtgagccaccacgcccagcctagtttattcttttaatagtgcttgggggaggtagcctctaagatgacccccagtgattccccacctcctggtattcctggctcttttgcaaatgtcaattctaatttggtcctaaggtctctctcttgagagtggctatagattctagccctgcccaggaaaataggtttgaatgcattggtcaggtgagacacagagcagcacagcaagacacatgaaatagcagaagtatttttattacttactgatcccagagaggagagagagagaatcctgggccaaaacctttattgggagtccagggagtttcccaagtgggtttcctagggctattatgttaccgaagccaatagttctaattgatgggtttaaagggagcaggcacaagctttgtgggggtcacgctgtgattgagacatggtcactgtagcatattcatctagtacttgtggggtcggggaacaagaggggtgagccacataggccctatgtagctgtcctgtaaagaggtaggggaggtggccatcaagaggcatggtgttaggcagatgtctggagtggccacattgagggattggaagcgggtgtgtttctatgctcccttaaggatatttttggaaacaacatgcttgctgcatacaaatattcaaacattttatctttaaaacaaattttagtactggtaacatttattaacttttttttttttcctgttccctaatttgctacccagcttttacatcaaagctcctatcacaacccttcttgtttttttctttttttccctgagacggactcgctctctttcgctaggctggggtgcagtggccacaatctcggctcactgcaacctctgcctcccgggttcaagagattctcctgcctcagcctcccgagtaactgggactacaggcgcatgccaccatgcccagctaatttttgtatttttagtagagatggggtttcaccgtgttggccaggatggtctcgatctcttgacctcgtgatccacccgcctcggcctcccaaagtgctgggattacaggggtgagccaccacgcctggccccttcttgtttttgtagcttgtcacatgatgaatgctttttaccctgggggagaccaagactttgagtaatagtttgcttttataagccagaatttgttctacacatagaaggataaaactgtcttttctggccaggcgcagtggctcacgcctgtaatcccagcattttggggggccgaggcaggcggatcacgaggtcaggagatcgagaccatcctggctaatgtgatgaaatgccatctctactaaaaatacaaaaaaaaaaattagccgagcgtagtggtgggcgcctgtagttccagctactggggaggctgaggcaggagaatggcgtgaacccaggaggcggagcttgcagtgagccaagatcgcaccactgcactccagcctgggcgacagagtgagactccgtctcaaaaaaaaaaaaaaaaacaaaactatcttttctctctggtttctttgctgttccttttcaggagagaaattacaataggattggtggcctaatgatgtaagtgccaaagtttcattcgaggttttggggtagaatgtttttcaactgtttgcttttatctgagacaaagtgggcaaggaataaaggtagagtggtgagaagggtgttatcccttcctgggaacctttttttttttttttttgaggggggcagagttttgctcttgttgcccaggctggagggcaatggtgtgatctcggcttactgcaacctccacctcctgggttcaagcgattctcctgcttcagcctccctagtagctgggattacaggcatgcgccgccacacctggctaattttgtatttttagtagagacaggatttctccatgttggtcaagctagtcttgaactcccgacctcaggtgatctgcctgccttagcctcccaaagtgctgggattacaggcgtgagtcactgtgcccagccctgggaaccttttaattgtcaactgtgtaggtgttcatgctggcctgcataatagagcgcctgctgtttgattttcagttttctgtagaaggaaaaaaaaaaatcaaaccaacaatagcaaaactcatgatacctcctggtctctctctccctctcctctgcttgcatattctggtctataacaggaaatggaacctcctggagtgaggggaaaatgaccttcacatttaggtttctcactctaaagttatttcttaaatattttagcctgagttcttttaataacagacctcagctctagttctttgaaatgcatgtgggaaaatgtttatcagtgttgaaatctgacatttttttaatctcatgaactccacaattgtctgattattaaagtcctgcttacttgactgtgactaaaattctactttcagaagagtagaatgtacccctaccaaattgaagatcaaataaataaagtggacctggaaaagtaaggcttgccattgtgtgtcaaaccagcccttcccagctgtgggctttgtacttaacggactcagaacgtgaatggaagtacagactctggaacatgtaggagctgttatcccttgccagtttcatgcttcactgtccatctcctggccaaatagagagacaagggtgacattaaaatcatgggtttatctgaattcaaatctcagctgctcacttactaacagtatgaccgcagacaccagcaaaacgtcccactgctgcttatttccaagcctttccaaggtcttctggtcagggcagattcttctttcttgttcctaaatttaaagtttcaagaatttaatgcgtttttttttttttaatgaatttaatgccttttggggggtaggttttcctaatttaactttatttttttaaattttatttttaaattagtgaacagtaaaattgactttttcaatgtatggttttatgaattttaagacatttatagatttgtataactaccatcgccaccacaggacataaaatatttccataatcccaataactttcttcgtgctattctgctctcctgcctcctggcaaccactgatctgttctcatcactattgttttgtccttttgagactgtcacagaaatggaagcatctagtatgtaaccttttgagattggcttctttcactgagcgtaatgcctttgagatccatctaaatgttgcatgtgacaacagtttgttccttttca

SEQ ID NO: 790 - DNA, 32744 bp, Homo sapiens
  source 1..32744: mol_type = other DNA
actccatgccgggtctctagttccagcgcgcctcggctcgctcgcgcggcgggagagttggcgcaaacctcgcggcagccgcagcctcctcgcgcgcctctccttcccctacgccctccgctcccgccatggggccaacgtggggctcctaagagttgccggctctcagcggcgcaatctccagccaaagtcaccgcgggcggactatggcttagggcgccagaggggttagaggtacgggaagaggaaaagacggctaactgggaaaaaaagagaaaacgaaagaaaagccaaacgatgagtttccacaaggaggacggagtgaacagtctgtgccagaaggctctgcacatcgtcaccgagctgtgcttcgccggccaggtggagtgggagaagtgctcgggcatcttccctcgggacaggggcagccagggcggaagcagcacaggtaaccgggagggctccgctcgcgtcctcgcgctccgctgggaccccgcgcgctaggctgcaagctccggggttctgcgcctcccgcgccgctcccgcggcatatttggggcgccacgctttcctacctcgctccttccttcgctcagctcctgacgacttcgagggtggggcgtttgggttttgtttcctcctgtccacctgccgggcttctcccattctctggtccgcttcccgcctcccggcgccgtctcccgctcccagcctcgccgcgcctctccgcgttctcccacgcctcccatctccctcccggagtggagaagtgagtgcgggcggtgacggcgccgggacggctcgcggcttggctgcttgtgggggcggctcacctgtgggactagggctgctctcgctcgttccaccggccgctggtcccggccttgttgatgggggccaggcgggacggacaagccatgcttggacgcagaactcccttgcagaggtggctgccttggcctccgaggtaacccgcggctgcaacctgtcgggcacctgacaatttctaaagcccttttaatatatatgattttctagggtttcatgacaaagttggtaaaacaaggattattgatcccatttgtgaggcgacacctaaagctcagagcacatatcgaagaagtggaagagaggggagacgtttaaaatccctagcacacgcacgctctcagacatccaactcacagacgtcctccctacccttcaggaaactaggaaatgggctggatgcaggaggatatcgaccgtcggaaatctggagatggaaaaaagtctcaagtggattttcctcaaggcttgggggtggaaaggatcgaatccaagccactgtttgggtcacggttggggaaaaggttggtgtgtccagcctgctgtgctcctcgggcgcacgcgaggtggatccccgagttgcgggctgcgtggtttcaagagccgcttgagagggtcacttgttgcactaggagtcaaaaaacactgctttggggattttcgactggaaggttgccattccttctctaggttctttccctttgcttttcctgtcattttgatctcctggcgggattttaagagttgaaggtagtcagggcaacaagagctggacagccaagctcaggacaacatggagccctgcgtgctgggagggagcaaagcggggcacacttagtgaatcctctccaccaccacccctgcgtcaaagccaagcggggagtgggaatgggtttagtttagcttttacattccatcgttcacatgggtagctgcagggtttggtattctctgatccacggcaacgtgagccaagggggctctgtctgcacttggcagagcttgaagatatgccgctgcttggaccctggatagggaaactttaaaattttctcagtgtataaacacaactgagaatcatttccattcgttcagtaggtgttaaattcctaggagtgtatgaaactcagtggaaggcactgtgtgagcatgttgtattctgtgtcgtgcgtatcgttgctaagtatgaggtaaagaccagaatagtgtgacctcagagtcctctgtggtgatattagataagcttttctgaaacgtctttagtgacccacttgctaaaggtaacactcagagaaggggctacactggacgaaatgagagtatttaagtttgaagattgtgctttggtaattgaacagttgatgctgtaaataaaactactgattttcctctttcctgcccttttgtgatcacacaccaaatagtggtttcccgggtctcagactggctggtaatgaggaaaatatgtggaagttagaaaccaaatcccagctctgaaatctgtccaaaatgcacaactgtatcagcttcagataaactatagtatatgaattatagaaatagttctcagtttttcctaatcactgcaagaagtagttgtagtctgaattccttttgaacttttccccttgggaataaaaagtgagaaaaattagtctaaaacaattgcaagaatattttcctccccttaagaggcaaaatagactacataatatatacaagtggggtattcgatttataatataggaacacacatatttattggctattactaggaaagatattctactaagttgtgtatgacatataaagacaagattgctatacgtttttcatttgcgaatccaagcaacagttagaagtaaaatactttaatctgcaaatagacactcaaagttaatagatatctatgaagtggatttaaagattgtttgccaaatatttaattatatttcttagccacccagcgtcacactgttctttaaagtagattttcttataacttgtgctctcatgcttgttattataggttcctaaataaagcacttccagtgatccttctactcatcgtttaatgagaaggccatttttggtaggaagacatcaacaatgttgaatggcacagtgcttatttactttgaaagttaatcagcactgcccagatggtattggttgttctaacattacagtgataattacaagctccaaaattgtgtatatttttaattccttcacatagagatagtgggagagaaattcaggtaattccagttaaaatcattctacatgaagggagctacaaatcatgtatatatgtaagatattatcttacgggttttgcaaatgccagtgaagtgcaagtatcaccattatttttaccatatcagcagtagcagaagcagcagcagtattgttgccattgaggatctcacagtcacaatatgatcacaacatgactgatctcatactttaataaaattggtgaagacttacactaaagttgccaacacaagttcatttactcttttggcgtagtttatcggagtcattatatgtgccagcattactaatattctagaaagttcaccacgtgcactttttagaatatcagatattttgagtctttttaccatggattctctctttctcccgaaatagatatgtcacccactaaattaatctcaatgcacaatatgatttaatattagaatgcttagggaaaatacaaagcaacatattggacccaaaagttatttttcaggcatactgtgactgaatatatataatcgtttttaaactggatttagcttaatttctgattactccttaattgctgctcaaatgctcatcaatttcaaggaacctatgttgcttaaaaggcagacgtcataaatcacagctaatcaatcccacttaagctcacagtcacttgagctcacatcacaattgtatagctctaagcttaatttaaagattttcataagcatttcattcatcaatgttctaattttgcatgtttacacaattttaatttgggactaaaaattctaaaataaaaatttagacaaattcttctaaattcatacatatgttcttcagtttcttagaggtagggataaaagtaggtatatgggaaataattttattaaagtacttaactgacaagaaaagggatagttaagtaaaattataagaattacatcataatttccctctaagatcaaggcatagtgggtctatgataaaggtttaaaattagtagagggacttcatagtagagggacaaagcaaatgactacccaattaattgagttatcattttttaatcaccataacagggttttacacatcctagtgattgtataaagaattccaattcacaaacatattatcagtagaattttttccttgagacttgtaggtctataaaagaataatggagccacagtgaattcagaatgataggcctgtttgaagaagaatatataagaggatatttttccttcctccacattgtcactccactgaagagtggccaacttctactatgtctagtctcattgtcacatgatcatcaatacaccttgtgcttggtctgatttacttcaaatgcaaatggagacctatcttcaaagccaagaagatctcagcaaacatttattcttcttaaatcccagtatgttagcagtattggcaggaatttctttttgctttaaccttttctttttcctttgtgacaaattaaaagctgtatttcctttttctatgaactgtgagtctctgacatctaattcttatgaatgattttgtataccaagctcaaatcacatttttaaaaaaacagtcattactgtaatactggctttttgaaaaaattggtaattgtttgagatgcatctgcattcatttacaagcttttttaaatacaaaattctggcagaagacaatcattaccataaatgtttaatgtaatttccaatgccaatgaaaatcatttctattttgaacatgtgattatattcttcccaatctacattttattccactaacgttgtacacattaagtcaatagcatgtcagctctttgaggtcaggggcttgtttattgttttatcttcagtgccttgaaaaatctgtggttcatactagctactttatttatttactatttttattttatttttttgagatggaggttcactgttgttgcccaggctggagtgcaatggcgggatctcagctcatcacaacctccgcctcccaagttcaagcgattctcctgcctcagcctcccaagtagctgggattacaggcatgtgccaccacgcccagctaattttgtatttttagtagagtcgggggttttctccatgttggccgggctggtctccaactcccgacctcaggtgatccgcccacttctgcatcccaaagtgctgagattacaggcgtgagctactgcacctggcccaattaatattttttaaatgaatgaatgaatcaagggatttattatcaagaagcttcaactttattatttgtaagataatgagtcttacttaataacctccaaatctcttctgcaactaaattgtatacatctgtatttttgtgtcaccagtatctaatacaatatcctatatagacatacaaaatatctagtttatgataatagcagaaattagagcacttacaacattaaaaagctagaattcagtcagcaatatactcatgaaaaagcaactgaacttgatataggtatccattgattttcttcagagtgtgttcaactggatctgtaattccatggctaaatttgtaagtgttgcataaagcactgagtctacaagttctagaatctctgttcaatatattcatgtatggcagtaaaaggaaagcatgttagtgtgctaagtagaaagtggcaggagaaaagtaactatctcatgattcaaattgctgttaatcattccagttgaaagtaggaatcatcactttgcagatgtgaaaactaaggcaaagaaatttaacctcccttcaaatcatcactagttagtgatggagataggctaagaaaccagggcttcttagattttagcctaggtttaacaaagagtaggaataggaagaggagattctgggggcgtccttggcgctgaagggcattggaaaaaatgtctgtgaagataagctgttaatattattacattattggctataattactggccaataaaatttcttagtgtgcaattatgacccatatctcaaacctttctattagattttctatcatccaaatataacaagcagtgtttttcatttttcttacttgactatgcacacatgtgtacttcagtgtacacgagtaggtgtttacatattcttggccaaatataattgatttgtgtcaactgtaaaatcacataaaagatttttagtgtgtttgaaatgcacgactttgaacgcatataatcctaaatatagttcctttcatatgtttataaattagtctgtagtgaaaacagatattaaattaccagttacattgtttttgttaatttgtaattagaaaaaataattcattaaaatcttgtgtgctgtattttcctaccatattttggtcaagtgaagtaattaacagtgtatactattaaaattcagtactatgaggcattggagacaaaatgtgactgaaaaagagctgagagtcacccactcaaaaatctcagggcatcattagtatgaatctatcaaactgaaccttcagataaggagtgttattattataggtcttttgtctaactggcacaatgccaatttcctctgttggtggaatatctaacactgaccaagtttacaaacagaattcctgactaaagagatggcttcttttattattttatagggtaattttctttttcttcataatgttaaatacatcctaagtagtcactgaagctataagagctggcatcaacatgcctcacatagactattggggaaaaaaagtagaagctcttatgggtttattaccagaaattaataaaactctttacacgtttgtttctttatggaattgtgctgtaatgggcttggagccagaaggggggaatcatcctaaggggaatagaaaggaaccgatattaatgactttttttccttagatggaccttgatgtatgttatgatctactgtctaatttattattccattgttgactagataacatgacagtcaatttttaaaaccttgtaaatgtcaatttgtccataccacaatattgtcttaattaaacaaggactattgttttctcttcagtatttattaatattattcccttagtgatgttttagtagtcatggatttataggactaatggacaaaacaatattcagagcctataatttcaaatattttacaatataagctgttaatgtacctgagaagtggttttaacatcatgcttttattcaagcaatatttattgagcgcttactatgtgaaagccactgtgccaagcattaagtgtactagagccattaattaaatgtatgtgatgctatgtgtgatgttcaagttaatgtaaatatatgagtaatatacagtcaccaattataaataatttactcaattatgagcatatgtaaagctttttaataaatttagatatttgaataccatatttggtactacgttttatcaaatcgaagatgcctttgattataagatgcaccattattttatgtggcaccaagaaaggaaagagaatgttgccaaataaactatggcacaatgctttttaatcacatggaatttttattttatatgtatagaaatacttcttttaaaacttagacttttaaagaaatcttatatcactctgacacaaatataggaaggaaaacataaaagaaataggttaaagtaattttaaaactaaaattctgagtctgattcttctgagtggctttttgattcagaattaatgatgtccttgtttttccacacattatcatattctatgccataaaaagtgttaatgatgcattttttcttaacataattcataaaagatatacaggccaagggtactgtgctctaaagctaactgtgcaaatatgtgggatgttggcagtgtttctaaatacatctgactcaccaccttcaccacccatttccaaaaatttgacttataaggttgaaggatgtgcttcactattttcttcaatattctcttataagccacttggacttattctatgaattttgatgctgatgcttttgctttagcgcatacacaaataacaaaaattatgacacaattactgcttagctgttagctattgtaacaagccgtcaatactaagataacattctgatttcaaaaatgcaaaatgttttaaagtatgtattttataatggattaaatattaaattaaattaaataattacaattaatgtaattgttatcatttattgaaattcaagagaaaggcaaaggtcaataaatttaaaatggacattataagaggcaatgtgcaaggattgttgttgattgatgatattatgtattagatttatagatgagaaagtgactactagttgcttcccagtattcatctcccgcttctacttcacagcaataggatctcttatttttcttaagaatatggcagcataaaaaattttaaaagagcatttttcagtctctttccagtttggtatagccacatgactaagtcctgacccttgggaagttagcaatgatgtgcacaacttcaaatttgtacttttaaaatgaaatgacataccctcaccttccctttttccatcttcttcttccatccagctgcctgaaatatggacgtagtagcttgccatcttggacttcaaagagaagcaaagacctttgaatagtagagcaaaaatgtaaaacaaaccagaattccaggcaccttagagttgataaatctgccgtggcctgtttatgctgggacagtctcacttcacatgagagagaaataaactatcttgtttcagtcactattaatttggtcccttgttacagaaatcagaagcatgccctaattattataatggtaatatcagatgaatagtataaataaattaacttcaaagataatcccaaaatttcatctttgactaagagttgctgatttgagttttattccccctctttctctatgaaatggtgccataagcaaatatggactgtggtcaggcaacaacaggaagcaggaaagaaacaaagggcttggaataccgatgaactaaattatattaatttatgattaattattggaaatcacatttttgtacattttgtacattttgaaaaattaaaaatgaactagaattttaaaatttttaaaaagatacagatagacacagaggagaatatcaattcaagcagtagtaattgcatgatcatgcagaaattggaattgagaacaggacacttggcctgtgcttttctgcatgatcatgttagctgcatgggtagtaggtaattggacctagcagtatttataagtttcagtggacaagatcatgcaaatgttatggcctggttatacagactttagcaaagttctgctatgctaaaagtttctgacgaattcgcattttagaagttccctgtattttctgatgacagtgatctttttctcagtttttctgaactatgtcactttattttgggatattaaaacatgataaaagagtaaaatgtttctgactaaaattagttagagatatatagtcagacagaccgacagacatatagacagtggcagaataatgtttatgcatgtgtatgtaatcaaaccagagttcgagcaattttaaacctaattatctcagagcctaatctaatttctgtttatttcattagctcttaatctttccagatatgataggatgaatgctatgtaatggattctttttaattatccggagacagtgaaaattagagctagagagcctagtcatcaagtttgcccgttggaatgggtaacttgaaagcctgtgtagaaaagccaggacattcagattcatctccctggcctcccagtgattggccaccttcctccggtgatcttctctacttcaacttacctcttttcttttatgatcatactcaaacccttgtcattatggtgaacaatactaccatagcattgtaaatccaaatatttcgatccccaaccaaaatctcctatgagttcatctttctcatttagaaactccagtctattaactttttatttatctctgaattttctttcagtaagtatgacgtcatacttatgatgcatcattttatctgcccaatacactctctcctttgaggtctatcacattcttctggaaaaataaacaaaccaaaaaccttatgcatggatgcatttatttgtctctttgcccctacaccaaagctgctgaatatttagaagattttaaaaccaggcagactagtatcactttattggtctccaattttgaaagaaatgtatattctgaccaggcatctaatgttttcctattcaagtttctcctattctctatagttcttatttcaaacttttctcatgctcttcaaatatcccaaactattcccaaatattccaacataattgacagttaaccctaactcctcctttggagagaaaaatatagttataaacaagaattcacttgacttcctgcctcgagacctataaccttactggcatccagaactattctctttttcttacaaagaaagaagcaatccaattctttgatctttgcttcagatctcatccattgtcaccttttatgggacttcactgttaattattccgcttaattgcctatccattcttgtccactgattccttctcaccattctgaagcatgctgaagtattgcaaatcctaatgaaaacaccttcatcaactccacgtgctgctgtagttattgctccctctctcctccttccctaggtataatttcctgaaggaattatctactctcacagagtccatttccacactgccagtctttttttttttttttttctgaagcagagtctcactctgtcacccaggctggagtgcagtggcgcaacctcggctcactgcaagctccacgtcccgggctcacgccattctcctgcctcagcctcccaagtagctgggactacaggcacccgccaccacgcctggctaattttttgtatttttagtagagacggagtttcatcgctttagccaggatggtgtcgatcttctgacctcgtgatccgcccgtctcagcctcccaaagtgctgggattacaggcgggagccaccgcgcctggccgccagtcgtttcttaatccacagtaatctggttaacacaacatctgcttcactggtctcatagaattcactaaagatatacttgttaaagttaatggtcacttctcaactcttgttttaattgaacttattttaatgatttacactatcatttcttaaaatattctcccagcttctgtgaatacccattgacctgatttttttgcatatctttctttctccttttctccattcttctgtgcaggtttcttatgccttgaaactctctttaaatattgttgtactcaggattctgttgaggaacatttatcttctatggattcagatcccactatttaaggaagttaaattagttgcaatttatttaagttgcatttatgcatgaccaatagcctactcaaaatttctacttgcatgaccataagtacttcaaactcagtacgagcaaaactgagtcacattcttgtcctttttaatcttcactctccttcactagagctttgatgttctctggaatcttttctttcccatttcagcaaccctggttcagaaccactagtctctcacatggatagctcttgtaatctattaactagtgtttcctcttccagtcttgccttcacttctatcttctccttagtcaaaatgttagttctgaaatgcatattttcatttcaacaccttgatttaaaatgtttctgggattactcatttttctttgaattaaatcctaactcatagtgtacttcatgtcatagttaaatgaatcacaaacatgaaaaagtcatttaaaattttttgatgactttataaattctcctagatcctcacttaatcttttgataggttatttttcttttgttaaacaaggcttgttattgggagaaaaatatgtcatgaagagctacacattaagcacttgatttcatttttaatactattaatgattagtcataattgctatggcaagcaatgcaaaacataaataaaatacaataagcttgtttgcataattttcgttttatttttcaggataaaattctacttaatctaacttcttgcactgttttctattaagcagaattctctttctcccatgccttgtctctggatgcaaggagctacaacactgtaattatgatggaatcttgacccacccccatccttaagaaatgatacatcaatttctcccttctttgaggaaaaagcttgacatcttcaggaaacaaaaattttctgcttctctatattgtaaaatgtacagggtcaagttctatggagaatgcctgtgctagtcccatcggcccatttcctggttcatagatgacaccttcttgctatgccctcacatggtagaagggcgaaagagcacccttggcctactttataagaacactaatcctactcatgaagacttccctcatgacctaatgccctccctagaagtcccacctcctaataccatggccttggggattaggatgtcagcatatgaattttgggagtgatacaaaaattcaggccatagcacaattcattaattaatttaggacttaagaaattaagagaaattagaaacaaaaataatacaaaattatcagaaagaatctatggaggttgaaaaatgtaactaatagtgtctcattctctattagtaatgtgttattctcatttatactgttgaaaaccgtttacagaaatatttaatatgattctctgcctagagaatgagaagcttgcatctttagatcaaagatgaagcaaacaagagtttcctattgtgtgcagttttagaatttcttgcctcatggcttcatggcaggttgcagtttttcaatccttgtttgcaaaatcttgaacccatcatagtgtacttggaaataatatgcatacatcgtaattttcctgtatataattagaatttttactggggtagaacttttcaagtacctcctttgagaatttccaggaatgattattaaccttttcttcctacaaagataacttaaaattgagtttttgaaattctgaatcaggaaataataacaattatgatgtaaaatattctttccatttctgcttttttatgtacaatattaattaatcatttttacattgtaatttttccagatatttcagtcagcctgttagctgtcgttgtcagcttttgtggactggccttgttggttgtctcactttttgtcttctggaagctgtgttggccatgctggaaaagcaaacctgtgacttccaacatcactacgcttccacagagcatttcaagtgctcctactgaagtttttgagactgaagagaaaaaagaaattaaggaaaatgaaaagccagccgtaaaagctattgagcctgcaataaaaatcagccacacttcccctgacatcccagcagaagtccaaactgctttaaaagaacatttaattaaacatgcacgtgtgcaaagacaaattactgagcctacgtcatcaacccggtaaggaaagattaaatatataaaactggtgtgtgtgcgtgtgtgtgtgtgtgtgtgtgtgtgtgtgtgtgtgtgaaatttcataagagagaaaaactttagttgggagaaaagagaaacaggagaaatgggaaagacataggaaatagataattaaataaagagagaaagggtaggacagagtacataggggcagagagagagaaactaaggacaaagaagccaaatagggagcaggaccatgaaaggggcttagcagaatgtgaggtctcagtaaaatcgtgtaactacagattattattaaactctttccactgaaatatcattagttgatagctgctacttgtagtcttccaacttaatttgattcgaccaataaatattaagaaagccatttgaaatgcatatcgtggaggctctacacaatcagaaatcatctagaatttcacaatcacaactaacagattcatatttagtctgcaactgtttaacacatataccaaaaacatgaaacttcattttgtgtttgagctcatgtagaccagattcttacactgggcaaagtataagttccacaagaggccaaatatcatgggcatatggaggagtgtacattaaaaggaggaggaagaggacttccttaaggaaatacattttaactcagcctgggaaagtcaacaaaactttgttgaaaataattaaccgcagtatattctaattgtattaactgtaaaggaaaaaatgattcctataaagaggcatttttttctgctaagtagaggcatcagttcttaaaacaaatggcatgttagcaatttttctcgggttgccaaaagtagcaactagttttattctagggcagggtaaaatcaatggtctcttattgagaggtaactgctatttcctgcaaactgattgacttcctaatcttacctttttatctctctaaaccgaagacgcatccatgttttccaacatggtaatacttttaagggtttagaaatctatcaaattgaaaaactgggtcatattggttactagaattgaaaggctattcaatatgtattttgtgtaaatgggagaattatatctacaaataaatccacttcttacttaaatgtattccagagggataagtaagaataattattacctttgagataaggaactttgagataaggaggagggatggaagtgtctttttcatgttacacttttctaggctacttaaattttataactaaggaatgcctcatattttgtgtttattttgacaagttttcctgagcaatgacatttaggctcattttaaattttcttatttatgatctttatgtaatgtaactcaataaatatccatgttaatttttatatttattgaactatatatttattgaattatatatatttattgaactataaaataattgtccaataagccacttttttttacatgttttacaaataggggaaaaaatgtctttgggaggaacttccttttttccaagacattggtctcgctatacctataggggaaaactgctttaaaattacctcatgtatttacttgattatcactaccatcccggaaaactttggccacatatgatatcttatagccacgaagacttaagacactcagaaatttcaaggtaaaaatcttcaattaatctgcaaaacattttaagaatactaaccactgtgaatgtatattagcttagcattcagaatcattcaactctttagttgatatgtacagattatatgtggatactcaatgaagacaaattcaggtaatcaatgtttttttggaacctcagaaaaacaaaatactatctccaaaatattacctgttgagtatagagaccacttatttgattatccctagctagaggagaatgaaaacacgtgagcaaagacttctttttgctagctatgaatttctcagtaattatgtgaaattgaacaaatcagaaaaacataaaaatttcaaccttaaaatcataaaagttagattgtatatatctgatattttgtaagaggaaaaactgcaacacacattcagagttttgctagaacttttatatcaatcatttcacctgcctctgactttcattgtttatatgagtggttggggaaagaagaagaagaaaagaattttgagcacttgcaattttgtcactatgccaaggcacccttcctgataatccttcaccaacctgcatgaagtaagtattattaattatccccatgacatgtgagttaactgaaacccagagagatttaaaaatttgcctgaagtcatgcagctgggaagagtaagaattcaaatttatccagatggatgaacacatattaagcataaacgccaaagggatgtagttttcctgcaattaaatatgttggttacaaagtatgcttaggacaggtagtttgaaggctggagaataacagcatcttcctgttcatcatactcaattaaaaatctggaattgtatatgaatatcatgaatgactagagtcattatttgaacttgtttagccttgggatgaattccttgcagaaaacatgattatttctagttctcaaaacccttatctacattaattacttcatcatactagaaattacctttatagagagaggaagaggaaattgctgagttcattaggtagtccacatgaacacagagatcaagggtacattattataaatcaaattattctgctcaaatgccaacttttcactgagatgtagcaaaatcaaacctacatgcacaggcacgcacacacacacacataacacacacagatgcacacacacacacacacactgaatttaactttaatactttgtttcctcaccttattagtatgccccagctccagtctgttgggactcctttataatttggctcagacatcatagtctttcaagttttacttgtctctgtatttaaatagcatcctgatgggcctagaagttagcagcattgctggaaactcccacatttttcaagttatcatctcctttttcaagtacgtggacattttgccctatcagcctgccaggcaaccaaacaacccagctggcatttgtgtatttcttcattactaatattcttcaagtgtcatcttgattgattgtttattcatccaataaccttattcaacatatatttaatcctgggtatagtcaacgtatctttcactctttctactccaaaaactctaaggatctgtgacaatttctgtaaatttataatataatgtggagacaatacatgtaataccaatataaggaattacaagtgccagctatgtgatggagaatgtggaattcagaacattgagacattatttccagctaaggcatggagaagagccattaagccgagttgaaggaaactggaaattcagataagtggcaattgggagaggatgtgcattctagatggaaatattttatttgaaaaatcatggagtaggaaattttgctaagaaaacagcagataaggtactgtgatcaaaaaatagagtaaagtgaaggaataatggaagataaaatcagctgaaattgaagtatagtgaaaccttgaaatcatggccaacatgttcagagtctctcttgtcaaaaaaaaatatttgtagcagaggagttctgtgggtaagtgttatgttttaggataattcacttggcaacactttacaagacagactgtaggagaagacatctactttgtaatttttattatgttcaagtgtaataaaaatcaggaaatagaaaacaacaacaaaaagaaacatgaaaatgtgtaaaggaaaatctaagatcccttgtaaaaaaacattaagtggcacttcagtaattccatgtctagtccaaatcttttaaaagtcattaaagctgttatactatgattataccaagctaccattagcattttggttccatatacccccacatatagagttctatgctgctttcttaggcagaaaatcagccgtattcacttctatattgctttttttttaagtttttttttttaatactttaagttttgatgccttaacaaagcactgtaggaactcaaagtgaacttactgaattgaaagaatcaataaatgaattcaatgacctcatcttgtttatcttactgatcttccatggttgctcactagaagggcacttggtctttttaccatcctcctaaagatctgactctctttgcctctgtgcttttgttcatgctgctttccttgtgtggaataacaacctcgtttttatgtactacaagatctttaagaaaaatgcatctgagagtccactttctctgcccaattattaactattatcctttattatttaaagctgtaattacaatctagcaattattttctatcttaatattgagctccagctgtttccaaactagatgctaaattttcagcatctaagcgtgtgtaacccacttttatgccctcctattccaccactgtgtaggcacataagtgtcaattgaatgcttttgattgattgatcatcctccacttcattttgcctttttaaatacatcatctttaaaagccacacgagatgatgagtggtgagataacactgtgttcctattagaaagaggttaatgatagtattctcacagatgagtatgagaaccaattttctttgaatttattaatggcgtaaagacgaggtgaatagtaactggcaaaataatttgttgaggatgaggaattatatagatttatcacctttaggactctaagtacctattgaaaataattaggaactgtaatagcagaacaaattgaacatgaaacaaaaacaggaaaatgtacatgggaagaaatcactgacttatatgtgctgatgaatttacaatatttacaattagctatggttgattagaagcgtaatgcttaaaatcatcatgcatagtatccaaaagaacgcttaatgtgcattattataagaaaaattaagaattatgtaaaaatacataaaatgagactccatagttaactttactgtaagaatgtttttaaaaaattaaatttctctgaaaagatagcaaaaattgaaattatctatgctaaaacactgtaagaaatgaaaaatgggatattataaaaagggagagtttaaaagatatatggctagctagggtatcaaggagaaacacttgcccagatcaatggaaagacctgagatctgtctccctgaaatagaagttcataaaacatgctttgcaggaaattgaggtggttaaataattcccttcatgaaagaaatgtattaggtgtacacacttgcttcttttctgaaaagagatgactctttgaactaaggccagagtcacatccttacaaaatgattgaaatttgaagtttgttttctggtagttataaatattgtcttatacgcaaacactgatttggttcttttttgctgttgttgttgttgttttgatacagagtctcactctgttgcccaggcaggagtgcagtggcatgatcatacctctctgcagccttgagctcctaggttcaagcaatcctcctgcctcagcctcccaagttgccaggactacaggcacgcaccaccaggcccagctaattattttttatttttttttctagagatgaggtctcaaagtgttgcctaagctggtcttgaattcctggcctcaagcaatcctctcacctcagcctcctagtcttctacataatgtgaataaatgcttgggaagtttgattttattagtcacaggaatcttagggtaaattattttcatacaaactccagcagacattttcttagttcctagtaaatgtttatgatgaaatacattaaaagatgaataatactctctgccataataaagaccacaatttagaagaaagtcttggagagtgaaagacaaatctgaaaacaggtaatttcaatacactatttgcagtaaggtcgaggagatgtggagacacagatgaagtgtcatcaagagtggtacatgaacctggttgtagagctatcactatttttctccaaaacctagctgagctcaccaggaggtaagctcatgagagtcagaaacatattacaaagtaaggggaaggtataaaattgcacactgagcatagagatccagagctagaattatggtcacatgaccttctaggaatcaagtaatactaaaaaataagttcttggatttattattttgaccagttattattgagaattttttaatgtttaaggcttcagtctatatttacttcttttcttgtaatataatatgttctcagaacgttatctgtagatcagaagctatgaagaagtattttccaagctaattacttcatatacattcatttaaatatatgctagatcaaaagcaattgcttatcatctctttttatggtgtttatgtcatatttttttaaacatggagagaagtcaaggtaagtattttgagaataactgaattgcctccttagcacagtaggcagtatgttattctcataatctgaaggttttaagttcagaataactgaacatttatttcattaaatttattaaagaaccaattgcctgtaaattctttgaacagaataaaggtaaattactgaagggattttagctatctctttaaataattgagaagaaaaccagttgtttctctagcttttattattattattcaattgctatttagtcacatggctaaatttttcagagaaaatattttctttattcaacaatatttattgaacacttatgtcatagacatttttcttgaaatttgatacacatttggcacaaaactgtcaaaagtccccccacacacacacattcttataagttatatgatgtattacaaggtaataagtcctacagaaaataatagcacaaaataaagggattggaaagtctgaatgggaggcagtgttgtaattttaaacattgtagccaggacagatcttgctgagaaggtaaattgtgcaaagactcaaaagtggtagagaggtgggccttgaggagtctgggagggctttttatgtagaggaggcaggcactgcaaaggccctgaagctagaacccgtgctacatgttcccaccaagagaaatccaggagaaaaagcagaggtagagggggctacattatttttgacttttactctgagtaatatgggaagccactagagggttttaagtcaaaagagtagcatgacctgtttttaaaagatgattctgcctgctgtattgaaaatagacattgaggaaggcacatggatagaagcagaaagtccactaaggaagctctaatccaggccagaggtgatggtgtttcagaccagggaagtggtagttaataatgttcatgagaactgactggatatattttgagggtgtaagaaacagaccatcctgatagatgagctggggcatgtgagtgaaataagaagagtcaaaaatgacttgaagattttggaccgagcgtctgggaaaatcaagttgagacagatgagactgtgaatggagtgagttagagaggcaagaagaggagatccggacctgtggtatttaaagattctgttagaaatctaagtggacaagttcagtgggcaaccaggtaatgactctggaactctgaagtgaatctgtgatacatatataaatttgggatcctcagcatgtagattatgtcctaagcgaggagatgatatcatcaaatagttgagagtagatgggaaaaagaagaaaaaggataaatttctgagcgttgagaggttaggaacagccaagtggactgagaagtagaggctagtaaagtaggagggaagctgggagggcggaacctggaagccaagtgaggagagtaagtaagctcccaggagagagtagctgtcagaggagtgtgctaagcccgggtgggatgaggattgtgaatggacctgtttgaatttagcaatgttggggagacattgttcacattttcaagagcgattgtggtacagtatatgaaaagctgattagagtaagtttaaatagaatttgaacagtgaatatactgtcctcaactctttcaaagagttttgctgcaaatatgttagagaaacagagcagcaaagagaaagtagggtgaatagcaagttcttttaactttacatcccaactcagacaacccttccaactcaccaaaacctccaatccattgattctgtcactatgtcataattcctatatctttgatattattttttttccttcttagtttcaattccatggtcaatcagagccactctcttgtgtacaccctcaattctcttgttgctttttatttttgtatttgcagggcaaaaccacagccctagctgaattcattgctctgtcatctctacacttgcacatgtgcaaatgagtatgactggaaaaaatataaacaactctcatggatccacttgaaattcatgaccacattcctcatttagctagctaatgctgcacagcaatctgttttccctctcaatcttttgagagtcacaagactattgtgttgatacattttctgttgctcatagcagaataccagaagctggatcatttataaagaaaatgaatttatttcttacagttagaaaagctttgaagtcccttgttgaggggccacatctggcaagggtcttcttgccggtgaggactctgcagagtcccaaggtggtgcagaccatctcaaggcaaaggggcagagtatgctaatatgctagctcagctctctcttcctcttcttataaagccagcagctccactcccgagatcatccacaaatctattaactcattaatccattgattcatgaatggatttaatccattcatgaggcagagcccttatgccctagtcatatcttacagtacaggctctgcctctcaatactgccacatcagggattaagtttcaatgtgagttttagaggggacattcaaaccacaccattttataccttctcacttttttcaaacttctatcaccttcttcctcttctcagttttaattaattaccttacttcccattttactaagaaaattgaagcaaatggcagaaaccttccacaggctcccaccacatcatcaaccctcttaccaggatctatcccatatacttgccttcctgatggatagtacattaactatcaatgctcctatctataacgaatccctccactttcaggttagatcccattttacctcctgtcacttctaagaatcctcctctctgatgcttgcattattatttctccctctctattttattagtatcctcagcacaagagcatgccattatttcttctatcttaaaggaacctgaaaaggtaggaagtgttgatgagagggaagcatgcctgaaattgtggttgtgaagagcttgctgttgatgatgacaaaatctggctatttacatgatagtgactgaggttaagtagagaacatcattggaagagaggagttcattgaacctagaggccaaagggttggaagaaacacttagattgtcggaattcgagcagaaacgttgtaaaagagaatgttcatgaaccagaagactaagataatgaagactttatagaaagggttttcaatatcaatagatcactaacagtaagtggtaatggaagtgtgatttcttgacttgagcttcagagatgggtgtggtagcttaaaagagaatggtgtgggccgggcgtggtggctcacacttgtaatcccagcactttgggaggctgaggtgggtggattgcctaaggtcaggatttggaggccagtttggccaacataatgaaaccccgtctctactaaaaatacaaaaaaatcagcggggcgtggtggcacactcctgttatcccagctactcgggaagctgaggcaagggaattgcttgaaccagggaggaggaggttgctgtaagctgagatcacaccactgcactccagcctgggtgacagagtgagactctgtctcaacaacaacaaataaaagagaatggtgtgaagtggtaatgggggtcaagaggaaactgttacttcactggcaagctggtggaataagggccatggggaaataacagccaccatgtgagaggaacacatacgaaatgatgtccttggggaagagccagatttctaccaggtaataaggtgagaaacattctaaaaagggattaaggatatagaggtcaatggattattttaaaaaatccactgtggcattttatacagtttactctccctatagttttttgcatggtatatgctcagatatttgtgtaatgaatcactcttgtctttgtttcaaattgaacgggagaaaataggaaacagaataaaaactttgtttaccagaaacttgatttcgtcttgctattcaagcctctttatgaaatggtgatctaactgaatatatgatgagagtttctgatgcagattttaatattaaaatagagataaatttcttttaaacatttaattattaaatagaaagctgctaaagatatttttacttttcttctgtgatttcttaagcaatatctaaggttaatttaatagatagtaaagacattgcaaattaaagcaagaggatataggtttcccattagatgctgagatgtgaagtcagggggtctttttagaccagggaggtggtccacgacatgctcacatagaaatgactttgagctgtctctgcatccccaggaagcctagatttgagcttgtcaaaaccattatggcatatgtactttggcttcttgtatcctgaattataaaagtaataactaatgttaatatgaaaagtgataattgggaaagtcatatataatatatcatttaatctcaaaaactgtaaaagaaccattttataaatgagaaaaataaagttcaaacaagttaagtgatgtgcctaaatttgccctcactacatagggaagctagaaccaaactgtagcagactctagtccaacactttttccatgtcatctctttctttgtaaaagtctttaaacactttcttctgataggcgggaagaatttgctcgtattccagtgagtttccaggactctaaccacatgtcaaccagagcagctccgtctttacatagtcaacttctggcctcagattttattggaaggaaaggatctatttgtagtaaatatttgaaagtgaccatattaatacattatattccagtgccatcaactaatgttgactatatctagctaccctcagagttccaggttagatggggcaagtttttctttctctggtagagtgcttggacagtgctagatttgaagaataagatggtgatgttagggtgtcaattttagatcttccctgctttctcttgtgggcatttaatgctataaatttccttctacacactgctttcaatgtgtcccagagattctggtatgttgtggctttgttctcactggtttcaaagaacctctttatttctgccttcatttcattatgcacccagtagtcattcaggagcaggttgttcagattccatgtagttgagtgcttttgagtgagtttcttaatcctgagttctagtttgattgcactgtggtctgagagacagtttgtgataatttctgttcttttacatttgctgaggagtgcttccaactatgtggtcatttctggaataagtgcaatgtggtgctgagaagaatgtatattctgttgatttggggtggagagttctgtagatgtctattaggtccgcttggtgcagagctgagttcaattcctggatatccttgttaactttctgtctctttgatctgtctgatgttgacagtgcggtgtgaaagtctccaattattattgtgggggagtctaagtctctttgtatgtttctaaggacttactttatgaatctgggtgctcctgtattgggtgcatatatatttaggatagttagctcttcttgttgaattgatccctttaccattatgtaatggccttctttgtctcttttgatctttgttggtttaaagtctgttttatcagatactaggattgcaacccctgcctttttttgttttccatttgcttggtagatcttcctccatccctttactttgagcctatgtgtgtctctgcatgtgagatgggtttcctgaatacagcacactcatgggtcttgactctttatccaattagccagtctgtgtcttttaattggagcatttagcccatttacatttaagattaatattgttatgtgtgaatttgatcctgtcattatgatgttagctggttattttgctcgttagttgatgcagtttcttcctagccttgaaggtcttcacaatttggcatgtttttgcagtggctggtaccggttgttcctttccatgtttagtgcttccttcaggagctcttttaggacaggcctggtggtgacaaaatctctcagcatttacttgtctgtaaaggattttatttctccttcacttatgaagcttagtttggctggatatgaaattctgagttgaaaatacttttctttaagaatgttgaatattggcccccactctcttctggcttgtagagtttctgccgagagatccactgttagtctgatgggcttccctttgtgggtaacccaacctttctctctggctgcccttagcattttttccttcatttcaactttggtgaatctgacaattatgtgtcttggagttgctcttctcaaggagtatctttgtggcattctcagtatttcctgaatttgaatgttggcctgccttgctagattggggaagttctcctggataatatccagcagagtgttttccaacttggttccattctctccgtcactttcaggtacaccaatcagatgtagatttggtcttttcacatagtcccatatttcttggaggctttgttaatttctttttactcttttttctctaaacttctcttctcgcttcatttcattaatttgatcttcagtcactgataccctttcttccacttgatcaaatcagctactgaagcttgtgcatttgtcacgtagttctcgtgccgtggttttcagctccatcaggtcatttaaggacttctatacactggttattctagttagccattcgtctaatcttttttcaaggtttttagtttttttggatgggttcgaacttcctcctttagccaggagaagtttgatcgtctgaagccttcttctctcaattcatccaaatctttctccatccagctttgttctgctgctggcgaggagctgcattcctttggagcgggagaggtgctctgatttttagaattttcaggttttctgctctgttttttccccatctttgtggttttatctacctttggtctttgatgatggtgacgtacagatcgggttttggtgtggatgtcctttctgtttgttggttttccttctaacagtcagacccttagctgcaggttggtgcaaaagtaattgcggtttttaccattactttcaacagcaaaaaatacaattacttttgcaccaacctaatactaggtttcaaggataagaatggcgttagtaacagtcaaatgacttgcactgtgattggttggatatttgtgtgagactatatagccactaatcactgtcattctaaaagagaaaaaaaaaaagccagaagaaaaaaaatatctgtgttgtcatggcaatagtttaaacattgtaataattaaagcttgtcttaactgactagctaaactgtgacttagaatatgtgctatttaccctattattaggacactgacttactagaacaaaaatgttactacttttttattcttataaagggactttacagctgcaaaaatataatcagagtcataaagaagaaattactaattttggcacagaggatagaaaattgaagttttataatattgaaaagcacaagggagtgtgaaatgatggaataaatctataaaaaaataaagaattaacttcttaggggttttgctcccaaaaatcaaaagcttgttgcataactgaaagtgattttagcaagaatgttagattttctattcaataaaatatcctaaatatcttaagaatattgaatatgcaaactagattatactagacccttttaacatttcacagtaatatatactacttatattcctttttatattctttttattttcataaattccctctgacctttgctaaccctaatttaagctcctgatctttcatatctggggtagattcgaggtcaaaatacatttcatgtcatgcctaatgcattagagtggcatatatctgaagaaacaaatcacttcaagatttaagttagcaaagacttttttatgtgtatactcacttagatacagaaactaaaatattgagtcataaagccagtgtagtttcaattaggggccaattctctcacctgagataaagtagttctagtatgtttctctatatagtaacggtttttcaattatagtcaaattttaaaagtcatttttaatatatgatataccacaaatcgccttacaaattttactttgttgttattttcaaaatatgtcatttccaataaaatatatcataactataaactcgataagaattttgtacacaatggtctgatcataatttcatttacaaattaaacatttgtgctcccttccaatttttggtaacaagtcaaataagttaaaagcacctctaaaaacatatcaagctatcttaaccaaataaacttgagatcttagtggattacataattatgttatatataatatttaagtggaaaacatataaaagcatataaaatgatactttaatattttatatggttatttagtagaataattgatttttgaagtaatttaatcaaataggataaccattaatatgacagtatatatagcatggtggttaagggtgtggccactagacccagactgcctcagtgaaattttaattttagcacctgcttaccagcaagactttgaatgcattactcacttctctgtgcctcagtgtcctcatttgggaacataatagtaagtacctgattgggttacatgaggctcagttgaattgataaagaatttatacccatacctgcaacatcgtaagtactcctatgttagcttttactggcaacatctgaagagcaaaggcatcctaactttttattgtgaaaatgttttagtgtatatttctgtattttttcccatcttttattattattttttattttcttccaaattgtatttgacattatttttttcatattctaattcttggcatactttagcactaatctgatattagaatatcatttttccatagactttctccttttatccatataattctctgtgacagcacactaaagcttctcattctttgggtgaagctgagcagaatgtggaggacgagatctttcaaaaacactgcagtttactttcacctgtgacacccttccaccactttactagtttgaatctttaatttgcaatatatgtattgaacgataggtcctttaaacaaatgtctgagaagtctgtgaatagtacagtagaaacaagcagagctactgatactctcacagctcatttcagtttgtcttccttatctgtatgaaaggggaccatagagagaggttgaattagtttcaatacagccctaagcacttcttatggtgttttttgaattactgctcaacagttcagtccagttaaagtaaataagcaaattaaacgtaagagaatgaacttggcaacaccttagattataattctgattttaacaaattccattctattaatgcacataatattgatactgcgttgtaaacatttaggcccgtaaaattactgaaggactatagaatgaaagagaatcacagaataaacttaaggttagagaacacttaatgtttcctgcctcaagtgagatgctagacttgccaaaatcttatgtgaggcagaaatatttttcttcagcatctaacctttgttctacatttccagcttgaggaagttcactacttcactgtgttggatagctctagattattttaaacgttcctttatattaagctaaagtttatcttcctgcaccttccataaattcctaaatgctgtcatgacagtccttcgggcattagaagacagctagccttaatccatctttaccctattcttcaacttctcctttctaggttcaacatcctcagctcctgtcactacttctcaaatggtattgtggccaggcatctcacttatggatggtcactaatttgtaaactcttctttgagatcaggagatcgagaccatcctggctaacatggtgaaaccccagtctctactaaaaataccaaaaaattagccgggcgtggtagggggcgcctgtagtcccagctactcggaagactgagggaggagaatggcatgaacctgggaggcggagctcgcagtgagccgagatcacgccactgcactccagcctgggcggcagagtgagactccgtctcaaaaaaaaaaaaagaaaagaaatcaatgttctcacgcctgtaatcccagcactttgggaggtggaggtgggcaaatcacttaaggtcaggagtttgagaccagcctggccaacatggtgaaaccccatctctaccaaaaatacaaaaattagccaggtgcggtggtgggagcctctaatctcagctacttgggagcctgaggcaggagaatcgcctcaacctgggaggttgaggttgcagtaagccaagattgtgtcactgcactccagcctgggtgacagagtgagaacccatttcgaaaaaaaagaaatcgagcttcatgtgtgcatcagtgaatcaaatattaatcatgcaatgtcatctatattacttagtgctgtaacaggtgtagacctgctgcaatagacaacagaagtgaataaagtattttgaaatgagtgttctgagggtgcactgactgggtattaagtataagacagagctggaaggaaaaaaaaaagccagctgaaggtgactagagaaagcaaaatatatggagataaggatctggactccacagcaatggaaaaggagtggaatgaacaactatatgagatgtttcaaaggaaaagcaacaggatttagaaaactgagtaaatcctatgggtaaagggagaatgattcaaagcatacttcattcttggaagcatgagtgactgataaaaaatattagtgctattgtcagagattgtgggataaagaaccgatttgcaagcaaaagggagaaaatgatgagtttggttgcatttggggagaaatgaagacatctgtttagaaatcttccttagaaatttagagatacgggactagaagtttatgtagctgggatttatctgagaaaccatcagattcaagacaataattatagtccaagaactgatgattagtctgatgaacagactgacaagaaatataacaaaagacgtgggactaagctttgaggagatgggtagtttggcacagttcgtgccagaaagcatggagtaagtataaaagcagcagatctttaatgcaagtcacatgtagaagacattagtaagcttatatatttaatattctggaaatgttgactagatgagtagtaatagtgactataggaaattcagtctgaatttttaaaaacttgttttgttgggctcaaattctaaaattctacgtttgtttttatccttagagtttctgaagaccacagcatgttgaaaaaaagaaaatgtactcatttttggctgccacaactatatattctttttaaaagtaaatatgtatttagttagattaagaattagaaacaactcattataagaaaatgtggacctataacatgtttttaattttaatactatagtcactaaaatgtgaaattcatgagactcaaatatccaggtgaaaagaaaccagccatctgaatgattttgtctgtataatacttacatctagatagacccagatgactgataacattcacaattttctgtggaatattgaatttttttgctaatcatgtttctttagaattgtttttaattatgtgcttatgattgagagtacaaaatttcaaaagcatatgaaaattaacattggccagccacgtgttgtggctcacttgtgttatctcggcactttgggagactgaggtgagaggattgcgtgagcccagaagttcaagaccagcctgggcaacatagcaagactctgtctctacaaaaaatttaaaaattaactgggcaggtgtggtggcacatgcctgtagtcccagctactcaggaggcggaggccagaggatggcttgagctcaggagttttaagctacagtgagctataatagcactaccgtactccagctagggtgacagaacaagatcctgtctcaaaaaacaaaaaacaaaacaaaacaaacaaacaaaaagaacatttaagtgtttcagatgttctggaattttaggagacttctctttgaatattgtacttctttattttttcaaaagtacctctttgattatatgtatgtgtctatctatgtagatatagatatcttttcactattctgggggtggggaagagtttatatgtcactgtataacattctcatcaaaatgatctccctcaatgattttgtgtatatgtgtgtgtgttcagccacagttccttccgaagacacctgccgaggcaaatgcaggtttccagtgttgattttagcatgggcacagaacctgttttacaacgaggagaaacaacaaccagcattgggaggataaagccagaactctacaaacagaaatcagttgactctgagggcaaccaaaacgaagatgtcaaaatctgtgggaaacttaactttaccctccagtatgattatgaaaatgaacttctagttgttaaaattatcaaagctttagatctccctgctaaagacttca

SEQ ID NO: 791 - DNA, 32742 bp, Homo sapiens
  source 1..32742: mol_type = other DNA
ggcaggcattcgaggcggacagaaacggggcttggcgccccccgcgtgcacgtgtgctagcccaggcaggagggagcgcctcggcggaggagtcaaggaagagggggagggagaaacgcgccagaacctcggcccgggcgccctcgtcggccgcggaggagctgcagcctccaacaggttcgtagaacgcgcgctcgctccctgtggctgagccgccctcctccgcgggagcggttggcggagagaccccggccacaggccccgcgctcgagagcttcctagaggcggcttcctccggcctctccccctccctggagctctcagccgccggcggctcttccggggcgaggcagagggcgcctcgggcttctcgctccagcaccatctcggggacagctcccgcgccgcaccgggtccctatcgggtcagcactgcagcggcggacagcggcggccgggcgggctcctccgcaccctccgccctggttccgcgcggctgctaaggaccgtccctcgcccccgcgggccgctcccaacgctagcaccgcggcggcggacagctctctccggcggcaccgcgaaccgcgaacaaagccgcgggtctggggcccccagcgcgcctaggggtggcgtgaggccgcatcgatcgggggatttcagcttctcccagagaggtgtcaccggcgagctaggcgggggcctagcacagccgcgcgtctccggcttgggtccgccgcccgccgaggcctggccgtgcaatggcggggcccagctaagagtgggcaagaggtagaggggaaacaggcacagaacggtcccggctccgctaggcgggctgggcctaggctgaggtcccggcggggaggaaggagtgcgccgccccgtcttccctccagacccccaccccatcccagctcagaatcgcggacttccaagagccctgcacagaagcccgcggctggcagctgcaatcactgactccggctgtccccggaacatccctagaaagtgtgaggctgagtttccgtagggggagggggctgagaagccgcggggaagcctcacgaacgggacagctccaggctccctctctccctcactccccgggttccgcccccacctccagagaaatcccagacggcagagaaggcaggggggagggggcgacccagacagcaggttgcgaactcggcttagacctgggaggttgcaattagcaagaaaaaaggttgagggcgtctgtgaagccgggaggttcccaaacagggaagccagttccgcggcaggaaagcatacgtggaagagaaaccttttctctgagagctgaggctgggagggccctcggatcacgtgacactctagatcactgattgtctccgcggaagacaaggcctagggggcaggggtgattcgcccaaggtcactcagcaatttagtagcaaagctgggcctaaaacccgggctctctaactcctgggcctgttgcataacattcatagagaagtcttttaaaatcccacatgcaaggagaatagcagagtggtttacttactagcatatgaccttgggcaagtgactgtctgagactatcttcagctattaaagaggaatgagaagatcaataatacccacttcgatgagaatttaatgagagagccatgtaatgagcttagtggcacatagtaaatgctcaaaaaatggtagatcccatgactgctatcatactttctgtaaacttgtactggggacctgttatataccaggcactggctgtgcactggggaggcagagaagtagcttgaggaggtcacaggccagaaaaggaaacaaacagttgcaatatgttatgataagtatcaaggcaactgggctgtgggatctcagaagcaggagtcacgaactgtaaggaaagaccaggaaaatgaccccaggcagacagagctgtgtgtcaaggccaagagatgtgaagtcccagccaccaaggcaatgtcactgtgccagagggtcctcaggatgtggactgaaagatgagagtggagagaaaggctggagccggtctccaaagagccttttatggatggaatccttcaaacatatttagaaaaatagaaagaatagtataataaccccccacatacccatcattcagcttcaacagttggccaattttgtttcatttatacccacacccactctcatcacacacacccacatccactctcatcacatgcgcacacactcacactgacttatttggaagcaaacccaagacatcacatcatttcatacagagggattttaacatcagtacaacttctgccatgcagatactggacagccttggaagtcactaactcaaatcatgacctttctacctcaattcattctgaacatttctgtcctttgcagaatgttttgagaagccacactatagtgatgagccacatgcattaaaagaaactgtttcagaaataaacaagggatgcatcaacactcaacaggttttaccatgccagaattgttcatgtccactacctacagtgggctttagaccaattactaaagacaaatcaaactctacagagaaaaagcaagagcttctctttcaaagtaatctgaatcgtgagttcctaaggctagaaagcttagcattatggaaatcattgatttggaaatcatcaagcccaatagccacattttacaaatgaggaagagggggtaaaaaatggggagaaaatggcccaaagttccatggtgcagagaccagaaccgagatctttgaactcataaacttaagatcccattttcttctctagctcaaagaggctggaaggtggaaaaggaaggggggcaagaaatacccttctttgttctcaagaagatggcaatgtatgacagttggtcttgatctttgagatccctttgcaaatttcatatatatatatatatatatatatatatatatatatagtaatcacagcttactgtatcctcaaactcctgggcttaaggggtcctccctcctcagcctcccaagtggttaggactacaggcatgcaccaccatgcccagctattttttttattttttttatttttattttttttgtagaaatggagtctcactatgttgcccaggctggtctcaaactcctgggctcaagtgatcctcttgtctcacctccctaaatgctgctgggattaaaggcatgaaccatcccacccagccccttccatatactttctaagtaacttgatcttggtggcaccttctttctggctgctgtgttaacctcccagctggccccttagttctcatgagcaaaaggctgcacagtcagaagcccagatctcatttttgtggatttttgccagccctgcttttcttaaccagatgcatatgaggccttccttttccgatttgccctgaatttggctgcacacctagctcacagacctcagctccttggaggtgctaaatgagtagtatttggctcaggctctggaaggactcagagctcttgtgccttttgagaacataaattctccccattactgatgaaatgtgatggccatgatgggtatgtgtgtcctgactgggctctggggctctgattctgccagtcaggctttccacttttcagggaagcccctgcctatcaaatggggagggcagtgtctcacaagtttccccaagtcgtaggtagaaaattcagagcacacgcaaagagctcttagcatccttggtgaagggaagtcagccattaaaagccaataagagccaataaaagtccccttgaacccaggaggcgaagggtgcagtgagctgagatcatgccactgcactccagcctgggcaacaaggcaagactctgtctccagaaaaaaaaaaaacaagtgccttgttctgggagtgtgattgcagtccagacatagacaagtgatcaagatagggcatcccagcttgtgaaattatcccagctatcagcttgggatgagactgacttagatgcagtatattacctgggcctagctgaactgcaatatgtaagatcccaaagggacttggtgagcatctcctcttccttcaagacgcttactcattgaatggctattctgtgtcgggcaccattccaagtgatggtgatacagcagaacaaggcatgctaatctctgttctcatggggcttacagacccacagtaggcacagtcattgataacaattgaaaagcaaatgtgaaaatagacagacagagaaggcctgtgtgaactagtgacatggaattgaggcctgaatgacaaaagtcagtcatgtgacaacgtggggcagcacactccaggcagaggaaatcgctctggcagaggccctaatgtgagcctggactgcatggggacagatgggaggtggagtgagtgaggggagagcagcagccgccaggggcagggagggggcagagaggagatcatgcaggcccttctaggccatggtcaggattgaggcttttattctaaatgtaatagatagtagccagatggctttaagcagaggagtgttaaaaaaaaaaaaaaactgggttttaaaaaaatgcctctgttgctgtgtggagagtggatgatatgggggtgctgggctgagcactgaggcaggaagggtgagacacagcctctcccacctggaggaggtcagcattcagctgaggagaccataggcaagcaagaacaacagtagcccacgctaagggctgccattgtgggaacagagacaagaagatttaagtcagcctgggaagcatctgggaaggcttcatggaggtgggcaatggatgtgggattgtatctgggaaaggagagtggtaaggctgctgcataggtggaccaaggggcagcgtgtggtagctgtggagggcatggcccaggagctaggctgcctgggttcaaatcccagccctgccattgagaagctgtgtgggtttaggcaagttgtttacccttgtgtgactcgatgtcctcattcttaaagtggagacgatgagagtccaaagacttatttcaagggatttctgtgagagttaaacaagttaaaatatgtgcagcactcagacattcctggcactcagaaagtgccgtatgagtacgagtattctaaataaaaacggagcaaaatggagatgggcgagccgggagcacatgccaagaagtgtccactagagcccggctcggggcctcgaatcccagaccagagatgcccaccttgctctgtaagcaatgggagccattgaagacttttaagcaggggggttcagagtagagaggaagataaaatccaaaggcccagagagggaagggaactaacccacagtcacacagccagttactggcaggagtctctgtcctccagctcctccactgagttaacatctgtaggagaacaaaggcagtatatattttgtcccatcattgcatcctcagagtctagaataatgcctagggtattctcagaaaatatttgtggggtacattgctgaattggtagccagttgggccaggaaacatcagaaaccttgaatcctctagaagctcagtgctttcaggacaatggtgaaaccagtctcaggaaaataaaccaaacttccagaggtgttgacgtggggtctcaagcccttccaaatcctaggttctcctgtgatcaaagacaccactgcccacactttccctgccgccccctcaatctgcaacaagcattgctgcatagggttcagaagttaatcttggtaaagtgcctggcagatgaaaactgttcctcagacattcagtgtggtaattgccaatgcggagaaaatgtatctccacgtttgcaagaggcaggcctttttgttccacaaaaaccagccattagaattcctgtctctgactcgtcggaagctgcgacagccaggagggcaagcagggtcttgcagttcaagcagcaaatggcaaaaggctccgaggaactcagccctggctctcacatcaggaacacctctgcagagtagggcatggggccaggtgcttctccaacaggagagagcctcagccctgacccttcctagctggacgatcttgagcaagtcccaccatctataaaatgggggtaataccgccagggcccactgggtcattttgcacaatgacaggcacataccagatgctcaacaaatgtgcttccttccttcctttctttttttttattttccttttttttttgagacagagtctcgctctgtcacccagactggagtgcagtgtcatgatcttggttcactgcaacatccacctcccaggttcaagcaattctcctgcctcagcctccagagtagctgggattacaggcacccgccatcacaccagactaatttttgtatttttagtagagacagggtttcaccgtgttggccaggttggtctcgaactcctgacctcaggtgatccgtttgctgggatccgaagtgctgggattacaggcatgagccacccagagtgctcggcccaaatgtgctttcaattgtgacaataacactgtgggttagggttatcatcccatttcccaaatgtgaaaactgaagcccaaggaatggctcattgattcgtcaatacccactgggcagctgtatgagccaataactgttttagaagctggagagacagggaagacgaagacaaggaccatgcctctatggagctcactttctactgggagacagaagccaggcaagtaaacaaaatcatttcaccaagtcatataaatactaggaagaaagtaaaagagaggagtgtgccgaggaggatgaggctgtttaaatcagggaaggcttcaaggaagaggcattgggactggcatctgaatgagaagctgcctatgggacaagcgtggaggcagaagaaacagaacatgcagaggtcctagggcaaaaacaaacctgacaagattgcaggatagaaaccaagtgagcaaggaggagagtcacagacggtgacagcggaaaggctgtaaggcttgggttaggcaggaccttgaaggctgagggagtctctttgggagacagaggggtggcgtgatctaaattgtgatgaagtcacttccctcagtcactcagccagtaaggggtggatggggtgaagcccatgtcagagtgatcccctgggccctccttcaggccacagtccctgctgccatctctagagcaggtcagccaaggggcaggccaagtgatgcatctgcaggactcacctgctgggaaataaatccattggcgctggcagccgtgtgggcgctgcagtgccttgcgggcagcatcctaatgccgggaggatgcagggggagggagacgacataaggccaccaggactggggtgaggccagtaagacacctgcctctggtgcacaatttaaggggatgctgaaaacttgattaagataaataactttttatgcaatttttttttaaattaatgcaaaaaaaccgtgatgaataaaatatcaaaattttaaatcaagacaggatacaaaagagcagggattagggtgaggaaggtgaaatgaattgtgcataagcaggacctaatcttggcccgaagacatttgcttaactgcagggacactgcctgggccaagcactgttcccactaggagccagtatcaagagccagtctgctcatggtgaaccaaaaataagaaactgttcctggtgggggccccagagaacactgcctgccttggctgtggagacagaagcccagagaaaggatcacacatcaaggaggtgatactgggcctgtaccctaaggtgctgtgtaggatcagacccaccccttgtatgctttgggagcctagtaaggtgcattgcctctccagcctcaatttccccatctgtgaatccagaactaataaaacttagtcaccaggattcagtagggtactggttaaagtcctctagcgcctggctactcaatgtgtggtccacggaccggcaacatcaacatcagctgggagtttattagaaatgcacgatctcagctgcatctcagaggcattgaatcagaacctgtgttttaacaagaccccccggtgattgacacaccccggtgattgacacacacgtttaagtctgaaagcctggtcaactcttggcacataaaagatgctcattaaatgttagtgctactcccctgactacccaaccctgttagattctgacttcagacaagaggaaaaacccaagacgtaagaagagatcctgaggtggacacctcatgcattttaaaccagcaagttttgaagcgagggaccctggccaagctctttctatacttaactgtatgagccctccattttgttcacatgtaaaatggggataataattataggtagcttctatggttgttgtaatattaggaaaacactcagcacaatgcttggcacatagtaagcattcggtaaactcttgctgctgtggccgctgctggtggtgggtcaatgaatttcaatagagcatagaccatgtgatgaaatgaaatcaataacattcatattaattattctttgccatttgtaaagcatttcagttgacgccatttcagccaaccctaataacccttttgagtaagcataagatatatccatttttcagagaaaaaaatctagactcagggatgaggtgacttgtccactaggatttaaatccctggagtctgacactaaaatctgtgtcagcaacagagaatccgagcaataagcatggaaaatataaaaaatgggatgagacagcattagactgcagagatccctttttgttttgcagaagggaaaacggacacctgtggaggggaagaaacgtgtccaagatcattcacacagagcgtcagctctggggtcagaacccagctcccaaggctttccgtgtccagaccacctccctcacctggttggccagcctccacctgatgagccgggcaggctgcaagtggcaagttccctgggtgggtctagtggtcagggggcatcccagccccacctttccttccagcacagtcagaggagctcacgttgccaaggggagggctgcgaggttgccaggacatggtctgcaagcagtcaggtggtaggggaagcctttgctggaactggcactaggagctgccacagcgattttctcgtggctgggagaggacctccaactccacagcatgggtcagctgatgagagggttgactgccacagacgcccatgtcaccgctacacacacacccaagccagcaggctgagtcccattctccctcagctccacacctcatcaagccctgagtcctgatagctactcctcctatctttgccaccccaagccactgccttagcacagttccctgtccacagcctgttaagagcaccccagattccccaccttcatgctccctttctcatccttgagcccctgaggtgcctggaaggatctagagcgcagagctgagccctgcaatggctccccatcaccctcaaggtgaagcccaagctcctctaaggccccttctaaactggctctgacaacccgccagtctttttttttttggccctgaggctccagccaagccaccttcctcccagttccctcagtaaaccatgcatcccccgtgtctttgcagatgctgttccttctgcctggaaagcccttcctgcctcactatccacttggcctctgcaaatccttagctccagactcaccttttcagagaagccctccagcttctctaaggtgatgaagagagaggcaccttagagaaacctgtgttagagggggtgacacactgtagcttaaggatctgctttcctgctcgtgtccccattcggctgtgaactttttttgtttttgagacagagtttcactcttgttgcccaggctggagtgcaatggtgccatcttggctcaccgcaacctctgcctcctgggttcaagtgattctcctgtctcagcctcccgagtagctgggattacaggcatgtgtcaccacgcccggttaattttgtattttttttttttttagtagagatggggtttctccatgttggtcaggttggtctcaaactccctacctcaggcgatccatcacctcagcctcccaaagtgctgggattacaggtgtgagccactgcgaccagcctcagctatgaagtttttatgtctcactcttagagtaagacaagagaccttggcagagtcattctcctacttagttactcacgggtttccactgtgcgagatcaaggcctctctgggcctccgtgccatcctctgtgtggtaggggttatgacattggccttgccaggctagcgggagtgttaaggattgtgactgtgggggtttggcacacagtaaatacactgaaggtggtggcattgctgttttgtttacaccaacaccaccagtgcccagcacagaggcacagaaaactcaccagcaagtgcgtgctcaacgggcccctcgcctgcacaggagaatgactagtgtgtgaaaaggctctgtaaggaatgacgctccattctaagtcataataattctagtagttcacgcttttgattctccctgcctcctagacccaagtcatcccaacatgtgttctgcccactcttcattcatggaacaaaagtttactaagcacatactatgtgccagatgacgcgctagctgtttgggactgagcagtaggtagacattaaacacagaattgtaccacctctccttctttccttcccttcttaaaggccagcctcctgtccctgcacacaggtggccccacctaaggacagggaagatgccatttgctcccaggtgctcgttccctgggcagacagcaggctgcagcccacaggcgcctaccctttctccctccccagcaagctggaaacaggaacatctgccctgtttttaatccagttgctagttttaaattcaaatattgtcagctccctgagagcagggatcatgcctgcccttttcactgcagttgtcaccagcatttagaacacagcctggcagagtcattcacccacttactcatcattcattcattcattcattcactcaacatatacttatcaagtcctgctaaatgccaggctctggggaaaccactgggctcggccccaagaagctcctattccagcaaaggaagaggggagggaagtgggggtctgaggattgtgttaggaggtaacggtgcctggagtgggctgatccctgtgggaatccctgattcactctatactgtctccctgatctgggccaaccgttcatgcctctcatccttagtcctcacctctgcaagtgagacaatagtatctgcttcctggagccactgagagcagggctatcgttactaaaagaagaggaaatagagagctgggggaggaggcgacaggttgtcctgggaggaggacattgcagccccttcagttgctggggccttggtgccccgcccagtgggggcctggctgcagcagagagcaagagctgcagagagaagagttccagctccacacctacccctgtgtgatcttaagcagaccatctccccctctccgcatcagtattttcatctatcaaatgaggatggaacatcgacctcactcatcctaaatatgtgataccaaatctagcaaacttgtcacgatgctcagtcaacaattatttactggcacctacaatctgcccggccccgtgcagagctctggaaacaaagtcatgtaacggccaacctttgccttttacggaatgcatggtgccccctagaatcaagcagaggaaggtaattaaaatttaaggagctatagtgtaaaaaaaaaatcttcacagacgtggtcttatttaacaacagcaatcataacaagcacttatatagcactgagtatatgaggccagtagtattaggcatcccattttacagatgaggacactgaggctcagagaggacatccccaaagctggaattcaaaaccagatatgattgatgataaatcctgtccctttacaccaatcagaaatcacatttaagtaagaaaagtatggtcaattgtactaccaccaaagtacggtcaatggtacagtgctacccgcaccagtgaacaagatgagtaactactatcagattgggtgaggtgggccaggagttgggtctgatgccaggcagggtcccatcccgcccagccctttgctggaatcaagagcagcagtggtggcctccggagaagtgagggcatgccttcactggggtctggggctccatgcccattcagcaagccaattccccaagaagctctctccttagccctcaacctcctctctcctcctccaggaaggtgtggtccctgccatgctatctgctctgctcagcgactgaaggtgcccgcatcccagctctgccaggaagcaaaggtaagggcactgctcagcactaaagccctggatagtgttcagggcatcccctcatccctggagccctgatgaagggggcacgtcttcccctctgtgattgccaagaacagtcctaagatggagtgagatggatcagttgggcagtgtgatggaatggtgtttaccttgcatgttcagagccgtttacaacagagaagcactttcttgtgcaatgccttattcagtgctccccaaaaaacctgaggtggatattattatccccagttacagatgagaaaactgaagctcagagagtgaaaggacttgcctaaagacacacagctggtaggtagctaaggctgaattccaagctttttcatgtccgtatcccaatggcctgtgcacattgtaggtgcttggtacatgtttgatgaatgaatgaatgaactgatgaactgcccaagatgaatggaaaggcagggctgggctggcacttggctctcttgtcactgtcagatcctgtgctttttctgctgagccacggcttcctgcactgatgagctcaacatcccccatgccaccccctccccagcccaggatcccaaccatcttatgggtggaggagtcaacctcagctcctcttccaggtggccggccaagctcggatcacacccggcatccctcatccacatcgcctcttccccaccacccacgaccagtaatccagtgtgcatagttgtaaacttgtttctttaaataaacagtcttgagtttcataccaaatagtctcttaagagaaggaacgtctccaggccacctcgtatttagcatacagtgagccacatatttgcacagagagagtgtatgtggatatagagatcgctcgatcgctatagatatcgttgctcatccagatgggagctatttatgatgctgagtcattcgcagagaatgccactgaggaattccaggctgggctccgagccccagcatcacagacctcatggctctctgccttgtcttcactgttcacaaatgagaggtgggaggggggcctcccatcacagggcagggacagaagggaacattttggccacaggaaatgaagatttcctcataactagttcctactgtaagtcattctcctccatccagagccttgcacccttagggatcatcttgtccaattccttcattgtgtaggagagaaaactgagacccagagtggggagggactggcccagtgtcacacagagagtcggggacagagctggtgctaaagcccagaccttctggctgctgtctggggtttccacattcccagcaaccttcttcaggttttgtctccaatgtcttggcatttcctctcactgaggagcttctcatcttccaaaatttggagatgtcactgagcacttgcacctttgggctcttgcaggacaagagctgactccagcttgtttgggtactccagccccatgcttagtgcaagacctgcacacactggctgctcaatacgtgtgtactgagtgttatataagaccaaactcagtaccaattcctggggaacccatttggaaaagcacccatctatctccaccctctctttcttgtctctaagccagttccctatccatgcaaaaatagactccctcccactcaccacccacctctgcccaattctataatgaatcaattttattaataggctttgggatggaaacttgacaaaggctttttgtgaaagtctcgctttatctccctacatagttcacttctcaaagaattctaataaactggtcaggtggaatttggtcttacataaaatattcattaatccactctttccctccatatagaatgtattggtttaagcattcagtgatctctagcctgtgttatagattctattcaattgttctaagaggcagtgggatgagatggaaagagcacgggctttggaatgagggccaagttgaagtctagctggccccttactggtttttctttcacattgattactctgaggattaaatgagataatatatgtaaggtggatggcacatagtaagtgctcgatgcaggtttgtgaataaatgaatgaatgattatgaatgattggttcaggacccatataaaccagatcttaaagctggaggagccagctgactctgcattctgagttaacaaagtcatactacccaggaagggtggtttgaaaagtcttgagaagcaaacttcaggattaggctgttggttggcctgtctccaggccagaaaggaggatctttctccagcccctggtgcaaggggttccctcagctcaagaaaaaatttgagtctggaatctgggttcaaaacagaaaactccttgaaaatcaagactgtgtcattttattggtggattctgcctttctctcaactagagcctggctcagagtgatgtcgaataggcagagaggtccacagcacatattcatgttgtgaagatgaggtgcattgacttgagttgatctgagttgacttggcttgaattgacttgagttgttctgagtttactggtggactcaactcttgggcccaccgagagagaagcttcctgaaacttggacttagctaagacctggctggtctcatagcacaggggagacttcacaggtgatgttctggggacattacagagtgtcccgaagatagaggcctttcagagaggaccagggccatagtcagcactgaagagctggatagcagtcttggctcagtcagggggcaccacatggctaaatgtcccttaggaatctttaaaatctattggaactctgccaggaccttttcatatttttaaggcaatagaagcctttcttactggcatagagggatctttttggggtacccacttcagtgggaggatggcctccaggttggaaggtcaactagactcagcaatgaggagagaagacagggtgaggctgggaaccaggcagagtttcatactacagatgctgggaccattgtaggtgggtcctcccatggaagcgagggtttggggatctgagtgagatgtgattctaactctagacttatgtcaggcagtgtttgctgaagggaaaatgacccagaaagtacactgggaaatcaggcaagacctatagcctcaccatgcggagggcagccagcacagctcaggccccttggccagccccatcccaggccctgcccaccacagaatgcagccagcacctgagggagacaggaatgagaacaccagtgagcttcaggtgagcaggggctgctcacacgcttactgcacttgaccagtgtctgtctctcacacgggtctgggaacccaccaaaggaaatatgttgcgttcctatcatcccctttgtaccccctaaaaatctgggtacagattttagacatcagtgtttgatgagtgaataatcaggtcagagtaagatttagaaagccagtggaagatttcaagatggcaaaatggaaaatttcaagatttcaaggtggccaaggtccaaggtagagacgcctagccagaaaaaataagatagacccagaagctgcccctcaggaatttggctcatggaaaaataatgcactaaatggagccaagggacagggtggtgcaatgtgagcttgaaataatgttcctcagcatcctgggcttctaagaaggttctcagggcccattatgggatgggtttggggaagagaaggcctcaaagaagaagccctagatcctccaaatccatttcaaccacaaaagcttcgcttttatctgttgtatatgttggatttcctcctaaatttttacttttaaagggttcttttgattttaaaaagtgcatttgggaaagtactggcattgaaagagcctatgcctttggaggtagactgggtccagatctcagctccatccctttccaccagtgggacttggggcaagtgtccctttgagcctccacattctcagccacgagccaccctcccagggctgtatgagcacagctaagcggctctggtacctcccagaggctggcacacgtgtgattgattgatgctgtacaagatgactttagctggtatacagatgaacatttattattttaatagctcgcaagtgatgcgtgttagaaatatataaccagcacactaaactgtgatttatgaaaataatatggcatttcctctgaaaataaaattgtgatctttttaaaaaggcaaatcaatttaaagagaaatactaagtaagtgatagggcagaaatcatgaaggtggcacaggaatgactgaaatttgggggaaattgagagaatctatgtaaacaccaatcacagtgtctgtcacttaagaagggctcaaaaagttagttcttatatccttctattttagctccctggggtggttgaacctagaaccatgctcaaaaaacaaaacaaaacaaaaacaaagcttcctgggacaaagtaggggcccaggcccagtcggtctggaacagtgtggggtgggcatgagacaggcagccatggatccagctctgatgggcagaagtggtcaagtgtggccagggagctggccacaggcacacagagcagtccgaggctgctgaggtagcatctcccacaaagtgggcacagaccatcggggatccatgagacaatttgaagagttattcaggcacaaattaaatagcactgggagagaatgactgcctttttggttgattacatcaaggagagagtctcaattgaaggttagcctctccttaaccagcttgatttcctttccaaggaagaggctcagacttcagccggcaacagtaactagctggaagtggataaacgatgttttattttccatttatttgtttttaaccatggccttctatttacagaacaggatactgcattcctgtttatgagaaggatcttatgttctctttccaaatatatgtattaaaggtcaaaaaatgaacctgttactcttgctaagtataaagtgagtaatagtaaatgcaagatgtacatgaggaaaacagagagaagtggtgtatgactgaggcaagagtcacctggcaaaggtgttgcaagggcttccatggctccagagcccatgctgggcccagaggcaggaatgtctccaggccccaccacagcctccggggcagtcctcaccctggggagggcaaaggaggccccatcctaagaaggagggagattgctgggcaggtgacccagagcctcctgcctgagccgggagtgcagagaccaggacagcagcctggccagcagtcagtgaggtcagggctaccaccagagggtggatctgaaacagaccctaggcctctggtttctggcaaggttgattacatccagaagggggtcttaattagaggctgtggtccagtggttgatcataacttggattatccagcgggggcaggaaggagctgagggacaggaagaggcagcccgtgtcagcctggtgttcaaggaatcaggtgtgaacctcaacagttcacagcagccttagagaggggctgggtgtgaattagggtacactgatagcaagcaacagagactaactctgtcagactcagacagaaaagggggttatcgaggttatcagatgggacccagaaccaaagggaaagctggacacagggctcaggaaaggaccagagccaaagctgcacaaggggtctggaagcaggacctgaggccggttttgtccaggtcccctctgggatgcatctcagccacagccgcttttttcctccttgcatcactcggctcatgagtcacagccccaggagggagacagctggcttggcgtgggtcccgtgtcctcctctcggccagcccaaagcatggcggcttgacaggactgcttccgagattgaacgtgagggaggggtggttcccacaaggaaaatcaaagggctgtcaccagaaggaggaggagtggattctgggcagctcaaaccagcaaatgtctaccagaaggatcccagggagtacgaggcactgtggtctcctaggtttcactctctgggaccatccctgaggcctcctttctcctaccctgaatggacaaacgtcaccatcccagtctgggagcagtggtctgctgtacctgagtaaggtggtgagctgctgcagtgagggtcctccgatgggctgggggccctaggggaagggtactgggcaagtctgatccttggccccagggctgaaaaggatctgctgggctgaggaagtctaatgagaaccgactcactcaggggctgcaaacccgctcgtcagcaggcttggcggagagcacatgcatggaggaactgtgacaggggacagacatgcttagctagcaggacagccgctgcccactccagggagtggagttaccactccagcagttaccacacaggcacggggccccagggttgatggttacacctgggctggtttgtttaaatgaaggcccaaatcaggagttctatgtgaaactcctccttttttagtattatcaattcacaggaaaacaattaaatgttgtgttgaccaaacaatatgtaccaccagtttgtgaccatgggaactaacttctactcatccactacaactaagatgagacatcacttcctccaggaagccttccatgacttgcccctccctctgccttgccaccaattctttggactcccacagaccctgtatttccttttgtcacagcattgaccctctgtgttacttggaggcacacaagttcgtttgtttttgtctgctgctttttgactgtaagctccttgaggagacccactgtctcttgttacatctatgcccagcatcatgcctgacacacatgaagggctgtggcattgatggaaggggcctatagggactgcaggtctcaaggttatactgtggcaaccagttaatcctcaaatcctgttgtgacttaatacaacaaagatttgtttctccttaacatgatgtcttctgtggagccagcagctctccaggcagcatccttccaatcggtgactccgggatctaggccggctccgccactatgcagcagcggaagagagtgagtggagaactcacagtcactcttttttttttttgagacagagtctcactctgtcgccaggctggagtgcagtggtgcaatctcggctcactgcaacctccagcttctgggttcaagcgattctcctgcctcagcctcccaagtagttgggattacaggcccgcatcaccatgcccagctaatttttgtatttttagtagaggcggggtttcaccgtgttagccaggatggtcttgatctcctgaccttgtgatctgcccgcctcagcctcccaaagtgctaggattacaggcttgagccaccgcacccagccaacagtcactcttaatacctcagcccagaagtgacactgattgattcttctcacaggccgttggccaaaactagtcacatgacctatctcaccatcaggggcgggaaagaattcactgagttcacgttcttgcagcacaagccctgacctgccgctggcagtgctggggagccaggggtccaaaaggaggacttgggctatgcgtggggcagaggcagccaggaaccagaggtgctcgagacacagaaacttgccagcatcactgagaaccagaggtgcctcatggctggtacatgaaagcacctcttaatttgcatgtttaactcaacacatcctaaaaagtgggaaaagagtggggagagaatttcattaacctgagctttccacctttccttatttttccaatcagtaaacactagcaaatgaaaatcaagttgatggaaaaatagaggtcaaatgccaatgggcaaactgttcagaaagaaattgccacctggtcccttcaacatcttacgtggtgtccatggtgacccaagagcgactgcagctgttggaagggctcagacgccagtgcactcggggataccgaccctcactgctctgacagccttggccagaccatggccgatagcaagtcagtgggccccactccagggggctccaagacacttgccatgctttcttcaggctatatcacaacagcagatgtttctttgggatggaatcacaggatcttagatggctctagaaagagcagaagcttaggagccagaaagatctgggttcaaattccagttctttcctagtaagtcagcttcctacctagcaagacccttcaccgctctgagtttcagctttatcgcctgtctaatgggtacaaggataacacctacctccctgaacaactgcgcatagtctctgacatcacgtgtctaatgcgtaatgtcctaacgcacagtatgacctcaactgatgtcactgtttctccttttcccccactggggtcagagggactgagtccaacctcccctgactgcagccagccagttcctatttgcacacctctgatgacaagaagctcactactcttcctactgcccccctcgccctacaagccctgagcatcttgctccattttttaattactcccacgatgtttgtgaagagagggtctgatgtccctagggactagggattgaggggaaggtgcctggctcacttccccacctggctgactaatcacagtctttgccctcaggagttgtgcgggggaactgagtatagtgaggatgaaggaggtgaggggatcagggtggaggaatgtgtatccatttctggttcacaaaaggaaacagagaaacccatcacacatgggagacaggatcaggactggggacatgtgtcccatagaaaagaaatctcaggaagactgccacaggacaatgatggaggttcaacctagggttaagtgtggggagccacagaggggaaaacaggagcctcaaataagagcaaactttccttcattcattctgcaagcactccctgtttctccaccctgcctggccccaggctgagcataagcgcaagaaatgaatccgtggccttgaccttgggagagtgggcaggcatgtagatgataacatggaaaccatttgagtattgctgagataaaggaaagttcaatgggggctgtgggagctcagagtgggggtagctggcccactagggaggggaaggatgaggaggcaaacagaaagtcgggagaaaagggataccagctagaggggcaccatgggcaaaggcatagaggtgaaaatcagcctgtgtgtggaaaacccacccctttctctagtgcttgagcagggagtggtgacaggtgggctgatccagcagaaaagggccttgcagacagccacagagcagagaccctgtcccaggctaggaggaagccatggaagggcgagttgtttttcatttttgttttttcaggaaaaaaaaattactgaactataacctatgttcataaagttctcctaagtttacagctcagtgagttttcacaaagtgaacacgcccacgtaaccttccccagctcgagacacagaaacttgccatcacggaagctccctttgctcccctttccagtccccacctccctgcaaaaggagctgctgtcccaacctttttttttttttttttttttttttttttgagacagagtcttgctctgtcacctgggctggagtgtagtgatgcgatctcggttcactgcaacctctgtctcccgggttcaagcgattctcctgcctcagcctcccaagtagctgggactacaggcatgcgccactatgcccagctaattttgtatttttagtagagatggggtttcaccatgttggttggccaggatggtctcaatctcttgatctcatgatcggcccacctcagcctcccaaagtgctgggattacaggcgtgagccaccgcgcccggccccgacttctaatttcatagattcattggctgtttttgaacttcatataaatgaaatcacgccgtgttggacccctgctcagcgacgttggagagtctcttgagttgttgcatgtggttgtcattcattctcattgctggagtaaatctcatcgtgggactagaccaaaatgcagttctagtgttgatagccacttgggttgttttcagctttagactcttgggagaagcgctgccatgaagattcttgcacgtgtctttggaaaaacacatgtacacatttctagggggtttatgccaaggagtggagttgctgcatcacacgagatgcgggttcagctctagcagatactgtcaaatgtttcttccaaaatgatagtagcaatttacattccctactgtagctacttggtggaagtttcaggagctccaaaccctcaccaacatttggtattttccgtcttttccatttcagcgattctggtggatgtggagtggtgccgttggaatttttatttccccaaagacgagtaggttaaacaccttttcatatgcttcctagccatttggacatcctctttcccaaagtgtctattcaaggctctggacagggagggtcaagggccgcctttcattttagaaagttatctctggcagccaagtggagtgtctgggattggaagtgggtgtcctggaacctctggctgataccaggggcatctcttaggtaccaggtttcatcggcttcctctgccttcttcactcctcacagtcaccctttgacctcacaggtcaaaagtgttatcagtatttcacagatgaaatggccaggctcagagaggtgaagggcctgcccaaggtctcacagagggtgcggagaggacagctgggatgttctcagcctgaagcaggtagcccagggaggaatagaacagaagggaacaaaaggaaggtgaagaagcagctacaaggacatctatctcactccttattttgcagaaaaggaaattatccacctgtctccccagttctctccccttccttcccctctctctgcatcacaccaaaagtccctacagaggtcagcagccatctggaggtgagtgtccccagcctgagactgtgttggaggcccagtgatgtgcagggagccaatttggtcagctcctgtctctgccaccacccaccgtgtggccctggactggtcacgtcacctccctgagccttaggctctttacctgtttcaataatcccttcctctgggccttgtggggagaaatcactgagggaaactgatgcagtgcccagcagggcgcctggcgtcatgagcccttagtttacttggcacacactcattccttcccccgacacttctgtgactagcggggctccgtgttctgcccaggccccctctccctgggtagcagggtcagcctcttcacgtctcatgcagccacaacaggccactggtgggttcctcactgcctgaaagcaggtgtggtgggccaggcatggcattccctcccgcatcaccttgtctccctgcagctgcccccactcaggctgacagccacacaatgagtcctagaagggcctttctcgtctcaaggactctcagctcagagcccagacgcctttattttaggagctgtggttagtaaagtgcttcatcaacgccacctccaagcagccccccgccccctaccacacacagcccgtgtgactgtctcacccgccctgtccttccactccttaatccgtgctgcatttcatgagcatctccaggcactgtgctaggcaccaagaggcccaccagctccctcccttcatggagtttcctctgcattgagagaaacagacaataaacaaatatatggacatggtaaacaggatgcctttggatggtgctcagggccgtggagatgatggagaaagctataacagagagggacaggcagtcggccgctcggtcccagagcagagtcaggaactcccaggcctgctgctggggatggtgcgtccttctctggtttgggctcttcctggagggagcagtgacactgcagacctcctgggggttgtcctgggatttggcaaaagatcctggctgctcctgacccctggcacttcctccatccaccagcttctcccctcccgccccataggatttcttcctcccaatcctactggatcctgagcaaactgagtcctttcctgatggtttccccatccccaggggcaagggcaactgaaccccacacagggccagcagagaccctcagctctacgcaagcaggacactctttctcccttctcaggcctccaccttctctccctccttcacccccttcctgactcagtctctctgtctctgtgccccatctcgcttttcccctctccaacttcctgttactctccttctcctaaatttcttttccttcttttcctttttcttttttttcttgaaatggagtttcgctgtcgtcacccaggctggagtgcaatggcgcgatctcggctcattgcaacctctgcctcctgggttcaagtgattctcccgccttagcctcctgagtagctgggattacaggcacctgtcaccatgcccggctaatttttgtatttttagtagagacgggatttcaccatgctggccatgctagtcatgaattcctgacctccagtgatctgcccgccttggcctcccaaagtgctgggattacaggcgtgagccaccacgcccggccctaaatttacttcttattgggacactcatttccttcaaataaatatatgtatttttaaatgcactgagcccctaccgggtgcaggcataaggtgaggagcttgggtctaatcaaagatgagtaagacatggacttccctgcaagagagatgagtcatgtacctaaataagtgaaatggggaggctgaaagtggccagtgtgataaaggagacactgatgggggctgcagagtaggagggttcctgagggcttcaaggaagaggtgatgtttttagtcaccttgaaatacgatcatgcaatgaaacgtgggctgactctgggcctctcctgtggacagttgtttaaggaccagctcatttgcctggaacgtagggaatttgaatgtcatctttctttcactttatagttctctgattctgactcacttccttaccgatctcaccaccttctccttcattttctctttcatctgtactttttttcttccccacctgtcccttcacagaccataagacgtacttttgagttttgtcctcaatttcgttttccttccatccttttctctcaagtctaagtcccactctctagcatccttccttcctaacctccaaggtgccctggtagaccacgtggactttgatgtctaacagaccagggtctcagcccagtgactcaactctctaagccttcatttcatcatctggaaacagcctcctagggctattgtacaaaccaatgagacaaaggatgtggaaacgcttcctactgtaaatgagagtctttaccgttaacgaggctctttagacttaagtgacagaaacccaactcaagatggcctgaagggaaaagggaaagtctgatgttgctaggtcagacacacatggccccagggcttcagacagtgaccacaacactctatctttctacatctctccactgccatcccccatgttgggcaggccttcctttgcagagtgggaacacagccatctccttcctatcagctgagcaactccagtgaaaatcgggcacccattccagtggtgtcagcaaagctctgtgattgaacgtcagtggactcagccctaacccattcccatagccaggcctgggtcccacgctatcacacggacccgttaatgatgggatcctcccacccaacccataaggaccatgagtgggaaaggggaacatcttcccagagaggggccatttcacagttacaaaaagaaggggaaatggctgttacgaatcaagctccttgagcaacggagacaagaaacacagggaaaggaacaggctcacgccttcttagccctcaggtgtcatctcctcaaaaaaaagtcttctctaatcccttaaggatgtgttgggtgcttcacctgtgctctagcagcaccttatgcttcccctattatcatatttttcgtgtttattatactattctatttgcttgtctgtctccttcacaggactttaagtatcgtcaggacaaagtcagtgcctgtcttgcctgttgctgtacacccaatgttgacaaatgccagacccttagtaaatgatggatggagggatggatggatggatggatggatgagtggtgagatggatggaaaacagacagctggatgggtgaatgcatggatggtaggatagatgagggtaggtgaatgaatgagtgagtggtggagcgtatgaacgatggacgattggttggataatgagtggatgaagggatgaataaatagatagatggatggatgaatggttcagagataactggtgagatcagtttggaatgggcttagcctgaactgcctgtaaacacaaacagagctgcccctcaagttgttgatagatgaaccccaagttcgggagagaggtctgggctggaaacagaggtttaggagctattaatacagagactataatggagtggatcaaggttacaggggaggcagcaaagtggggggagccaaaatcagacagcacctaagtgacacttgaacccagggctgtgtgatgatgtcagagcttgctttccttccttcattttatggcagcttggccactacttgaggtgacagcacagagttaatgtatctccctctcccctccctccccctcctcaaaccactcagccagaagggagcagctgcctgggaggacagagagacagattatgtaaactgtgattgccacccacaggaggaggaggagactgaataggtattgaaatgcgctttcaataatgcatgtcctcctccgcacaggcctggggcttgctggggaggagaggatccttaaagggaccgatcctcctgtccccaacacccacaggccccctgccagccatacaggtcccctgtgcacaattggagggctctatggacatccactccaggggtccccaacctttcaccctcaaggacgcctttttttctttccctcttgacttcagtggatttgactttttaaagattctgtttcccaaacatgctgcatttaagtcatgattaattcattttccccattttttattaatcaaagacacttaactgccagtcagagctttgatcagcaagaggtaagccacgaggtgaggtgatgtcattccaacccaaagctaagaaatatagcaagcaatattgttaggcaggccggccttgctgccagaaagtgccctcccttcttctaaccccagagatagaagagccccaggctggggaccagggaccctgcccaagtctctctcatttcccaaaggaggaaaccaaggcccagaaaggcaaatggacttgcccaaggccacaggatcagtgagacctaaaggccaaggtctggcctctgcagtttcaaatgacctagaacttggcagtgaaacaggccaagcaggggacctgaaagtcaagaggagggcaggagaaagagaagccatgagagccagcaccttcattgtgctcctactacgcaccagacccactagaaagtgtctaccaccttgttctcacacaacaactcggaaggctgagattgacattcccgttgcacagaggaagaaattgagcatcaaagaggatccgtggttttacatcatccactcagctgggaagtgaaggatcaggattccagcaggtgtgtccaaccgaccgtgaaactttttccacctcactggcctggctgtgatggaggcgaggagatcattcagaccagattggcatttctgtttgccactcaccagtgtgtgaatttagctaatgatctcacccctctgagcccccattccctcctctgaggaactgggatagcatctgatggcttgagtgatggtggaggataagaaaacagggttaaagaaaatggggcacagaaactagggtacagagaagctttaacttggcgaactggaccgggtacagtggctcgcacctgtaatcccagcactttgggaggccaagacaggcagatcatgaggtcaggagatcaagaccatcctggccaacatggtaaaccctgtctctactaaaaatacaaaaattagctggggatggtggcatgcacctgtagtcccagctacttgggaggctgaggcagaattgcttgaacccaggaggcagaggttcagtgagccaagatcgcaccactgcactccagcctggcgacagagcgagactctgtctcaaaaacaaacaaaaagaaaaaaaaaaaggaaagaaaatggggcacaatacttagaaatggcatcctctcgctctattccctccttttctagtgaaaaacttccaagctggcagaagccagagtgtgagatctgattgcttctgtctctggggatctcctgggttgtagttcaggaaaactttaccctgttcttccactgctttcagttaaagggactgttttcctctggtccagtaattctaagacaagggttgagagtgggacgagagtctctgcctgtagcttgaatgctctcctggtcaccaccatctgcttccacatctggttttattgctgggcgggagatagcttgaccattcccatcacactcctggaaactccgttgatttccccaaggcagccaaagaagctggagtggaaatctcagctcccagcagctagagagggtgaccctgctggacttgccacagttgctcctcctggaccaggcggaggtggagtaattgactctctggtttcccctggaagtggttttaaatgaataagtgcaaaaaaaaaaaaaaaaaaaaaagcctggtaactggggtggggcactaagcaatttcttgggcaggaattcagcagatcggatgcttgtgccagtggtgtgggctgggctgagactcagggatgcacagggcttggtgcagacagggtgggagcactgactagcggcaccacgaggttagagggctgcgataaaggtgtgtgaagggcactgcaagaacccagggtgggcgccactgactgagtgggtaggatagtatgggtgaggtgagcttctcagaagacggacctttgagctgagcctggtaagaaatggggaatttcagatagtgtagacagatgcaaagatgggaccacatgagagcattctaaggaggagtccaggttgtttgaatacaaggggatggacaaaaggtagggcaggagcgcaaggctgggccagatgttcgaaggccttgaatgctattcccagtgcgaaaggactccacgctttggtcatggccacagcatgagcatacctggggtggggctagtgtttaagaaagatctctatgagaatcaaactggaagcagatgttcccaagcaaaagcgataggccagcaggaatcagacggaccctcaactgggctggagagatgtttgtggcgggtgaatgggttggatttggtggctgattggatgtgggaaggagacgaagaaaggaatctcccaggatggcacttgctttggggcccctactggcccctctaccctgctcagggtggggagagaggacccaccaatgcctaggccaacccaggttcccagggaagcttggacagggagggcttcccaacacccactccctcaaaactgaagagaaaacttactacttgtattcttgagctggtcaacacactcagttgcaagtgagcaaaatccaacttaaagtgacttcagcaaaagggggaatgtgtttggtgtgtgtaatgagaagctctagggatgctgctttcccctacagttggatcacgcagctcgaatgaggagagtaaacctcattctctctccctgtcttggctcagctttcctctgtgtccaggccagctctcgtcacagggtggtttctgctgctccagacttacatccccacagctcagcagctgcagcaacaggagactccaacagccccatcaaaagttccagaactgagtctcattggccccttttgggtcacatgcccttccctgcaccaatcactctagccagagggtggactacactgattggcctaaaccgtggtcatgtgccctctatgggagaacaggctggggcctcaccctcaactaaacctcactgaaggtgactgggggaggagcagcttccccagaggaaatggggataccctttctaaaataagggaaattgttgcttgattgcttttctacagcagctgagggcaatgcagagtggcccctcttctttccagcatctgacacccatattatggtttcatacccaggcctcttcaacatacctttaaagtccaagagatgatggccgggtgcagtccctcacgcctgtaatcccagcactgtgggaggccggggtggttggatcacctgaggtcaggagttcgagaccagcctagccaatatggcaaaaccctgtctctactaaaaatacaaaattagctgggtgtggtggtcagtgccgagcacctgtaatccagctactccggaggctgaggcaggagaatcgcttgaacacaggaggcagaggttgcagtgagctgagatcacgccactgcactccagcctgagtgacagtgagactccgtctcaataaataaataaataaataaagtccaagagatgaaccagcagggagatgcacttgaccttgtgcacatttacaaaaaaaccaactgcaactattcattcatagacccatctgcctcctgcgtgccctggccagccctgcctatcgagggtgatagaaagacccagactctgcccccaaggagtttacagtcagtggagtctattttaggtataactcctggataatttagtagagtcagacttactctccaaaaaatacacttcactgcatatgtttttctggtattcggatgcttttatttgcttttagattaactgcctcacatgaaaatcatgaattgaaaagacctttaaaaattcaccatttacttctgagtcaattttgtcttcactgataaaaaatacctaatatctattgcacatcctcactgaggcagcctctgggagtttcacgatttattctctggaaatccggatctgggtcctgagaaagtgtggtggtcccttcatggactaagagggtgagggtctggaaactgttctattggaacagcgagctacagaatgatggtctggacgaaagaagactcgggggcatgtgctctctattacccagcatctgtatgtggaagcaacgcacgttagagggtagagagtagaagtgattgggaatagattttttagctcaatatgaaagagaaatatttagagaccagagctattgcaaaacaaatagactgccgtataagctagtgagctcctcattcctggaagcgtgtaaacagggactcttaggtggaaagttagaccaaatgacctcagcctcttccaactagaagattcctcaactatgggctgaacagtgtttgagttttggctcaaacactatttttctctgtggccttgggtgaggcgctgtccctctctgagcctcagtgacctagatagcccccacagcgtcttcctcttctaaatactttgccttgctcatgtcagatattcacacctgcctctgcacactcaggcaatttctgccccgtgcatatttcgaggctccagagcctgagcaaaccagcccaccaaacccacaggtgtgaggcagcttctgtctgtgccttctgttcctagagaggctgtgattcatggccatgggggatgcctcccccatctgacaggtggagaagtgaggtctgggggaggaaactaaccactggagccagacgcactccccgcaaacacacctgactgggcctctcccacctcaccatctccctgtccccattattggccctcaatccacaaaggaccctgggaataggcctctccccaccacgtcaggtgaagggcagccactgaagcggatgcagaccccaacatcttggacctgagaagtgcatttcccacagatctctccataggcagccttaaggctttttgcgtttgatttttacaacagccctgcaagggaggcattaccgtccccaacttctggggaggaaactgcggctcagcgaggccagcaattgtctgaaaccagctggtaaataagctgcagagagggcactggaccaggcccacctgctcagccatg

SEQ ID NO: 792 - DNA, 32742 bp, Homo sapiens
  source 1..32742: mol_type = other DNA
ataaaagaggcggggcgcgcgcgtcgccgccactacccgctgcggagtgaacggtgtggagcggaggccgcggaggctcctcggtccttcagcacccctcggcccgacgcacccacgcccctcaccccccgagagccggtgagaggggcagccggggagctccgggagggagcggggccccgggcagccgacccccgggtgggagctgggcagctcttcaggcggggcggggccggcgcgcggacaggtgagccgggcgggccgcggggctgcctccattcggctgagtgggggaagccgctgccgctgcttttgtggcgcgtgggctgcggaggagcagccgggccgaggctcggcgccgccgctggaatgtcactgacggggggagggggcgcgaggccgccgggtccctcccaaccacccccaagcctggctgcggcgcggccctgccctgccccatccggctgcggcaggtgggtgggggctccctcgtcgggatcttcgccagccgcctccctgcagaacgctccccgcaccgcccccggtcccttccctcggccgggagcgacttctgcagctcgttcttccgaatcgcaccagcaatgccggccagccgtagagggaggaagagcccggggagcccgagcatagcgtaaacggctctctgaccttaatttcatcctgcatggcgaatctctgccgtctctctgaacgcagaagggtctgagactggccgtctccttttctttccttgtaataaacatttttctttcttcctagttgtgatttgcttgtaaataataggtaaatgcagtgcttgcatggtatgtggctcaaatcaaataacttaatagcttagcgttcttgtttgtgtgtgtgtttcctgggactgggtctttcgagtcgagatacagtgtcaaaaattctaccataccactgttgaatgatagaacagtcttttgtttgaaagctgtccctgagaatttgattagacgcttcccctagaacatcgctttcaaaagtctctgatgtactagagtaaaatatattttaaataagcgccttgttaaaagttgaatatgttttaaatgaaaagcctaaatagctcagaaagctgggttgagatgatgcttgaactgttccaacatctaatcagatctcttttatataatagatcctaaaatatttaagccctttgttctgtcttcatcatgttattttagaaaaacttaccatcatggctgttcgggaagaacaggagagaggccatatgaagtattttcataatgtgttgagaaattgcgtcgtcatagcaattggccttaagtaaaacagaatgtatcaaagatggaagggtgggggtgtcttggagccaggaaacagaaaatcttggaaatagcaggaggaacactcagctatatgaagccattgagtcaaggttccgactccttaactagtcgtttattttccctttcattgcagctaactaatgtcttagattttgaaaggtcaaattgaatgtgctgcggaggaaaaaaaaagtgctgcagtaaaggcctctgtgcaggaaattaacaataagccttttttagtaactgggccaataattactcaaagggaccctcaaagtgtgttaactgttatccagggaccttgatggagagactggaaaggaggatttttgcttcatcctggacaagtgtgaagcagttcttatggcaaaccatcagcctagtaactgattctctgatatgctttggtcttggcagtgtgttttgtagtcatctaataattggagaaatctggtatgtcacaggctgcagtgtaagcctgtcaagcaatatgatgaagaggtgcacatggggagagctgttttaagtatgtcttttggttccctgggttagaattttttctgctttttcttacctgccttcatccaaagttgggggtcaactgcagatcctgaaaagtggatctcaggaatagtcccccatgtcctgtcactgctgaatctacactaagaatggacaagtgtgttcaaggctggcctgcctttgtaatcagtcctccgtgggctatgcagggatcccactagttacgcactcatctgttgcagcatatcagctgcggctgtactgtagaagaatgcaacgccctagtggcaaatgctgactccaggaatgcggaggaggaggaggactgcatagctcatcactgggggccacttgactggagcagctgtgctgcaaaccatcacctctcttccaccttttttgcatattcctcttgtaccaattttgaacaggaaatagtattttgtaaagtaagtgtactggcaaactaggcccaagtcagatctttgtggcttgagttctactttgtggcaatttcatgaagtcatgctcttttattgctgaatggaaggggatttaggaatcatcttgtcctgggatcctcaggaggaaggcatgtttagtttgaaaaagtatattcggtattattactttaacaagtggggaaattgaggccccaaggagaatgagacttgaccagggcagcatatctagaaagtaactgccaagacctgggaaccttggttctccttccacattttaaatcccttgtgggatttagacgctatacagaatgtcagagagaagacactgaaaaaatatctgaaattggatttttaatctgtattcatattttttaaataatctgttttcttcatgattttgttccgtttgcccttagaagcttgttatcttgctcttccccctccctctttagactccacattcctccatcatgttgtcatcgtttcgtaaacgcagagtccaggtatttgacgagcatgcagaaaacgggttgcctttttggttttgcctggcttgcagtgaaggcatattcgtgtcaaagaggttgaatgatccaaagaaagggggaaaaaaaccctgcctgcatgacgtttctgttaaacaaattggttaggatttgtttggggttttttggtgttaaattatcagaagtattagtaaatttacttgaaaatttgcaaagcctttttttttttttttttttttttaacctccctctctttctctttaaggcatgaatatattaatttcttaccaccattctggtgtttgcatgtagtgtttgctgactttttattggtggctacttggtttttaagaaccaagggactaaacatattatcctagatatttggagaaaataatctgaaaatacatagtaaaaattgtgtttttaaaatttgacaaatattgtaaacttgggtttgtttcctgttgcattgacttcttccaccacaatttctataatagagcttaccttttcatgtttaaaaaatagctctcgggctgggtgcggtggctcatgcctgtaatcccagcgctttgggaggctaaggtgggtggatcacttggtcaggagttcaagaccagcctggccaacatagtgaaaccccatctctactaaaaatacaaaaaattagccgggtgttgtggtgggcccctgtaatcccagctacttgggaagctgaggcaggagaatcgctttaaccgaggagttggaggttgcaatgagccgagattgcaccattgcactccagcccaggtgacagtgcgagactctgtctcaaaaaaaaaaattaaaaaacagctctctttatatgttttctttgtgtacagtctttgttttctaagtcggacctttttcacaaaaaaaaaatttagtatcttgatatcccaaaataaaaaatataaacattggaaatttctagtgtttataggtgataaatccaaggcaggcctttttataaatcagatgagttatttacttaaatgaggtttataaaaatgggccacattataaccatttcctgttttgagtcatagtaacaataaggaacttaaatacctctcatctgaattttgcaggttaaaaggtaagtagcagcaagatagtatttgggaagcaatcagaagtaagttttctcaatattgctctgcatttctggattttgatgcaatgcagtatgaatcttttgctttcttaaagctaagtccctgctcacctctgcaaaattgcgctaacaagttgaaatgaattaatcagtttgaaggctgacatgctgatccacaatcctgattggaatgtggtttaagcaaaaatatttgttgtttttatttatggtgttcagtcatcctttatgtattattgacctctctgcttaccatcaaatctgccactaaaatctgcagctaagctggttttgagttaattttgtttgatctgagaatcaactggtatacaattttatgagtgctaatcaattctttggtggtttgttcttagggaagcccttccacatccatggatatagttctcttgctttgcaaatctgaaatttggtaataggctggcatcctaagccacggaaaaaagacattgttggttctgcacatttgggttctgactaagcaacaaaagcaactgatgaatggtttctatgatcttttgctttgggtgatgtttatgaatttttccataaccaaatgaccaaacgacccgttcatcctgttagtccctaaaaatccctttcttgcaaaactgtatgtctagtggtgtcctgcctgagaatcagaattcattttgtagtattccaaatgtctcttacatccagtgcattcaacttgctgaaagaatggcaatcccaatgctttgtttttaatagagactcctttcagcttcactataatttttttctctcttttgggattccatagagaaactgactgcactcactgcaggtgccaggtttacagagtccagagcatttgacctttggttcgaaaatgtttgtatctgcagtcttttgtgttgcttaacgcagtgggattcccacccactgcctctgcctgtacaagaagatagagctatatatcccataaataccccccaattttttttatttttatactcccaaattttatgcccccaaatacccccaaatttttatttggggaatgaaaattccccaaataccaagaactgcctcaaacagctgtctcttggcgttcatcaataagacaaagatattcatgtctaatctattttgtaggaatccattttcagttgatactgtgtataagtttgtgtttgatatcctggatcattctgaagcatgctgtatctttggattaaattagaaatttcttttttttttttttttttttttgagacggagtctcgctctgtcgcccaggctggagtgcagtggcgcgatctcggctcactgcaagctccgcctcccaggttcacgccattctcctgcctcagcctcccgaatagctgggactacaggtgcccgccaccacgcccggctaattttttgtatttttagtagagacggggtttcaccgtgttagccaggatggtctcaatctcctgacctcgtgatccatctgcctcagcctcccaaagtgctgggattacaggcgtgagccaccgcgcccagctgtatattagaaatttctagccaagattcatatattcagaccccactcttcttccgagatctggtagtattgtaagaatgctgacaagttcattttattcattttatttattacaatagaggacatagttgtaattcctgctttatccccctgagattcgcattacttgctgaatgatgcagctaacgtttgactgctgcgttgcagcatttataaatagcctacgtcttcagtctcctctaataatattttgcaaatatatacctttttttttaagttaccttaaatgggaagttgtccttaaacatatagagaatatacttagcacttcatttcccctccttcagtctctatgtgaacagacttgattggcaaaatcagagacagttggctcctttgagataagcagtcagttgattgcattcctaggaagtcgtctctgttgtggtttttaggcagttagtggaactgatagataggctggtaagattggagtttgttttttaatggcacgtttcccagatttttcctttctggtgctctcaaaaggcgttaatcccatatggctgggaacagcctggaacgttctctgtgaagtcggccttatcagtctgctgcatatgccagggaaggggtggggtgcttgcagcatgcagcctcggttgtggaaggaatgtggcacgcccaggccgagctgagctgacatttcagtaactgacagtttcgggtgagaggctgtagcacctttggatggcaggaattcttaatgatatttatgagaattttcctgtgtttaatgtagtctgcagaaatgacccttttaggagcaaaaagaaactggaactcgtgtagataaacaagagacagctccctgtcaggttaagaggggggaaactctcactaacccataatgttttttggtgtctcctgtaattgcacaaatgaaaattctgaatgctgactgcagtgggagcacattggtgactttcagatacccagctccccagagacagcctgttgtggcttggcagacctcccacctactgacgtcagctgatctactgcaggaaagaaaagtccattattgcctgaccaaagcacttggtatagaattgactcgttctacttcactggggtgacaaagagggccttttaggttggttaatttcagcagggccttgctgaactgtctctctggattggcaggatcaaatcagcaagctgggcccaagcagggggacttgctcagatggaacctttgcgatattatgatggagattttcttatcataaagggctgttcccaaatgtgatttaatttctgtagcaggtaaaggattttagaaatgcagtgactcctgtgataggaggcagaacagcaccatacactcgaatcctggagactgccatctctttcaggagctcgtgtgcagtgtcgttattgttccatgtgtaactatgccttccttggaaaatttctttacaagaaaattttggaagcaaacaaattagatgcataatttctcaatgtttttccatcttaactgtttcctgagggttgagaacaaaggaaatatataaataaataagtctaaccctaattgtttaccaagactcaatcttaaataattttgattttttttttttttgagacggactcttgctttttcgtcgcccaggctagagtgcagtggtgcgatcttggctcactgcaacctctgcctcccgggttcaagcgattctcctgtctcagcctcccaggtagctgggactacaggcgtgcgccactatgcttggctactttttgtattgttagtagagatggggtttcaccatgttggccaggctggtttcaaactcctgacctcaggtgatccacccgccttggcctcccaaagtgctgggattacaggtgtgagccaccctgcctggccgataattttgatttttaagaaatgattaatacatccacatccacctcacctttttttttttttttaagagacagagtctcgctctgtcgcccaggctggagtgcaaaggcgtgatcttggctcactgcaacctcagcctcccgggttctggcaattctcctgcctcagcctcccaagtagctgggattacaggcgcacgccgccacacctggctaattttttgtattttaatagagacgaggttccaccgtgttgcccaggcttgtctcgaactcctgagctaaggcaatccacccccttcagccttccaaaatgctaggattacaggtgtaagccaccgtgcccgccttttttttttttttttgacacggagtctagctctgtcacccaggctggagtgcaggggcttgatctcagctcactgcaaactccgcctcccaggctcaagggattctccagccccagcctcctgagtagatgggactacaggcatgtgccaccacacccagctaattttggtatttttagtagagacagaattttatcacgttggccaggctgttctcaaactcctgacctcaggtgatctgcccgcctcgcctcccaaagtattgggattacaggtgtgagccactgtgtctgcctcactgttttttcactccaaagtgcagatgtgaaaaggaactaataaagagggagtgaaggccgggtgctgtggctcacgtctgtaatcccagcactttgggaggctgaggtgggtggatcacctgaggtcagttcgagaccagtctggccaatatggtgaaacccaatctctacaaaagtacaaaaattagtcgcgtgtggtggcgggtgcctgtaatcccagctactggggaggctgaggcaggagagtcacttgaacctgggaggcggatgttgctgtgaacccagatagcatcactgcactccagcctgggcaacagagcaagaccccatctcaaaaaaaaaaaaaaaaaaaagaagtgaaaggaactaataaataaccaaacagccatcaataaataatatgtcggccaggcacggtggttcacgcctgtaatcccagcactttgggaggccgaggcgggcggaccacaaggtcgagatcaagatcatcctggccaacatagtgaaagcctgtctcttaaaaagaagagaaatacaaaaattagctgggcgtggtggtttgtgattgtagtcccagctactcgggaggctgaggcaggagaattgcttgaccctggaggcggaggttgcagtgagtcaagatcgcaccactgcaatccagcctggcgacagagcaagactccatctcaaaaaaaaaaaggccaggcgcggtggctcacgcctgtaatcccagctcttttggaggccgaggcaggcagatcacgaggtcaagagatcgagaccatcctggctaatatggtgaaaccccatctctgctaaaaatacaaaaaattagccgggcgaggtggtggatgcttgtagtcccagctagtcgggaggctgaggcaggagaatggcatgaaccggggaggcggagcttgcagtgagccgaaattgcaccactgcactccagcctgggcaacagagcgagactccgtctcaaaaaaaaaaaaaaaaaaaaaaaaaagaatatgtcaatatgtcaactctaatcatgttaagaatcactgtgtctattgtgccatattctgggaaccggaggatcccaggtcatcctggcctttgcaacttgcttactaaattacctgtctcccaactacttaattataaaacgatggcagtttctttatttccaagctctgaatataattggatctataatatgtgccaagtcctgagttctgtgcccagagagtaagagtaaaatatggtcttctttagagttccttaaaggacttatgaatgtggtagggagaacacaataatttcatggcagaatgtggcagtgttataagatgaatgatagaggtgggtggtcagggagtggagacttctgattcagaaagacttcatagaggacgaggcatttgctttggactcagagatctgtatgatttgttttttatattttttatttttttgacaggctggagtgcagtgacgcgatctgggctcatcacaacctccgcctctcaggttcaagcgattcttctgcctcagcctcccgagtagctggggctacaggcgcgtgccaccacacccggctaatttttgtatttttagtagagatgtggtttcaccatgttggccaggctggtctggagctcatgaccttgtgatccacctgcctcggcttcccaaagtgctgggattacaggcgtgagccaccgcgcccagccgagatctgtatgatattagatggtagggttgggagtgggagaggagagtgcactcctgggaaagggaactttttgagctttcaaatggaccctgtccaggacctgtaattggtgttggtgagggagcttgacatgagatacggctggaggagacaactggaaggtgactgagtgaagtcttgtttaccttgtagtaaatgtgattatagtgatccttgtcagggtcctcatcagaaatcagccttctccaaaataggctgacagacttagggcagcagtgtaaactatgactgcctgttatcattaaatattacaaaactttgggaggccaaggtgggcggatcacgaggtcaggagatcgagaccatcctggctagcacggtgaaacgccatctctactaaaaaatagaaaatattagccgggcgtgatggcaggcgcctgtggtcccagctactcaggaggctgaggcaggagaatggcgtgaacccaggaggtggagcttgcagtgagccgagatcacgccactgcactccagcctgggcgacagagtgagactccgtctaaaaaaaaatatatatatacatgtatgtgtatatatatatatatatatatatatatatatatatgtatatattttattacaaaaactgctctgagcagacattaagcttttcaaggtcactcccagtttttggttttaaggacttgacgtctgttttaagaatagaaaataggccagtgcagtggctcatgcttgtaatcccagcactttgggagactgaggcatgtgtatcacttgagtccaggagttcgagactagcctgggcaacatggtgaaaccacacctgtacaaaaaatataaaaattatccaggtgtgctggcacctgcctgtactcctagctactcaggaggctgaggcgggaggatcgctggagcccaggaggcaaggttgcagtgagttgagatcgtatcactgcactctagcctgggcaacagagtgagaccctgccaaaaaacaaaaaacaaaaaaacgccactttctcagagtatactgccatgtggtcaatccaagattggtaattcagatttagtcattaggttgacacctagttgtgtagctttagtcagcacattctttatttgccattcttgtcatcagtctagcacttaactggatagaattccaattttacaatatgcaaactgaaagattcgttatggagctctctccctaccccttacaaatgaattcaggtctgctgcacagcatctgcaacattcagcatggacttgatcatttattcaaccatttcttttttttttttttttttgagacagggtctcattgtgtcacccaggctggagtacagtagtgtgactacgggcgcatgccaccatgcctggataattttttttttagagccagggtttagccatattacctaggctgttctcgaacttctgggctcaagcaatccgcccacctcagcctcccaaagtgctgggattgcagatgtgagccatggcgcccggcctattcaaccaacatttcttgatgacctctgtatgctagaaatcagggatacaggaccggacatggtggcttacacctgtaatcttagcactttggaagaccggaggtgggaggatcatttgagcccaggagttcaagaccagcctaggcaacctatcaaaaccctgtctctacaaaaaaaatttaaaaattagccagtcatggctgtgcgtggtggctcacgcctgtaatcttagcactttgggaggccaaggcgggtggatcacgaggtcaggagttcgagaccagcctggccaacatggtgaaaccccgtctctactaaaaatacaaaaattagctaggcaccatgatgggcgcctgtaatcccagctacttgggaggctgaggcaggagaattgcttgaacccgggatgcagaggtttcaatgagccaagatcatgccactgcactctagcctgggtgacagagcaagagtccttctcagaaaaaaaaaaaaaattagccagtcatggtggtgtgcacccatagtcacagcaagtgggaggctgaggtggaagcatcacttgaaccagggaggtcgaggttgcagtgagccgtgactgcactccagcctgggcagcaaaataaggtcctgtctcaaaaacaaataaataaataaataaaaatctggtatacaaatattaggttgctcggtgtaatcataccttaggatgtatgtacaattgctttgcaaatctatagagaagtgtgattacgtctgagaaggagggaaggaaggaacattgggtacagtttagtaaagagtcaggatcctgcagtttacccatttcagctgggtgttgagatataaataaataagcgctatctaggcaaagaagagtcataggacattctaaacaaaggaagcatgtgcacatggcttggagttttaaagggaattacacattttagagcagaaagaatacttctatccgccacaagggtaggggtcacgggtgagagataataccaggcaggcatgttgggccagattgtgaaggtcctgctcaagaggtgggttctttcttctgtctgaaggaagccataggtcgggggcagtggctcacacctgtaattccagccctttgggaggctgaggcaggcagatcacgaggtcaagagatcgagaccatcctggccaacatggtgaaaccccatctctacgaaaaatacaaaaattagctgggcgtggtggtgcaggcctgtagtccccgctactcgggaggctgaggcaggagaatcacttgaaccctgaaggcagagggcagtgagctgagatcatgccattgcactccagcctggtgactgagcgagactccgtctcaaacaaaaaacaaaaaaaagccataaaagatttgggagtggcatggcgaagaatgtttccttttatagtataaaacattttggactgtggaaaaacaataatacaacaaaaatacatggttgatatgtggagaataatttaaaggaatggtgatatgactaaaatcagctcatctacacttctccaggaaggtggtctcttagaaaggcaatcttcagatctgatcaggcacagacagtgccttcctaccaccaatgagaactgcttgaatccctacagagctggggcactagctagaaactctgacatcagccatctccttctgtttacctgctaggtggatgtggggcagcactcttgacaggtttcattcctaactcttagcctactcacccttttctttctgtcttgggatagacgacaggataaaggaaagaactcccagatgtttccagggtaacacaattttataccttttattatacattgtagaacaatagctggaagggaccagcaggcttatctgttctgcttccttagtgaactcaaaaacctctctataggctgtaattttgaagttcgaagagacttgagagcacgtcgtttttcctgacatttttagtcactttaggaaattgaggcatggagagggaaggtggctagtgtgaggtcacatgttgctgacaaattcagaagctttttggcgttaatctgtatctgtttccttctgtgttccttaattagttagaggataaaatggcatattctttgttttcggtttttgttttgttttgtcacccagggcggagcgcagtggtgcaatgatggctcactgcagtcttgaactcctgggctcaggtgatcctcctgccttagcctcctgagtagctggtaccataggcacacaccaccatgcccagctatttttttgtatttttagtagagacggtgtttcaccttgttgcccagctgctctcgaactcctggagtcaagcagtctgccactttggcctcccaaagtgttgggattacaagtgtgcgccaccgcaccccctgcttgaaaggacttctgaatggacttagcagtgattatttgaataccacagttgctgtttcctctgaatccttgaagcctttgtagaattgacagtacaaaccatagttctcccattcacagttttcatttggtttccttgccgtgtgtgggttaggcatcttctgagggccctatgtaggtaggtgttgcaggggaatggatggccgtttttaataaagaaataggatctgggcttcattgttcctaagaaggggctgtcttctcaattcatttgtctcctgggtttatctgataattatttctttccttcagagaggctaattacttttcatctattttggtgcctattggtacttatctcagcgcattttgtcatttcagaaaatggacccaagtggggtcaaagtgctggaaacagcagaggacatccaggagaggcggcagcaggtcctagaccgataccaccgcttcaaggaactctcaacccttaggcgtcagaagctggaagattcctatcgattccagttctttcaaagagatgctgaagagctggagaaatggatacaggaaaaacttcagattgcatctgatgagaattataaagacccaaccaacttgcaggtacgtctgatctcctgggattcctgccaaaattcaagagcccaaatgttcttacccaaaaatcagacgaggaaagttacttaattatgaccttgagagattggacaagaagaatataataaggaaggacaaactcattgttttcctgtattagtgagggtgaatgtggaatcttagaggtattaattgtcttttctggatgctttaaactgatggttctcaaacctctgccttgatactactggtgagctttaaacatttttcagggaagttctgggttaatctcttggaatgaggttttttgttttgttttgttttgtttttgttttttgaggcagagttgcgctcatgtcgcccaggctggagtgcaatggtgtgatcttggcttactgcaacctccacctcccaggttcgagtgattctccagcctcagcctcccaggttgctgggattacaggcgcctgccactgtgcccagctaatttttgtatttttagtagagatagggttttgccatgttggccaggctggtcttgaactgacctcaggtgatccacccaccttggcctcccaaagtgctgggattacaggcgtgagccaccacacctggcctggaatgagtttttgaggaaggcataatagtgatgttgctggcaaaaatttatagttattctggagtcagatatcaaagaataagtacttaaagttatgagtccctttcagagacttggtaaatcttatcaaaagcaaagcctgaatcttatggtacgtaaattatatatttaaaacttttttttttttgagacggagttttgctcttattgcccaagttggagtgcaatggtgcaatctcagctcactgcaacctctgcctcccagattcaagtgattctcctgcctcagcctcccgagtagctgggaatgtaggcacgcgacaccacgcccagctaattttttgtatctttagtagaaacaggatttcatcatgtttgccaggctggtttcgaactcctgacctcaggtgatctgcctgcctcagcctcccaaagtgctgggattacaggcgtgagccaatgcactcggccaaaactttttttataaaaagggaaagcctttcttctcacttatttcagtgaaagatttttaaagaaaattgtttcggtagcaagtggaacagtagttgggcccatggattttttaactataaaaaattgattacagtaacctaagaagagaatgaagaacactgctttaggtacaatccctgcctggcaggccccttcccatcttagtatttgatgaaaaagaggtattgagaaatggagtgtaggcagggtcaaagagtctggcctctaaagcaagtgaaagaaagtctcatgtgtgagtgaatatggatggatttttcaagagtaagcactgaatgttgagaaaactgttggtatggttctgtatttctagaagggactggatgttcacataaaggctaattttctgatagcaaaaacaaaaaattattaataggatattttgtagcatcttccattgacaatgttagttctcaatggtgagtgaggaccattgatggccctcgctggccaggctttcagaggaccaggagaaatgcagtcagagtatttgaggaattgagcaggtaagagaatgggcaaggtgccaaatgatgtatccctaactagagggagcaggattgaggaggggaggaacacggggaacagcggggacaaaatgctgatgctgtgtggttgcgtctgaggctcacttcaaggtccgccaacagggaaagcttcagaagcatcaagcatttgaagctgaagtgcaggccaactcaggagccattgttaagctggatgaaactggaaacctgatgatctcagaagggcattttgcatctgaaaccatacgggtgagtatgagtagctcgtggagtggatggcttcatctgggtggagcattgtagattcatgcatacatgtcagtttgggttcccaaaaagatagacttttccagcttttaaaagaatttatgaagtctccttaagaagttacccgaatcctgcctttgtaatatgacagcatgaatgcaagcgtttgtatactcagtgaggaaattaatattccttttgcagagcaaattagaatgtgattatactttaaagaaaactgtgaatttaacatttataagtggcagtgagatggcagagcatattagtgaaattggcaaatttaaggactcagatgcaaagataaatagaaacaagcacagacactataaagaaggttatctgtgggaaagcttgctgtcttgaatcttggcttgccctgggaggggtttacgtctaggcagcaagcctgttaaagctccagctctaaggaatgatgtgtggcacctattggtcaatgaccatggtgatgggactgactttgaggcaggagtcctggaactctttggtctggctgattttagtgcgagtttattggagctgaggtagtaattgatctttctctgcttcgtttcacatatctagtatgaagatattaagggaaaacaaacctcttgacagtgaggtgtgcacgttgagtttcttataactggatgtacttatctatctttgatatacatcatgtctagctgtgtgttctctttggttctttgtcatccaaagccacattgcattgaggcccagccttttctagtcttttacctgtcaaagcagtcctgaagatttaaatgaaagctgcacccttaagccccagctagaactgttttgtctcctactcttccttgataactgtgtggaggtttcgttcactgaggatccagtctactcattttcaacaataaatgtttgttgtctcacgtttgcttggcaatactctacagtctcatattaaggacttacaattagccctaagatgtatgatgaataattattaactattactaataatgatgattgtaaataggaaataaaagtgaattccaaatgtcatatgactaataacatttaacccatttgggcaatgtaatatgtgtttgcaattaaatacagatatttatcttcccatcttcacactattttatatacagtcttagagtaaatgaaatcagtctgcgttattatttccttgatagaagttgttttcccagagtgaatgaggcacctctgtagtagaatatgtaaccagcttacagatggggaacattggacagagatcaagtgtttggcttcagtaattaaggcggaagggaggaggacctaaagctgactttattcatgtctattagtaccctctgccctgtttagacagcttatatatatatatatatatatatatattttttttttttttttttttttttgagacgaagttttgctcttgttgcccaagctggagcagaatggcaagatctcagctcactgcaacctccacctcctgggttcaagcaattctcctgcctcagcctcctaactagctgggattacaggcgcccaccaccatgcccggctaatttttgtatatttagtagagatggggtttcatcatgttgaccaggctggtcttgaacttctgacctcaggtgatccacctgcctcagcctcccgaagtgctgggattacaggcttgagccaccgtgcccagcccagatggcttatttatttatttatttatttatttttgagatggagttttgctcttgttgccccggctggagtggaatggcacgatcccggctcactgcaacctccacctcccagtttcaagtgattctcctgcctcagcctcccgagtagctaggattacaggcatgcgctgtgccaccacagccagctaattttgtatttttagtagagacagggtttctccatgttagtcaagctggtctcaaactcccaacctcaggtgatctgcccgccttggcctcccaaagtgctgcgattacaggcatgagccgccgctcctggcctagatagcttattaaagcaacattaacaatactgttaactggccgggcatggggctcacacttgtaatcccagaactttgggaggccaaggctgaggcaagaggatcacttgagctcaggagttcaaaaccagcctgggcaacatagtgagacctcgtctctacaaaaaaaatttaaaaattagtggggcgtggtggtgcacacctgtagccccagctactggggaggctgaggtgggaggattgcttgatcctgggaggtcaaggctgcagtgagccatgattgcacccctggagtctagcctaggcaacagagcaagactgggaaaaagaaaaaaaaaaaggccaggcacagtggctcatgcctgtaatcctagcactttgggaggctgagatgggcggatcatctgaggtcaggagttcaagaccagcctggctaacatggtaaaaccccgtttctaccaaaatacaaaaaattagccaagcgtggtgttgcgtgcctgtaatcccagctagttgggaggctgaagcaggagaattgcttgaactcaggaggcggaggttgaagtgagccgagatcctgccattgcactctggcttgggcaacaagagcgaaattctgtctgaaaaaagtaaaaaaataaaataaaatttaaaaaacctattaaatatagtttgttgagtaggtattaggagctatttatgtacagttactttgctaacctctgatcttcacagtaagtgtgcaaggtggccattatttccctattatgtgagagtagaaactgagtctcagagaatttgagtaacttgcccaaagtcacacagttgatagatgactgaactggaatttcctctatccccttctttgtccagtcaccactatttgttttattttaatttattattatttttgagacagggtcttgctgtgtcacccatgctggagtgcagtggcacaatctcagctaactgcaacctccttccaccaggctcaagtggttcacccacctcagcctcccgagtagccggcaccacaggaacgcacaagcacactgagctattttttttgtatttttagtagagatagggatcttgccatgttgcccaggctggtcttgaactccggagctcaagcaatccgcctgcctcggcctcccaaagtgctgggattacaggcgtgagccactgcacccagcctgtgtgctttatttttccaacctgtacttcattcctgtcttctttgcttaatgtttccaccatctgcttctctgaaggctcctgttgcttgcttatgtccctactgagaaatccacctgagtcagaaccaggcttgcttgtccaccccgtcagctttccacatgtttatgaagtgcacctgcctccctgcccactcacgctctcaaataatagtaagcctgtgaagccagactctctctaacctgcagtatttacaagatcagacacatcagcaatgggacaatggttccagtactgggacaggccttgccctagttctttcttgagggtgtaaaaatgaaatatgtgagatggacaattgacttgaatgtgagaggattttctctagtcttctgtggcctcatttttaatttgagcaggagctctcatttaatcttttactttcatgctcacagttactatggtgatcttggcttggtcatttatttggtcccctaactcagtaccttagtttggcagaaagtggtagcagaggaaggtgggtggcatgtgagggcatgtctgtgtcctggataacctgtctgtcactggtttagactttcacaccataccggacagcgtggcgccccatagtcaccgccacccacatcgggtcccacatccgagtaggtggagtattgacttggttgccttttcccccttgctttggagtgcctttcacttctttctcagtggtggggtcacagttttgccaacagtggtggaagtgaattgtgtgagcatgtattcctctgctgctttctcctttcaagtaaaacatccacacttgtttctaagagaatccacccatgttgactgtcacatggttttcaggttttcattttgctaggagtgacatctcaatcatgggtggatcccagacttcttttctgttagtgtttaaaccgctttgtttgttttacttatgtctgtcagtgttgtacagaaactcccagtatcttgggtaggcataatcaaggcattgaggttggattggaataccagaatgcatcatctaagcttgaattgattactaatttcctccaattcttgataagtccttactgggcctgtgttatgagaacccaaagatgctgggaagtgaatacgtttgaccctgtggctgccacttgggtgaagtttggaataaacctcacttgagatgtaccacaaactgtcttttcacagaaggtccaaagttttttctatcagggatcctttttgatagctgatgacttttcaggaccccatcttttctacttttttatttttcccgagatggattcttgttctgttgcccaaagctggagttcaatggcacaatcttggctcactgcaacctccacctcccaggttcaagcaattctcctgcctcagcctcccgagtagctgggattacaggtgtgtgccaccatgcccggctaatttatgtatttttagtagagacgggtttcaccatgttggccaggctggtctcgaactcccgacctcctgatctgcccacctcagccttccaaagtgctgggattacaggagtgagccactgcgcccagcccttttctactttttttttgagacggagtctcgctctgtcgcccagactgaagcacagtggcacaatcatggctcactgcaagctccaactccctggggtcaagtgattctcctgcctcagccttctgagtagctgggattacaggtgtgcgcccccatacccggctcatttttgtacttttagtagagatggggtttcaccatgctggccagactggtcttgaactcctgacctcgtgctctgcccgcctcggcctcccaaagtgctggaattacaggcatgagccgctgcacccagcctcccctttactacttttccaccaagattttcctgttgtgcctcatagtttttacattgatgatgcctataagacctcttcttttgtttttttccctttatctccatgaatttggaatacatccttcagtaatttcagctcagtttacacattaattcctcatttttcctttcccagtagtcttctggattaggaattccactctaataatttaataataattaatagtatcaattgtgtacctattattatataatactaaaatatataactatacaatataaatatatcataaatataattataaatgaaatataaagatattattaataatataaatgataatgattttcctgatgtaaactagagtaaatctacctgtgaaagaactagagtagatctacctacttgtaacttgaagaccaccaaaaaaccactgtgaactgtggacttttccctactgccagttaaatttactatttcctctcagtttagggattatcttttaaaaatatttttattcagcgctccataaggtctctaacttgtctaaactctatggaagagccagatcccacagagccagttgtgatctgattaaaactctgatttgaaactttcagacccgtttgatggagctgcaccgccagtgggaattacttttggagaagatgcgagaaaaaggaatcaaactgctgcaggcccagaagttggtgcagtacttacgagaatgtgaggacgtgatggactggatcaatgacaaggcacgttttgggaagaagggtttgctaagctttactcaaagaaaagggaagagactcctctgtgatctgtagtgagacccagtgttagcacagatacggccattttaagtaaaagggtggaagtggggttgctgtctctccagctgctctctaggtgtatgtgctattctgtaactctgaagcctggagtcgctgagacagaaatgccgtgaactcaacctcttaactttctgtgggaggaactaaaatcacaaaccacagacaaaactgtatccattaaagctaacatggctccgtccctaatgtgtctgtttgatgtttctggaagccattgttaacaaatgttggttggtgactctggctctcttatggtccctgaataggaagcaattgttacttctgaagagctgggccaggatctggagcatgtagaggttttacagaagaaatttgaagagtttcaaacagatatggctgctcatgaagaaagagttaatgaagtgaaccagtttgctgccaaactcatacaggtaaatagcaaagtgctgtatgcttctcacaacattattatgttaactttttagtatattcaggataaaattttgatgattggtcccctaatttctgagtgagcaagtttttgtaagcatgtctgagagttttgtttagatgtgaggcacaatactgattactcctaaattggaaaatgcttttcaatgtgttgccttgggcaggaagggcagagttcatttgatctgtttcctctacccacttttgggtagggctgggtgaagcttttattggactgctgaagctaggtctcagggtttctcagacgagggtgtggtggtgaatgctaagttagtattggcagatgtccaccaatgcattagggctcttgccttccttttttatttgaagcttccctgggctctcttgggagcctgggagaaccttgtcgtgaataggctctccactctggcgctggagcccattaagagggaatgacaacccttccccagtgcccacgtgtacaatcctgtaagctgcttccactacgagtccaaagggttccaaagacatcaagtactcggaaccagagagtttttacttttagggaaatttgatttggggggtacaaattttaagtgtataaatctgcttataggctggtacttgtttccattttctggccagtgattaagagaaagatacccggcattcctcagaaatatctcacccttccacagtgacagatgtgttgcttttccaaaccctaagctttcctgcggttgagcttgagaaaagtagtcaggccaaacccatggtatcccagatggattcaagaaccctgaaatgcttcattttattactttgtatcatattttttaaaacaccaaaatgtggttggtagggaaggatacttttaaagaaatgtctctaagcttgatgcagtggcacctgcctatagacccagctactctactcagactcaggctgacaagacaggatcacttgagaccagcctgggtaacatagcaagaccctgtctcaaaaaagaaaaaaagaaatgtcgtcagtctaaagccagggacaaactcttgagccccgaaaattatgtttatgtgcaagaatgcttaacagcctcatgaacatctgaaataccaaattttcaagcagttagggtagatgagtacattgataaagttaccacacagttgttgccaaactatttattaacataaaggtttttggcacttttgcacataaccaccttatagactaaccacactactccaaaagatagagaatggctctcccctttttacataagaaatagaaactctttggagttgtagttcactttgtatcatgttgaccattatttcttgtgattctcttcagagtggtgatttgctgagatgcttcaaggaaccaaccccagggtaactagttggaggagccagaagttgtgtacaaatccagtctcttctcttccttgtttaggagcagcaccctgaggaggaactgatcaagactaagcaggatgaagtcaatgcagcctggcagcggctgaagggcctggctctgcagaggcaggggaagctctttggggcagcagaagttcagcgctttaacaggtgtcaagccagagtgggctttggggaatgggtctcaacctggaggggagttgtgaagcacagggcatgtgctggtgagctgtcgaggctgactaggccttggtcccatggggtgttcctagttctagggagtcatcattgctgtggattaactggtgcctttgttctgtagggatgtggatgagactatcagttggattaaggaaaaggagcagttaatggcctctgatgattttggccgagacctggcaagtgttcaggctctgcttcggaagcacgagggtctggagagagatcttgctgctctagaagacaaggtgggttttacaagcagctgattctgtaaataagttaccaagggtcaggagaatagttctgacggagttcatttctaggtcaaagccctgtgtgctgaggctgaccgcctgcaacagtcccaccctctgagtgcaacacagattcaagtgaagcgagaggaactgattacaaactgggagcagatccgcaccttggcggcagagagacatgcacggctcaatgattcatacaggtgcaaataatgctccaggtcttaaccagtatcatttggcttcttttttggaagcaggaatagcagagttaagggtctgttctgtgttctgtgaaagtgtcaggtatcacctacaaatgcaaatcacttcttacctatgttctctctgtttggagactggcaactgtatcatgtgtagtatacgtatggtatttacaacttcataaattcttctattctgcatcactgcattatgattgatagaatgggaatgtccctttaagtatctgagtatcacatgaaatatcttattaaaaccaggattagaaaggaaaagaatccttgctagccaagggttgaacctgggaataacaaggaagttgaaaatgtgggacaggattggggcattatagtgatggagagaacctaagttttaaagggttgatttcagccttctcttgctttccttcacagtctagattgggaaattttcatatttcccagaattagaatttatatagtttgttagacatttgagaacatagaattcagagctttagggaggccattttccaccctggaacctccgctggaaacataatgtcttcctttggttttccctaggcttcaacgcttccttgctgacttccgtgacctcaccagctgggtgactgagatgaaagccctcatcaatgcagatgagcttgccagtgatgtggctggggctgaagccctgctagatagacaccaagagcacaaggtaatggtatctctagaatcttccagaagtgaagattttagcttataatgcaccagtttatcagtgttgggtgaggcctatagtcggcgttggtaccatgttattcacaggtgtttctcatcatgaggattatggttggttttgcctttggagacctggtctacctgcttctgatagaggcttaactgggttcagtgtcaagaggttcactgtggtccataaaagcaaacagacaagctctggcgagatagaagtgctactacttggcacattgatcctttgtgatgtaaaaagtatttgttgggccaggcacggtggcttatgtctgtaatcccagcactttggaaggctgaggcgggtggatcatgaggtcaagagatcaagaccatccatgccaacatggtgaaaccccatctctactaaaaatgcaacagttagctggtcatggtggcacgcgcctgtagtcccagctattcaggagtctgaggcaggagaatcgcttgaacccgggaggcagaggttgcagtgagccaagatcacaccattccactcccgtccggacaacaagagtgtttcactctgtctcaaagaaaaaaaaaaaaaaaaaaaccttctgagaggttttaatgtgctagatacaaaatcaatatactgaaagtcaaacatgtttctctacactagcaacagaaacataatttttaaaaatactacttattagagcagaaaatataaagtacttaggaataagtctaacaaaagagtgtaagacacttctggagaaaactataaaactttgttaaaaggcattaaataaaaactgaatagatagaatgatttatctagtacacagatggaacgatcttctgtgaaggtgtaaattcccaccaggatatataccgttaatgcagttccagtcaagtgctcagcaggtatatgtgtgtgtttctttttgcaatgagataagctgattccaaaactgatttggaagaaaaaaattcaaaaaaagctgagacaatgttgaagatcataatggggccagggagggactcgccctaccaggttctataaaatcatagtaaacaagtccatttggcacaaagaagacagagccctggaatgaaagagagctcagacccatgtgaatgtgtggaaccttgacaaatgacaggtgacctgaaaagccatttggaaaggatttcatcagtgagtgatactctcacatttgatgacctagactgattatgtattaggaaatctggcctaatctttcattttgtttctcattttagatgtcatagtctggcttataatgcttatgtaaaattcagcaccttgtttttattttgtaagatgctgggcacaaatcatggctttgtttttttctcctgtagggtgaaattgatgcccatgaagacagcttcaaatctgcagatgaatctggacaggcactgcttgctgctggtcactatgcctcagatgaagtgagggagaaggtaagagaagagaaatggagcttttgaggagcaaattacacctttcactaagtctctgaaagctattattcatccttaaatatccagagaacgcattcaccatgatatgtgagaaactttcctttctctgcagaggtttaaaaagaaggtatatgtatagtgtgctgatttcctgagagacagtcctccttatctggggcatgtgtggcatgtttcctacttacagggactttctgtagggagctgagtcttgcattaggagttggagcaaagaggaaacaaatttttataaaatgatacataggccaggtgtggtgtgaccccagcactttcagaggccaaggcaggaggattgcttgaggccaggaatgggagaccatcctgaacaacatagtgagacccccatctggacaaaaaattaataaattagccagacatggtggcacattcctatagtccgagctacttgagttcaaggttataatgagttatgatttgcaccactgcactctggcttgagtgacagagtgagaccctgtctctaaaaaaaaataaataaataaaaataaaatatgtatatatatacatattttattttactttttttatatgtgtatatatatacacatatgtatataagttttgaagtatcttcgagtataaaattgcctaggaacattagataaataatgatttatatgatttatatgttttttagtattacatagagtaaagacatttcaaagacttgtcattagtagcttcggagcctaaagtctagggagtttctgaatttattttccatatgttatggagcacccactcagttgacatttcttagtggagagtccctactccatttatactccattaaactccatttatactgcctcacttttaaatggatgccctatttcttctacctgggagtttacttactgtttttacctaaagtcatttgtgatcatttggcaataaattaattctagattaattaaaacaggccatcccttttatattgaacatgcacatacaagtgaatgttgtttttccccttttgcaaatcggaaaaaaggcctgaagattagcactaggattaggaattccaggatagctgttctgtctgcctcggaggcattggggctgacctcatctccctgaccatgtctcctatgcccccaagctgaccgtcctttccgaggagagagcggcgctgctggagctgtgggagctgcgcaggcagcagtacgagcagtgcatggacctgcagctcttctaccgggacactgagcaggtggacaactggatgagcaagcaggaggtaatctgtgagcaaagccttgccagtggtgggagaagaagggcctgtgttttgcctcctcgggtagtgtgcttgttttgttttaggacatcagtaccatgttagttctgaatccattgaagagggggaattgagcaagcttctctcagctctgccagcatctctccctgctgagattgcaaggccttcagaaaaggccccagcttttcagattagtgtgatgtaaaatgttttattaaagagatttttttcttagaacttagcattgctgggtgcagtggctccctgctgtaatcccagcactttgggaggctgagatgggagtatcccttgagcccaggagctcaaggctgcagcaagctatgatcgtaccaccgcactctagcctgtgcaacagaccgagatcctgtctcacaaaaaaaaaaaaaacaaacaaaaaaaacaaaccttagcattatgtaacatctgaatctaatagaagcaacaaaaactatgtaagagaagtttcaatagaatgtggaataggatttcatgatatggctggattgattttaagaaaatccaaaaggactttagacttcctagaagagatcttagaagtttagcagccataaaatctctttccttctttttatattttggccaaaataccctttgcttcacagtcttagaagatcaaaggaataggacattattctgaacactttgtttcctttggcaaggcgttcctgttgaatgaagacttgggagattccttggatagtgtggaagcgcttcttaagaagcacgaagactttgagaaatcccttagtgcccaggaggaaaagattacagtaagaccccttcttgtcagtgctttcaaatgacccttatagtaagccagagtctttttccctggaaggattccaaacagatttgatgaaagattcatatgcagagtactcctgtgggtgcttaaactttcacaaggatgacatgctatctcgttgaagacataatacaactttatggaaaaatgatttacttaatggaaacctccaaacttctttaagtttgtacccttcattaaaagtaggtcagggttaatattaagaggtactcttcccattgaaaatacatcttagaaataagaatttggaaagctgttaacctgtgtttgacccctgccaggagatcgtgccacaactaatgtctccagtcttgaatggaggtagtgcagtcttatgatatctgactggtgacatcaagcaaaatctcaaaagttatgagaaaaaatgtcatcaccaacctttgggtgaaaaccttgacctatgttaaagtttggtgtgttttatgatctgttcagcagttacttttctccagaggccaagcttgggactagtgtgcttaccaatgaagaactcttatcttccttcctaggcattagatgaatttgcaaccaagctaattcagaacaaccactatgcaatggaagatgtggccactcgccgagatgctgtaagtttgtaggttcttcatgctcctcctttttggtacatgaatgtctcttctaagatgttccagttaagtctcttcaactggatatccctttgggagtgaacactagagactcacaggggatccttgtctttcagctgttgagccgccgcaatgcccttcacgagagagccatgcgtcgccgggcccagctagccgattctttccatctgcagcagtttttccgtgattctgatgagctcaagagttgggtcaatgagaagatgaaaactgccacagatgaagcttataaagtaatgtactgttagtgttgccatgtagcactcgattagtaagctaaacacagctctcacaaataaattgtagctaaaggacgaaataagggattccagaaaccccactacttaatgtaagccaactgttttatacattcctccataaagataagtatgaaggtagtgcaagggaacttgacgttctcaggttcaagatagaaagaacccccttcttttattcacaggatccatccaacctacaaggaaaagtacagaagcatcaggcttttgaggctgagctctcagcaaaccagagccgaattgatgccttggagaaagctggccaaaagctgattgatgtcaaccactatgccaaggatgaagtggcagctcgtatgaatgaggtgatcagtttgtggaagaaactgctagaggccactgaactgaaaggtaagagatgttccattgaattgtgacatgcatgtttggggaactaaatacccctttctattaagtattttagggacatataccccccaagaaaggtgaggtggatgactttggcgttagggataatttcctgtgtaggaattacttggcttaagttcttgataataatttggtaaatgtggtcgagcatactggttggtgagggagtctgagtgagaaggaactgaattgggcctcattgctgaaaatcaaagttcagctgagagccaagggcatttactaattctccagtgtccttatatctcaagggggttagaatgcttccagttcaaccttgagaaggtagagcagaggctgcaattgatattttctttctctttgtgacataagtgaaggaataaaattctgacctgtatagtccttcactaagatactactgttcatgggcagtgttggcagaagggtaatgctaagcagtacaaaattaaacttgttttcttccataggaataaagcttcgtgaagccaaccagcaacagcaatttaatcgcaatgttgaggatattgaattgtggctatatgaagtagaaggtcacttggcttcggatgattacggcaaagatcttaccaatgtgcagaacctccagaagaaacatgcactgctagaggcagatgtggctgctcaccaggtagtgtgaactgggggctgtggttgggcaagtgaatgcagaaactataggagggaggaaaagccagtaatttgagactaaatgaattttgggagggatgaaatgtgttgattttcttagatcgctctgtgctgcatgtgcttctgctcaaattaaatatcatcccttagagctttctaggagccccagatgaaggaaggagatagcagaaagaatcctctcaggaatggaaaaaagaccttatcaatttttctctgtatacgataaaaccacacccaaagtaaagtctgctctgtccttttgcattcccaggaccgaattgatggcatcaccattcaggcccgccagttccaagatgctggccattttgatgcagaaaacatcaagaagaaacaggaagccctcgtggctcgctatgaggcactcaaggagcccatggttgcccggaagcagaagctggccgattctctgcggttgcagcagctcttccgggatgttgaggatgaggagacgtggattcgagagaaagagcccattgccgcatctaccaacagaggtcagtctgcttccctcaggtaggaatcaacttgggaaaggctgtgctattgtagcataaaggggatgcatgtcaggatgggcagggtcgaatttaaattattgaactggaaccatggtggtagctaagaatgacaaatcagtgctgacttttctcttcatggttggataactggggactggtgtctgctttcaggtaaggatttaattggggtccagaatctgctaaagaaacatcaagccttacaagcagaaattgctggacatgaaccacgcatcaaagcagttacacagaaggggaatgccatggtggaggaaggtgagtgattggtatcagtgacatggcttggtgctgctcctcgtgtctccccttcttgccgagggcatggccacgtgggcatcacaaaccaggctctggggctgaataccatccccattctttcctaactgtatgacctgaccagaccttaccctttctgagcctgaatttctttttttttttttttttgagacggggtctcactctgtcacccagggtggagtgcagtggcgcggtctcagctcagtggaacctctgcttccctagttcaagcagttctcctgtctcagcctcccaagtagctgggactacagggacacaccaccatacccagctaatttttgtatttttatttttgtatttttaatagagacagggtttcaccatattggtcaggctggtcttgaactcctgacctcaggtgatccacctacctcggcctcccaaagtgctggga

SEQ ID NO: 793 - DNA, 5270 bp, Homo sapiens; identical to SEQ ID NO: 683
  source 1..5270: mol_type = other DNA

SEQ ID NO: 794 - DNA, 32744 bp, Homo sapiens
  source 1..32744: mol_type = other DNA
gggcggggcgcagcgggcaggcaagggcggccgagcgggcggcgggcatgagcggggcgggcagggcgctggccgcgctgctgctggccgcgtccgtgctgagcgccgcgctgctggcccccggcggctcttcggggcgcgatgcccaggccgcgccgccacgaggtgagtgcacacctcctaccgccgcccggccggctacgagcgcagcgtctcctctccgcggcgccgcccctatctccgtgcgcggcgccgagcgctaggccgggccggaaccgcccccgtggcctgggctgttgctgcgacttcgcggtcccgcgccccagaccggaggccggacttcggggtgctgcggccgggccccgcggaggcgggggagggggcggttcggaccgcggcggagtggaacctgggcgcccaggcggcgcccaccccagcggagcctgcgtcctggcgccttccgtctaaacagaggccgcggatcgggacgccgggaccccacaaactggcagccaggaggcgggccagccgaggatcgggggggctcggactccccctgcacccagtccactgttcggagggacttagagcagggtcccttccctgagggcctcgcccccgaggacgtggcgccggagccgtgcgacccattggcttcagcgggtgggaagcctggggccgggacgcgcgttcgccccgcgctggggttgaacctgcgtggatgtgcggcgggtgaggaaccgcggagaaggcggtgggggcgcggcctgcagcccggtcccgggcgagccctccgcgcgtctcccctcggcgcgttttccctccagggtgactgggaagccgccgccgccgccgccgccgcctgggaggggccgggctgggcgcttttgccccgggccccggaccccgggcgtttgtccggtgcgctggcttaagaggcgctcagctcataccgtgattgcacaactggcttgctctccgaactcggtggggaaaacggtgacaaatacagattccaggtctccatctagacccctgcaccggggagccccaggccctaggtccttcgcacacgcccctcccagaggggtcgggcaagcatcgcaaacccctttgggtaggagggacggtgggagtcacctgtctttcccctctcgcgcccttttcttggtcagaatacgaagttttagtgtctgtgtatggagttcaaacgacccctcctctccaagcagaagctggaggagaaaggcgttgtgaattttggaaaagcggctcagaggattacattttgtgcgatccttgatccacccaaccttcatctcctgcgctcccctcctttaaaattgcaaggaccccggggaggttatgtaatctgcctgatcacaatttgtcagggactgatcccgccgaacactctttgcattttagcgccagtattagcttatcaaagggcacttacttttagagagaggtggtttgtaaatagtaatcacacgtagtgaggggaagccgcgttgggaccgcaaggctttccctgtcacctggagcccatgtttgggccgcacagctttcctactaaaaacgtcatcatcttccttctttttgaaaattcagcatttgcttgaagaaaaaaaaaagtagactatgtctttaaaaatatgcccagcaaagataactcacgagcagagagctagaccagaaattaaatatttggaaaggaaataaaggtgtaatacacaagcagcacatttatccccgcaccattggaaggtgactttatttggtaatttgcccaccaagacgaggtagaccagaggagagagaaggaaataattgttcttttgtctgtaacgctctgggggtattgccctggaatttcttaggtcagctgctgtgtgggaaggtgacagctttttcttgaagctgaacatcaagctcagtttcgaggtcatatttgatgacttatttgatggcttagtaattgggtcctttggtcgtgtctgtaagtgatacagactgttattattatttttaaaaaccacattcaaataatgcaaagtgaaaaaaaaaggtgtcaaaatccgctggcgttactctgacagtctctagctgtggttccctagctgtggtcttcaccctcggctgcacactcgaatccctttgggaggttcgttgttttttgtgggaaattaaaaaaatcatgctgattgggcagagattctgatttaattggtctggaatggggccagggcattggtaacttttgtagtttttttagagcttcctcaggtaattttgacattcaatgaagactgagcccctctgcacattcccaaatagcatagttagtaacaatgacaatgaagagctttcagcctaaaattcgtgtggataatctaagtataaaacaagtaccttattccgcccaccaccaaaggcttagagaaacatgagtacacacagtacttattccatctacgaagggatgatgatgtgtggagaaattacgaaggaaaagctcatggcttcatggtctcttgggtatgatcaagtgtaggaaaaagtctacagagagtgactagaaatgtgaaaatggaagccattaaaactgaagaagggaaatgaaaaagaactattttaaaacgatgacaaattgacaaaggatttaatatttttgtctttaatgtagagaagttatgcaaatacctcagaaggtgtcagggattaaataaaggtggttaaataaataaatgattcaggaattaatatgaaagtcacatactgatggtaaacatttggaaaacatgttcaaacttgttaatcacaaattcaaaactaaaataattaggacgtgccattttctatccaccaggctaacatatgagggaaacatggaaaggctaatctggctgggcttatagggagggatctgttgaggctcaggagactggttagccgttatgtgcacagttagactgacctcagcttaaatcctggctgctagtaggtgactttgggcaagctgcttgacctcttcaggcctcagatgcctcatcccaaaatggagacaccaggagctatttctttctttcttttttttttttttgagacagagtctcgctctgtcgcccaggctggagtgcagtggtgcgaactcagctcactgcaagctccgcctcctgggttcacaccattctcctgactcagcctcccgagtagctgggactataggcacccaccatcacgcctggctaattttttttttttttgtattttttagtagagatggggtttcaccgtgttagccaggatggtctcaatcccctgacctcatgatccaccctccttagcctcccaaactgctgggattacaggtgtgagccaccgtgcctggcccaccaggagctatttcatagggctcttggggcctggtggttctttggtaagtgtggttctttgtattacctgggagatctcaaccatcacagttgtcattagaaatcagcacaactgaattggagagaaattttgtaatgcatatcagaagctattcaaaagcctgtttttggttaaagattttactcttgggcccggtgtggtggctcacgcctgtagtcctagcacttttgggaggtcgaggtgggcagatcacttgaccccaggaagttgagaccagcctaggtaacatggtgaaaccctgtgtctacaaaaaaagacaaaaaaaaattagctggatgtgctggcatgcccctgtagtcccagctacttgggaggctgaggtgggaggattgcttgaactcaggaggttgaggctgcagtgggccgagatcttgccactgcactccagcctgggagacagagcgagactctgtctcaaaaaaaaaaaaaaaaaaattttaactggatgttcccgatcctgaagaggctctgttggtctctgcattggttggatgtggcctggatcactgtaatgtctatgtgttgagcacttgtttctgtgccagccactttgtagatggtcaagtttagatttcccaacggtttcatgaggcacatactcttatgacccttaatttattggtgaggaaactgaggcaagttgggcttcagattcaagtttaacttgaatttatcccactatgtcatactccaggtcccaaacatcgcttccactgaaagctttccaggagaccaaagaacagaaaaaatgattgtgaaagctttctttggcctagagaaccaaaagctatagtggattattattattattattattttgctgaaagctttatttgttctcacttagggtaaatgaaaaatttcaagatttggctacaacttcattctttgaaaagtaatgttttacagaaagagaggttaggggtactggctctgaagacaaagcttagattcaagcccagcttcaccacttacaccagtcccctgattttgccgtttccttgtgatataaggcactcaggaacacaagccaggcacacagtaagtgttcaggaagtgctggcattatgaagttcaaacagcaccactggtaaatgaagttcagatttcagaggtggagactgtgtatgcagcctcacagctaagtggatgccatggtgaaatgtttagatcataggcctttgagaagaattatcagaatgttagaggaatgggcctcccttggcacccagaaataaacgttaaaggaggctatttcatcatataacaacttccgaacttctagaaaagtgaaaagagaggcttgggtaaggaagatgaaagccctcccaccaccctgcgtgctgacctagggcatccttccttctactctgttgttagatcctcatgatggccaaaaaaaagcattctttaacctaaagcatccccatggctcaatctctaccccttcatcaccaaggaaaagccagctctagtggattaagagttttatactgcagggcttgtcttcactgagagctaaataagggtaaagtaagataaacttaaaaatgagggattgaggcccggcacagtggctcatgcctataatcccagcactttgggaggccgaggcaggcagatcacgaggtcaagagatcgagaccatcctggccaatgtggtgaaaccccgtcactactaaaaatacaaaaattagctgggtttggtggtgcgtgcctgtagtcccagctactcaggaggctgaggcaggagaatggcttgaacccgagtggtagaggttgcagtgagccgagatcgcgccactgcactccagcctgggtgacagagcaagactccatttaaaaaaaaaagaaagaaagagggattgagctggctacgtgaagaattcatgattctgccattcaaatgagtgactagggagcccagaggaagctttcccattacaaaatagagaccgagttcttaccttcctcattgtgttattaagtagttccccatttttttcttttgggtaaatttactcagaggataaattaacttctcttttatataatatcatataaatggcccagttggttgacatgaaccactctgctttgacttttagacaagagcagttcactttatttttcctaccaaattggcacacgtgattttagaatgtgcgtcatctttctgtcatcctcagcacatcatctagtgaactggtgagctgtgtgagtttctggattggggcatgctcccaatccaggattcactgctcccaatccaggagcagtgagtttctctgcccttcagactgaggcttgtcttaaaactgtctgcttacccctctccgatctgccatggaaattaggatattccaaactccaaaacaaagtgatagaaagcagcacttctcaaactttcaagacacgtgcaccccgcccctgggcctcgctaacctgtctgactcaagcaggttctgcatttctaacaagctgcctggctacaatcgcagctcagtaacgtggtaggggagaaagcttgaactttagagtaatacaaattgggttcatatcaattatttcattgaaaaaccgtggtcacaggcagttatctaattcttgagaggcttaatttattcatctgtaaagtggggaaaatacctagctcataagattgtcattattatagggaaactactaaattcagtacatgtcacatcttagcactcgatgaatataagttccttacacgatcctttgatgcactagatttgagtggtgttgactgaatcctcttgtagtagagacatctgtgcaaaaggagacctgtgtgtgtgcacatgcatgcatgtgtgtgtgtgcacatgcatgcatgcacgcacatatatctgcgcatacacaaagtaatgtgtgagagaccccagaaatcccagagtgtaagcttttgagaagcactactggaagcaactgttcacacgaatgtactttgtctctaacacatctttcgggtgccttttttttttttttttaacttttcctaatttctaccagacttagacaaaaaaagacatgcagagctgaagatggatcaggctttgctactcatccataatgaacttctctggaccaacttgaccgtctactggaaatctgaatgctgttatcacgtatgtatcagttcacactcagttctgtttgctttggggcttgtttgatatgatccttaatgctctcatgtctaaagcccttcacaagttaatttcagttttgcagctaaagaaacaaagaagctatataaagagtcggaagaaatacagtcaggggaggatgcctaggaatgcacagcatctatttttatcttttcatctactcatcctttaaaaagccagttctcagggatgaacaaccttgatagactatgttttattttcctcctctctagtgcataaccctcttgctggaccagagaaggaaggagtgagacaccagggtattctccaggggccagcagagtggtgcaagttgagggagtggcagttattccagggccctgcctccctgatgataacaaatgcattttctctgaaggttttactcctattctagaccttgttgctttttaaggacaaggctattctttcatgtaaaataaaatattctactatgcaaccataaaaaaagaatgaaatcatgtcctttgcagcaacatggatgcagttggaggccaatatcctaagtaaattaacacaggaatagaaagccaaatactgcatgttctcacttctaagtggagctaagcattgggtacttatgaacataaaggtgggaacaggagacactagggactatttgggctgcagtacccaagcagtactgaaaaacttgggtactagagctgagtagtacctatagggctgaaaaattacctactaggtactgtgctcaccacctgggagacaggatcattcatgccccaaacttcagcatcatacagtatacccatgtaacaaacctgcacatgtgcccctgaatctaaaataaaaattgaaatgataaaatgtttttgccaggcacagtggctcacgcctgtaatctcagcactttgggagaccgaggtagggggatcacctgaggtcaggagttcgagaccagcctgaccaacatggagaaaccctgtctctactaaaaatacaaaattaccgggcatggtggcacatgacttgtaatcccagctacttgggaggctgaggcaggagaatcgcttgaacccaggaggtggaggttgcagtgagccgagatcgcgccattgctctccagcctgggcaacaaaagcgaaactctgtctcaaaaaaataaaaagaaaaaatttttattgccaaattgagagcttcgttatacctaccatcagaggttgaattttaatttatatttatatttaatttatattaaatttatattaaattcatatatatagtaatgctatatcaaggtgttatgctgtcgtcaaggtgttaggtgtagggcaagtaagaccattattagaataaaacaagtaggatcattggcatacaacagtgatgctgtggacaaattaaagaattaaaaaagaggccaggcatggtggctcacacctgtaatcccagcactttgggaggccaaggagggtggatcacctgaggtctggagttagagatcagcctggccaacatggtgaaaccccatctctattaaaaaatacaaaaaattacccgggcatggtagcaggtgcctgtaatcacagctacttgggaggctgaggctggagaatcgcttgaacctgggtggaggcggaggttgcagtgagccgagatcgcaccattgcactctaacctgggcaacaagagcgaaactccgtctcaagaaaaaaaaaaaaaaagaaagaattaaaaaacaggaagacaggccgtgcacggtggctcactcttataatcctagcactttgggtggcctagtgggcagatcatgaggtcaggagtttgagaccagcctggccagcatggtgaaaccccgactctactaaaaatacaaaaattagctacgcacagtggtgtgtgcctgtaatcccagctacttgggaggctgaggcaggagaatcgtttaaccccgggaggcagaggtggcagtgagctgagatcgagccactgcactccagcctgggcatcagagcgagactctgtctcaaaaaataaataaataaataaataaataaataaaggaattaactacacgagactgttttaagaaaaaaattgccgatttatttaaaagagcatggagataattatgtcaggaaaatgtataaagaagtgacacagggtttgtatttaatcatagtggtagaaaatatcccattattgcaaaaaagattttaccctggaaactggaaagacacttatgactcttttaactagagactgataaaattatgtctagacataaacttttaaattttgaaatttaatgataatttttaaaattttaggccgggcgcggtggctcacgcctataatcccagcactttgggaggccgaggcgggcggatcacgaagtcaggagatcgagaccatcctggctagcaccgtgaaaccccgtctctactgaaaaaatacgaaaagttagccaggcatggtggcgggcgcctgtagtcccagctactcaggaggctgaggcaggagaatggcgtgaacccgggaggcggagcttgcagtgagccgagatcgggccactgtactccagcctgggcaacagagcaagactctgtctcaaaaaaaaaaaaaatttttttttaaattttaagcagatgtagattataggagacacaagtatgcaaaaaatgcaaattataataacttcatacatttagtaaaccagataataaaaatctggggctgatggaaggatatctttaagatatttaaggtgaaggtatgcccaagagatcagttactagctgagttgaagaatttcctgttctgtttccctctttatctcacttccttaaagtagaaagaccttttattttatttatttatttattttaagacggagtcttgctctgtcgcccaggctggagtgcagtggcacgatctcacctcaccacaacctccacctcctgggttcaagcgattctcctgcctcagcctcccgagtagttgggactacaggcgcccgccaccgcacccagtaattttgtatttttagtagagacagggtttcaccattttggccacgctggtcctgaactcctgaccttgtgatccgcccgcctcagcctcccagagtgctgggattaccgacgtgagccaccgcgcctggccaacatttagttttttataagtaagatgttctcagtatggtaaacagttaatgtttctgtatctttaaaatattgctaaaaaaagaagactgagccctgcgaggtagttcacacctgtaatcccagcactttgggaggccaaggtgagaggatcacttgaggtaggagtttgagaccagctggggcaacaaagtaagtcctcatctctttcaaaacaaaacaaaacaaaaacaagactatacaatgtggaaaatacataaaaaagaaaagatattgtgagtatttaaaattgcttttggaggccaggcgcggtggctcacacctgtaatcccagcactctgggaggccaaggtgggcggatcacaaggtcaggagatcgagaccatcctggccaacacggtgaaaccctgtctctactaaaaaatacaaaaaattagccaggcatggtggtgggctcctgtagtcccagctactcgggaggctgaggcaggagaatggcgtgaacccgggaggcggagcttgcaaagagccaagattgcgccactgcactccagcctgggtgacagagcgagactccgtttcaaaataaataaataaataaataaataaataaataaaataaaattgcttttggaaagagaagagctatatatatatacattagtaaataaagtattaaaaactaaaatattgcactcataaagaatacaatgaaaacttgtactttttgatgaagtagatattagaataaaaggggctagttaagcatttgcataaatagtaaatactaatgctaaaatatgaacaccctaaataaaaaggcaccaaatttatgtgggtccccaaagtacatcgaaaataatggtagcagctaataatacaaaacaaagtcgtagtagagacaaatgataagatactcttaccagggcaaacattttgaaggtttcatcatagagctggtgaactgagctgaataatgtcagggagtgaggtggttaagagcttggattctgcagtccaagtgtctggtttgaatcccacctctgtcacttgtgttactttgggtatggttctcaccttctctctgcttctcttcccctgtgaagctggaaaaataacggaacctgccgctgagctccttgggagtgtttcgtgactgagtgtctgtaagctgaagcagagcgagacctctccacgtgtcagtgttactggcaatagaaataagtaacacgtgtggcagaaattaaatgaaaaaagtagataattaaaaaattcctgtatatattcgtttcacaaaacactcatcatatgttaagtcaaaagagactggataaattaaaaaaagcagggattatgtattctacctcatacttctgcacaacaaagaaacaaactaatataataagggttataatataaatacgagcatttcgttgaaaatctttagatcaggccaaagcaattcctatgaaaaaaatgcatgtaaatgttcataataataaagacgatggtaatagaaattgcagctactgtttcctgaggacttgttcagtgttttaggtctgtctcatttaacttacaacactccagtagagagattctatccaggagagaggatttgctggagatactgaaattaagagaaataaagtgacatttttctgggttacctagctgttaggtggcaaagctacaattcacccctccctgtagctttggaggttggtatttatgttaatcagaaagaaaaggggaggctggatgcagtggttcatacgtctaatcccagcactttgggaggcccaggtgggcagatcacttgaaggttgggagttttgagaccagcctgaccaacatggtgaaaccccatctctactaaaaatacaaaaattagctgggcatggtggtgggcgcttgtagtaccagttacttgggaggctgaggcaggagaatcacttgaacctggtaggcggaggttgtagtgagctgagagcatgccattgcactccagcctgggtgacagagcgagagtccatctcaagaaagaaaaggggaaatgcaaagctattcagtagggatctcaaggtttttgaaagcaaacagtgtaatcatccaaacaaaaagaaaaagaagcaataatattaataaatacataaggtagaaaatgatagcagaatcgaagtaagaacaagctgagaaatgattttttatttttgaggcagggtcttgctctgttgcccaggttggagtgcagtggtgtgtgatcatgactcactgcactctcaaactcctgggctcaagaaatccttctgcttcagcctctcaagtagctaggactataggcgtggaccatgacacccagctaattttttatttaaaaatttttgtggagacaaggtcttgctatgttgctcagactggtttggaactcctggcctcaagtgattctcctgcctcggcctcccaaagtgctagaattacaggcgtgaaccacagatctggatgaaaatgatacatttaaatgagaaaaataaaggttaagtggagagatagccaataaccattgatatcaagactaaacaggaaaaatatcagtgtttcccaagttaattaatatacttaatttctattaatatgtaaatagaattcattatatagtctacataaataatttcaaaattcatatgaaaaagtaaatgagtcagaggatcaaaagacggcccaaattggtctgagtattgtgggttattgttaagctgatttaatattgtctcccccgacaaccatgcttgactagcttaaaagaaaaaaaaaaaggcccaaaaggagattgggcaatgtggagacttgctgtattagataagatatattgtgaggccataatcgtttatgtagccaaaaaagagaaatgaagactaacagaccaatgtaagtgtgagaagtagaatctaatttatgtaagaacctagagtattataactaagaccatggggaaaggtatttaaaattactgtataccatgtatcaagtactccaagaggattcaagttaaaaagtaaacccacaaactaaaaaaaattttaaaaggcagaatacatttttaaaaagttttttttttaattgacataataatggtacatatttatggggtacagtatctcgaactgctgagctcaagtgatccgcccacctcggcctcccaaagtgctaggattacaggtgtgagccaccgtgcccagccaatgtacacgttgggtaatgatcaagttagggtagttaacatttccatcaccaaaacacttgtcatttctttgtggtgcgatggttcaaaatcatctcttcatctattttgcaatatacattacattattgttaactatagtcaccctactgtgccatgtgtcaccagaactgatcccattgtaactgtgacttttacacctgttgatcaacctccatatctcctctttcctactaacctctatttactctctacttctatgaggtcacatttttagcttttacatacgagtgagatcatgtggtatttgtctttctgtgtctggcttatttcacttaacataatgtccattaggcttatccatgttgctgcaaatgagaggattttattcttttttatggctgaatagtattcctctgtgaatatattgcacatttctttgtccattcatcggttgatggatagttaggttgattccatatcttggctattatgaatagtgctgtattaaacatgggagtacaagtatctctttgacaaactgattttcttttcttttcttttttttcttgaaggatgaaaatgagattgatctttattgtagaatccaggccagggggctgctttgaaggcaagaatttcatgctagaaattccttattagccacacaaacttcttgtagcaagatagacttgtattactttttttttctttattatactttcagttttagggtacatgtgcacaatgtgcaggtttgttacatatgtatacatgtgccatgttggtgtgctgcacccattaactcatcatttaacattaggtatatctcctaatgctatccctcccccctccccccaccgcacagcaggtcctggtgtgtgatgttccccttcctgtgtccatgtgttctcattgttcaattcccacatatgagtgagagcacgcggtgtttggttttttgtccttgcgatagtttgctgagaatgatggtttccagcttcatccatgtccctacaaaggacatgaactcatccttttttatcgctgcctagtattccatggtgtatatgtgccacattttcttaatccagtctatcattgttggacatttgggttggttccaagtctttgctattgtgaatagtgccgcaataaacatatgtgtgcatgtgtctttatagcagcatgatttatattcctttgggtaatccagtaaagggatggctgggtcaaatggtatttctagttctagatccctgaggaatcgccacaccgacttccacagtggttgaactagtttacagtcctcccaacagtgtaaaagtgttcctatttctccacatcctctccagcacctgttgtttcctgactttttaatgatcgccattctaactggtgtaagatggtatctcattgtggttttgatttgcatttctctgatggccagtgatgatgagcattttttcatgtgtttgtgggctgcataattgtcttcttttgagaagtgtctgttcatatccttcgcccacttgttgatggggttgtttgtttttttcttgtaaatttgacaaactgattttctttcttttggatctatacccagtagtgggattgttggatcatgtggtagttctattttaatttttaggaaccttcatattgtttcccacaatggctgtactaatttatattcccaacaacagtgtgtaagagtgcccctttctccacatccttgccagcatgcattattttttgtctttttgatagtagccaatctaaataactgagttgaggtgatatcttattgtggttttgatttacatttccctgattattagtgatgtgcattttttcacatacctgttgggatttttatatcttctttttttcccctgatacataatagttgtatatgtcttttgagaaatacctattttgatttattgcccatttaaaaaatgagccttttttttgctattgaggtgtttgagttccttatatattctgtcagatggtagtgtgtgaatattttctcccattctatagcttgtttcttcactctgtggattgcttctttcactgtgcataggcttttttactttagtataatcccatttgtctagatttgcttctgttacctatgcaccagtgtcatgcaatgtttcccccatgcttacttctagtagtttcatagtttcaggtcttacatttaagctgttaatccattttgagttggtttgtgaaagatatgagagataggggtctagtttcattcttctacatgtaaatatccagtttcccagcactatttattgaagagactgtcctttcctcaatgtgtgtccttttttttttctttttttaagatggagttgtgctctttttgcccaggctggagtgcaatggcacatctctgcttactgcagcctctgtcttccgggttcaagtgattctcccatctcagcctcctgagtagctgggattatagacacccactaccatgcccggctaattttgtatttttagtagatatggggtttcaccatgttggccaggctggtctcgaattcctgacctcaggtgatctgccagcctcggcctcccaaagtgctgggattacaggcatgagccactgtgcccagtcacctacttttttgatgtagacatttattgccataaacttctctcttagaactggttttgctgtattccataggttttggaatgttgtgcttccattttcatatggaaacaacatttttagttttaaatttctttttacattttctcaagaaaattttaaatttcttttaaattttttcttttctgagacagagtctcactctttcgcccaggctggagagaagtggtgtcatctcggctcactgcaacctccaccccctgggttcaagtgattttcctgcctcagcctcccacgtaactgggattataggtgcccaccaccatgcccagctaatttttaaaattttttcattgactcattggttattcaggaatatgttgtttaattttcatggatttgtacagtttccaaagttcctcctgttactgatttttagttttattccattgtggtcagaaaagataattgatatgattttgatttttaaactttgtttagacttgtttgctccctttaggtctattaataattcctttatatatttagttgttacaatgttgggtgcaaatatatttataactgttacatcttcctgctgtattaatcattttatatggccttttatataatggccttctttttctctttttacagtttttggcttaaagtctatgtcttttgtattagtacagctactcttgaccttttttgtttccattttcatagaatacctttttccatcccttttctttgagtctgtgtgttcttaaaattgaagggagtctcttgtaggcagcatacagttgggtctgttttttttaatcctttcaactattctatgtcagcagaatacatttttgaattaatgaagcaatagaagaaacaacaagccagattagtatggctatattaaaaatttaaaacttataattgaaaacataatatagcaggatgaaacagaaagcactagaatggagaaatatttgagagggttaaaagtttaatattatagtatatgaggacatatttctaagattatgtcaagggaacttggtatgtaaacagtgtttcacaccataggaaacaaaataacaaaattattgaattatttaatttgtgatcattttaaaatataatcttaatgctgtgatataaatatctagtaactgaacaaaaaatgattttaaaatcctagtaaagctggtgagaaataaatatattgctttaatttgatttatttaactaatatttggtcatttgtaacgggagctattaaaatgactatttttttaatccagtaatcttacccttagaaatctgctttagagaaagaattgaaaagaataagaaccttggccaggcatggtggcttatgcctgtaatcccagcactttgagaggctgaggcaggtgcatcacctgagttcaggagttcaagacaagcctgggcaacatggcaaaaccccatctctaccaaaaagtacaaaaaactagctgggcgtagtgatgcgtgcctgtggtcccagctacttgggaggctgaggtgggagaattgcttgagcctgggaggtgaaggttgcagtgagctgagatcatgccactgcactccaacctgggtgacagagtgagaccccatctcaaaacaaaaataaaacaaaacaaaaaagtaataagaacctcatgtgtaggtcttttaaaacacataatttatatagcaaaaacaataaatagattaaaaaagctttgaaaccagcctaaatactcaaagtatttgatggactgactagaatacatatattaagttacaaatatgcacattagataaaatcatggaaacttacttgttaatattaaatttatgcaagacttaatgcaagacttaatgtatgttctacttattgatttgtgaagtttacctatgaagattgtacaattccatagtgacacagtgattttttttttgttttgttttttgttttgagacagagtcttgctctcttgccaggctggagtgcagtggcgtgatctcagctcactgcaacctcctactccctggttcaagcgattctcctgcctcagcctcccaagtagctgggattacaggcatgtgccaccacgtccagctaatttttgtattttttagtagagacagggtttcaccatgttggccaggatggtcttgatttcctgacctcctgatccgcctgccttggcctcccaaagtgctgggattacaggtatgagccactgcgcccagcccagtcattgttttagtacaaaataataggtaaatttaaattattgaaatgtagaggtttttttataagtatgaaggaaaagtcatgtcaggatctccagttggatatttatgtcctccagcaatcaacagatgttgaaaaacctctggcggttgacctgttgtgcttttatttacagtgcttgtttcaggttctggtaaacgttcctcagagtccaaaagcagggaagcctagtgctgcagctgcctctgtcagcacccagcacggatctatcctgcagctgaacgacaccttggaagagaaagaagtttgtaggtttgtgcctgctttgttgtgatctaagtgaagtctgcattttctctttttctattttggttttagctttttttctctttacagtatttttctttatcttttctggtccgtacccaggaacatgtattattctgcctccatgatattagcaaaatccaacttcttattttctaatctaaccacttgtcttaattttacctaatgtttgtaggttggaatacagatttggagaatttggaaactattctctcttggtaaagaacatccataatggagttagtgaaattgcctgtgacctggctgtgaacgaggatccagttgatagtaaccttcgtacgtatatgttctctgctgattttcacatttgcattttcagaggtttcagtttttgagtactgtttgtaaagcaaagcagtccatgacgctttctgtagttgaaaacctaaatcttaggtcattgatgagcaccactccccccaaaaaatccacataaattataggttatttctacttagttatgatgtatttaaaatatgtttattgtattatctgtatataataatacaattatgtgacattaaaaaattatttattggcctggcatggtggctcatgcttgtaatcccagcactttgggaggccaaggcaggcagatcactcgagctcacaagtttgagacgagcctgggtgatgtggtaaaaccccatctctacaaaaaatacaaaaattagctgggcctggcgatgcgtgcctgtagtcccagctacttgggaggctgaggtgggaggatggcttgaacctgggaggcagaagttgcaatgagccaagattgtaccactgcactgcaacctgggtgatagagccagaccttgtctcaaaaaaaattatatgatatatcaatacattctcatagtttttagtttaattatgaagcattaataagccaaaaatgttaatgcagtggaaagaaactagaaatagggtaattgactgtcaaatatctctccttgttttaggagtgagcgtatagtatttcctgtatatcttctgctgccagtccagagatcctcttaggttaaggagggatcattcattatctaataaccccactgaagaaaatctgccattcggaactccctattaggtaacaatgtatgtgctgccttttgaaaggcagtaacaaatccctgtggtgtgaacaagtactgttcacagggaagctattaaagactatgaggttatatcaaaagaacgcaggagccgatatgaaagggccaatgtaggacaatttaagcattaagaagaataatatatgtagtggaagaaaaataatgaatgtataaaaaccatgaggtcatatgaaactaagatgagcaaggcctgccttcccaaagaaaacaaaaacaatgctttgtctttataggtaatcagggcacctgatgttaactgtgtgatttaaaattgtcagttgaaaggagagatttaagcatttattttgcccgttttaactgtaattcagggtaaccaaagatagtccctgttgagggaaaattctgtggagaagaattccaggtaataaatacagcaaaagggcaggatatgtcgcaacccttaatgaagtaagtgattgtgattcaggcatatactatatgagtggatgaaaccacgaggtgaaggggaatttttaccagctgaacacatccaccagtcatggggcaaccgcaacaggtacactttcagtgttggccaggaagttattgttaatttcatatgacattgtgtttatataacaaaaggcccatttcaaagatacttttagttttgaaatagttttagatttgtagaagtgttgcaaaaagagttctcaaatatccttcacttagcttcccctaaaccctaaactgtaaaatcacagtgtaattatcccacatactattactgaaaccagcaacttaacattgttcttaacattgaacataatattgatacagtactgattggggttatttaaatttctctaaatgtcccttttaatatccttctccggtgctggatttgaggtaggatcccacactgcatttagctttcagatctcctttgtctcctccagtctaggacagttcctcagtctttctttgtctttcatgaccttgatggtttgaagggtaatgtctggttgttttgtcaactgtccttgatttggatttgcttgatgtttggtgttttctcatgaataggtagaggttttgcattttttactggtatacagcaaaagcgaggctgggtccttctcagtgccttgtgtgaggaggcacacagtgtcaggctgtctttacaagggctttagagacacatcctgaagtatgtagggatgaaataacatgatgtcttggattcctaaagaaatagtttagccagaaaaagcaggacatgggggtgggtgggtagttatagatgaagcaacagggacaatatcttgataattctaggatctgggtgatggattatatatagggtgatggtaccattctctgtgcttttgtttatgtttgatattttttataatgacaattatcactcccttcagggtgagcataggaaattcagcatgagaatataggcttcccctcactggttttcatttatagataaatgtaatgatgtgatgtctttgatgttcatgatgacatttttgggggctaatgtgttttcttctctttttctagctgtgagcattgcattccttattggtcttgctgtcatcattgtgatatcctttctgaggctcttgttgaggtaagatatttggggaggacgccactggaaaggcagagtatagaaataacacattcagaaggggcagctgtcaccctcaagtggccatattcttcgatgatatgaacatttctgtgtcccccatgtccatccagtgctaggcttcagggactcatgtagactaagacgtggtctctgactttagggaagtgatattaaaggtgcttgtggattttttccttccttcctcccacatggctgaagaggaagaaaatgcttgagaaatcattatttcctaaagcatccgactttttaacgagcagaagtggctcatgacaattttaggaggaggtcgctgcactgaactcccttccccctctctggccctgagccctgaggcaccttctagtccagctgcccaacctctgccagcccaggcatctggtggcacagatgtatgcctggtggctgttcttctggacctcgcacggactccctgtcccttggttagtttgttagccaatgtggagaagggactggtcctgctctgcgtggtgaatagcgattctggtaagagtgaattagtagactagaacaagaaagtaaaatagatccagttttaattaactttcaaaggaaagtttttttcatgttttaaaaagaataagagtgaattttctcatgcttatcttgttagggtctcaagaagaaccacaaggttttattgatgagcaatatccaaactgaaagaatgaaaacctaacctctaagtcggctagcttgggaaaccctgaagctttggggaatttctgcactgtgatactctagctttgtacatcttagaaatagtataattccatgtgtgaggaccccaactgtgtatagggtaaaagaaccacatgttgcccagaagccggtgtgtaacctgttttttagggatagaggaagattctagcagtggagtttcatttctttgagttaaggtattatctcatcaaccttttgataaaatgcaaatgctatttcagtatatcaggatgcttttcacgtaaatggatctattatggattttttttttttttgagacagagtctcactcttgtcatccaggctggagtgcagtggtgccattatggctgactgcagccttgacttcctgggctcaggtgattctcccacctttgcctcctaagtagttgggactacaggcatgcatcaccatgcctggctaatggtttttttttttttaatttttgtatttttagtggagacggggtcttgatatgttgcccaggctggtcttgaactcctcgactcaagtgttccatctgtctctgactcccagagtgcagggattataggcatgagtcaccacacctggtcatattacatgactttttaaagtaattggtagctaggccgggtacggtggctcacgcctctaataccagcactttgagaggccaaggcagatggatcacttgaggtcaggagtttgagaccagcctggtaacatgatgaaatcccatctctactaaaaatacaaaaagtagctaagtgtgatggtgggtgcctgtagtcccagctactcaggaggctgaggcacgaaaatggcttgaggttgcagtgaggtgggagggaggttggaggttgcagtgatctgagattgtgccactgcattccggccggggactctcaagaaaaaaaaaagtaattgatagctgagatcaagcattttcaaagggaagagattccaccttgccccatgtggaactgaaactactctttgcacatgatgctgcccttccagcctgcgggcagaatgctcttcttgacaaagcaggagtcccttattccttgccccctcgctttccaacatacccagggaggttcagatgactgtgagccaaaaaacaaccagaaaaagtcgagagaataaagagcccctctctttttcacttaggcaacaagcatgaacaagaaaattaagtatttttgttttatttttagaaatcttaacttctccttttcaccctttttttttttttttaattttttgaggtggagtctcactctgccacgcaggctggagtgcagtggtgcgatctctgctcgctgcaacctctgcctctgggttttaagaaattctctgcctcagcctcccaaatagctgggattacaggcacgtgacaccatgcccagctaatttttagtagagatgaggtttcagcatcttggccaagctggtcttgaactcctgacctcgtgatccacctgcctctgcctctcaaagtgctgggattacaggcgtgagccaccatgcctggccacccttctttagatgtgtctattttaacattttacatgtgatggtgatgttatccatgttgaataaactagaaatcagagttgagttgtgagggaaaaagagaaattgcaaatgtatgccttgggcatatggatcatatttggatactgaattgaaccactgaactataaaaacatgttatgaaacagggaaactgcactggctatgtgacggtattaaggaattactgctaacatttaaaaatgtgataagggtattgtggttatgtttagaaataaaaatagtccatatccattagagatacatactaaattgtttttgcatgaaatgatatgatgtctaggattttctataaaacaatccgaggcaggaatgagggacagtgggtgagaggacatatgaagtaagattggccatgtgtcgacacttgttgaagctggatgatggaggtccattattcaggcaaaccctgtgttattgtgctttgctttattgcacttcacagatattgcatgttttacaaattgaaggttcgtggcaaccctgcatccagcaattcttttttttttttgagacgtggtctcattctgtctcccaagttggagagcagtggtgccatcacagctcactgcagccttgacctcccacactgcagccttttgatttaaagcgagagacgtgcagccggacaccatggctcacacctgtaatcccagcactttggggggcctaggcaggtggatcgcttgaactcaggagttcgagaccagcctggccaacatggtgaaacccccatctctactaaaaatagaaaaattagctgggcgtggcggcgcacgcctgtaatcccaggtactcgggaggctgaggcaggagaattgctggaacccaggaagtggaggtttgcagtgagccgagatcgcgctactgcactccagcctgggtgacagagtgagactccatctcaaaaaataaaaaataaagtgagagacatgcaactctttcttttactcaaacgcttagaagccattgtagggcaattataattggcctaatttcaatattgttgtatctgaatgaatagagaggcccaaagagagggagggagatggaggaacagtcagaacatactcaacgcttattgaccttattgacctcccaggcacaagcagtcctcccatctcagcctcccaagtagctgggactagaggcatgtgccaccatgataatttttttttttttttttttttttttttagtagagatgaagttctcactgtgttgcccaggcttgcattgagtaattctgttggcaccatttttccaacagcatgtgctcacttcttgtctttgcattacattttggtaatcgttataatatttcaaactttttcatactattatatctgttatggtgatctgtgatcaatgatctttgatgctcctactgtaattgttttgggatgccatgaaccctgcctgtataagatggtgaacttaatcagtattgagtgtattctgactgttccacccactgactgttcccccatttctctccctctctttgggcttctctatcctttcagatacaacaatattgaaattaggctaattaattatcctacagtggcttctaagtgagtaaaagaaagagttgcatgtctctcactttaaatcaaaagctagaaatgattaaacttagtgagaaaggcatgtcgagagccatgataggctgaaagctaggcctcttgtgcccaacagttagccaagttgtgaaagttcttgaagaaaattaaatgttctactccagggaagacacaaatgataagaaagtgaaacaggctgggcttagtggctcacacctgtaatcccagcactttgggagcctgaggccagattattgcttgaagctaggagttcgagaccagcctggccaacatggcaaaaccccatctctactaaaaatacaaaattagctgggcatggtgttgcatgcctgtaatcccagctactctggagcctgaggcaggagaattgcttgaacccgggagtcagaagttgcagtgagctgagattgctccactgtactccagcctaggcaaaggagctagactctgtctcaaaaagaaaaaaaagaaaaagaagaaaatgaaacagccttactgctgatatggagaaagtttgaatggtctggatagaagatcaaactattcccttaagccaaagcctaatccagagcaaggccctagctcttttcagttctgtagagactaagagaagtgaggaatctgcagaagaaaagttggaaactagcagaggttggttcagaaggtttaaggaaggaagccatttccataacataaaagtgcaaggtgaagcggcaagtgctgatggagaagctgcagcaagttatccagaagatccagctaagataattgatgaaagtggctacactaacaacacagtttccatgcagatgaaacagccttctattggaagaagatgccatctaagacttttaatagccaggaaggagaattcaaagcttcacaggacaggctgactctcttgttaggagctaacgcaactggtgactttaagttgaagccaatgctcatttaccattctggaaatcctagggtccttaagaattatgctaaatctcctctgtctgtgctcaataaatggaacagcaaagcctggatgacagcacatctgtttacagcgtggcttactgactattttaagcctactgtcgagacctactgttcagaaaagaatatttttttcaaaatattgttggtcattgacaatgcagcaagtcacccaagagctccaatggagatgtacaagcagatgaatgttgttttcatgcctgtaacacaatatccattctgcagcccatggatcaaggagtaatattgattttcaagtcttactatttaaaaaataggtttttataaagccgtatagctgccatacatagacagtgatttctccaatgaatctgggcaaagtccattgaaaaccttctggaaaggattcaccattgtagatgccattaagaaatttgtgattcatgagaggaagtaaaattatcaacattaacaggagtttggaggaagttgattccagccctcatggatgactcgggggtttaaggcttcagtggaggaaataactgcagatgtggtggaaataaaactagaattagaagtgaagcctgaagatgtgactgaattgctgcaatctcatgacaatacttgatcagacaaggagttgcttcttatagatgagcaaaggaagtggtttctcaaggtggaatctactcctggtaaccatgttgtgaacattgctgagatgacaacaaaggatttagaatatcacataaatgtagttggtagagcagaggcagagtttgagacgattgactctaattttgaaagaaggtctaactgtgggtaaaatgctatcaaacagcatcacgtgctgcagagaaatcttgtgaaaggaaaagtctgtggcaaactgtattgtcttgatttcggaaattgccacagccacctcaacctacggcagccaccaccctgaccactcagcagccatcaacatggaggccagatcctccaccagcaaaaagattagaacttgctgaaggctcaaataatcattaactttttattagcaatacatttttaaattaaggtatgtaaactgtctttttgtgcataatggtattgcacacttaatagactatagtatagtgtaatatataacttttatatacactgggtcacagaaaatttgtgagagtcactgtattgtgatattggccttattgtggtggtctgggaccaagcctgcagtgtcttgagctatgcctgtactggtttctctgcttctgtgtaactgttcatgaccaaaaaataaaaggggaaaaaatcctatgcactggataatttgtttatgccagggtagggtatacttttcaaaagatttcttcccaggtagaaatctcattttaaagaaaaaccagttaatatatttatcttttgttagtcatgtaaatcaatttaatgttatctggatatctttcttttctttctttctttttttttttttgagacagagtcttgctatgtcacccaggctggagtgcggtggcaccatctcggctcactccaagctctgcctcccgggttcacaccattctcctacctcagcctcctgagtagctggaactgcaggtgcccgccaccatgcctggctaatttttttgtatttttagtagagacagggtttcaccgtcttagccaggatggtcttgatctcctaacctcgtgatccgcccgtcttggcctcccaaagtgttgggattacaggcgtgagccaccgcgcccagcctggatcattttgaattaaagcaaccatattcaaaaagaacccagtacattaactatttgaatcaccccaaagttgctttcaacttttcccagtgtgcacatatgcatttttgtttgtaattgaatgtaaatgttaggtttttgctttttgtatttaatagttgatctttttttttttttttttttttttttgagatggagtctcgctctgttgcccaggctggagtccagtgggcgtgatctcggctcactgcaacttccctccgcctcctgggttcaagcaattctcctgcctcagcctcctgagtagctgggattacaggcgtgtaccaccacatctggctaatttttgtatttttagtagagacatggtttcaccatgttggccaggctggtctcgaactcctgacctcaagtgatccacccacctcggccccccaaagtgctgggattacaggcaagagccaccatgcctggcctaataatttatatcttcatcttaatgtttctttgtgtgggcagagcccacattcttttgctttcatgactgtatcacatcctatcacacagctgtcatattctgtgtttagtcatccttgttttgagtaaatttggttgtttccaagtttttgctattttaattttaatagtattattagtgagaatcccagccacggggaatagttacctcatttaccttctgaagtctttaatgaaagctctgtcatcattcctgttttattgatgaggaaactatgctgtcagagttgagtatttataagtagagctgctgaaaattgtgatttctatttttatattgttaaaaaatgtttagaatgtttaattacttagtaatatagaatatgagctttaattttatttccatataatatccaatcatttaaaaaattctgccaatgaaaataaattaattgagccctttatttattttcagtttggatgactttaacaattggatttctaaagccataagttctcgagaaactgatcgcctcatcaattctgtaagttatgagatgcatagtgtattgcccaggtggttttctaaacttggaatttatagtttcttatttaatcattattgtccagttttatgtttatattgaggaaggccaggttgtagctcccgtattcctaatagagagcagccctctcttcagctgctgggaagggctccatcccttctcttgcttcagtgacattggaacgttccgctctatcaggatacctgaggtagagacatttttcactctgcaggcagcattgttgaatcaatccagttaagtagagagtgtcaaagttaaaacaaagaaataagagacaacaatattaaatctataaatgctgatggcctcctctaatgatttaaatatgtcattaaatttttgttaataaattcaggctcatttatggggatgttggcttctgtgcttgtgctagatgcacttacgactagtttttttggtgtcatttatcaatgtggccactggcaaactcagtaaaaggcaggaaaagctgataaagtacaaaaccagacctctagatgggatctttacaaaagcaaatccaagtattgtttagaaaaacttttttattttttgagacaggatcttactctgttgcccaggctggagttcagtggcgtggtctcaactcgctgcagcctcaacctcctgggctcagatgatcttcccacctcagcttcccaagtagctgggactacaggtgtgtgccactccacctggctaatttttgtattttttgtagagacagggtttcaccatgttgcccaggctggtctcaaactcttgggctcaagagatttgcccaccttggcctcccaaagtgctgaaatcacaggtgtgagccactgtgcctacagaaaaactattttttagctttctaaactatttttagatttctactatatcacattctttcctaaagaaataaaaaattgatgccggttgcggtgactcacgtctgtaatcccagcactttaggaggctgaggcaggcagatcatgaggtcaggagtttgagaccagcctgaccaacatgatgaaaccccatctctactaaaaatacaaaaattagccggacgtggtggcgcatgcctgtaatcacagctacgcaggaggctgaggcaggagaatcgcttgaccccaggaggtggaggttgcagtgagccaaggtcttgccattgcactccaggctgggccacagagcgagactctgtctcaaaaaacaaaacaaaacaaaacaaaacaaagaaatcaaaaaatgacaaaatgaaatttaccccttagcattatgagttgtcatctttctccctttttttctgaaggagctgggatctcccagcaggacagaccctctcgatggtgatgttcagccagcaacgtggcgtctatctgccctgccgccccgcctccgcagcgtggacaccttcagggggtatgtgggcctccctgtagcacagtgggtgcaggtagtcacaggactacataattgtacatacacacacttttagcttttaaggacttttacatatcttttactttctaggctaggaaggatttcttggatgtaaaagtaaactctgcagcctctccagtctggaagaccatcatgatcctcagtgtctgtattgacagaggagtagtggatgaggccagagccagtgtccacttggatacgtggtctgctgagtgaagggcatttttatttgggcaagtcgctgttacttggggctgcagactgtatcccatgtccagtcagtagcttgacggctcagaagatgcactagtctagcaaggaaacaccagcatgtggcagagggagggctgatcctgcgctgctagcagagtgacttgagtatcaggccctcgtgctagcaaacccatagccctggtagaagaacaagggccaggactgaaatctgaaaataaagtttaaaaactgtatagcgaagaataaatacacaggtatcagctcttttatttctacatactgaagccttctgaactctagtgacaaccctataactttgccccagtctcaccagagccctgagtgccctggcaggtagattggaagcaggtagtaagaacaatatgatcataatgaaacttgctaacaattctggagttctcataatgtgccagtcactgttctaactcgtcttaatttatttaatctcttagtaatcctatgagatatatacttttaatgtgcctgattcacattaaaagtaaaagaaattgtgctgctgagtgaagtaacttgcccaagctcactcaggtaccaaataggaaagccagggtttgatggcaggcacttgggttacagagtctcccaaattagtctgttgacacctaaggtcagcaccctcagcattctgcacagttagcctcaaacagtagcacatccggaatctattactctgtcttttagatttccattgctacttttggagataagatggtcacagatagacaggaactaacatttattaagtgtctaaaatatgctgggcactggttagctgctgtaaaatacatcattctccttaaaagtcacatgtggttagggcactttcttttacagatgagcacactgagtttactgatgagaaccttgcccagggtcttatggctaatgacagaaaaggatctaagattggaattctgagctcgctgactcagctggctgtgtgccttccaccagagttctttaacccgagacatctaaataattagcacaaaactgagttattggaaatattttgcaatgttttcaagttacatagtttaagactgcagtatacactttggttaagacatcatgttggcagtgttggcaatggtcctaactgtagtgcatggtcctaattgcgatgactagaaaataatcgcttcttggccttgatgtctcatcttgtgtaataaaatgctcagtagaattgcattgttgcatgattgcaccttgtgagtataaatgtgtcttcagttcagcccttccttttcacatagcaaaccctgaaaggcttctctttgttggcttcttctaggattgctcttatactcatggtctttgtcaattatggaggaggaaaatattggtacttcaaacatgcaagttggaatggtaagatatttcctaaaagtaatgttgcttatatacgtccttcacagagcttcagggcaggagaatcactcagcattctccccagaaactccagaaatgagccccagcagcctcctctgagccactgagctcctgctccctcctagggtgacctgtagatgattctgcgagccctttagttttgttcctccttttgtgtgctgtgaatctgtaaagcttcactgtaataacagactctagaagtttctgctgtgggactgagggactctgcagaatatgttatggatttggttgtaaatgatcatggtcatattctagatatgccttctattacagccaccatgctcttgggggctctgtcttctaggacttatggtcctttttgagatggcgttgaactaggattggtctgagtggtggtgaataatatctgtaagtctggcttggtagttgctttacaaatggattagtgcttcttaaacataacaaacgtgtctacatatttctagtttggttttcctgtgtctagttatgttcataggaagtgtcccagccaggtccagtgcttggttgcagagtctcaaggaagagtttgtgagtttactttctttttttaaaggcagagtcttgctttgtagcccaggctagattgcagtggtgtgataatagctgaccacagcctcgacctcctgggctcaagcaatcctcccacctcagcctcctgagtagctgggactacaggtgtgtgccaccatacatggctagttttttaaaacaatttttagtacagatggtgtctcactctgt

SEQ ID NO: 795 - DNA, 1638 bp, Homo sapiens
  source 1..1638: mol_type = other DNA
agaattcgagggggtggggctatgcccggacagaggatcgcctcgctggcctactctctcctcccgtacggcgccggaatcccagctccacttaccaggccgcggctaccccgccgtcccccccgactcccgccaccccgctctctcaggctcttcaggatccaagtccgtaggccctttaaggggtctagttgccgtttgcgaggccctgggactttggtcccagacagcggggatccggatggcttccgtgcggatccgagaggccaaggagggagactgtggagatatcctgaggctgattcgggtgaagactgcaggccggtaacccgggggtcagagtggcgcggccagagcggggtcgtaggaggcgggggcagggggaggggctcgccttgggaacctgctcggggagcagcggggcccttctgctctaatctagcttccgtacccacgccttaggagctagccgaattcgaaaaactctcggatcaggtgaagatcagtgaagaaggtgggggctcagcgcccaggttctggcggaggctggggaggaaatgagggatgggttccccaggcgacagctccaggctgggcatacacccacgtcctctttctctatctctttgtcacaactccaatctcggcagccctgagagcagatggctttggagacaatcctttctatcactgtttggtagcagagattcttccagcgcccgggaagctactgggtaagagcacctggcccttagaagtccacctctccagccggcctcagaggtctccccacaggcttccagaagccttactccccttttctctctctcagggccctgcgtggtgggctatgggatatactatttcatctacagtacatggaagggacgcaccatttatctggaggatatctatgtgatgccggaatatcggggtactgggcagaagctgaggctggggtgggagcaaagcaccccacagaccccactgttatcccctgtccccagagcccagccggtgtcattttctgatccccttcagctcaaacaatagctattttttgcctctttctctccacaacaggtcaagggattggttccaaaataatcaaaaaggtggctgaggtgaggagatgggtggggcgacaagtgaggacctgaagaagcaagggtatatggaggggggacccgggttgaaagagggagtgagaaaacctttttcttttttgaccccagaaaagttagtgttgtcttctcccacaggtggccttggataagggctgctcccaattccgcctggccgtcctggactggaaccagagggccatggacttgtacaaggccctaggagcccaagatctgacggaagctgagggctggcacttcttctgctttcaaggagaggcaacgagaaagttggcaggaaagtgacgccatccctaggaggatctctgtcttgagtttctccttccccatcagctgaagcactcttcagagactacgtccacagacactgatgctgaggcctccctggaggaaggagggttaggggtgcctatcctcaagtattggaagagcagaattgagggagagacctttcttccttgttgagggtgaaaaataaataagaattacatgt

SEQ ID NO: 796 - DNA, 24894 bp, Homo sapiens; identical to SEQ ID NO: 684
  source 1..24894: mol_type = other DNA

SEQ ID NO: 797 - DNA, 32744 bp, Homo sapiens
  source 1..32744: mol_type = other DNA
ggatccccggaggcggtccccgggttgcagtgagggaagtgggccgggaggagagatgggcggtgaagaggcccggccctgccagggaggcgggcggatccgtggcagtgaccagaaggggccggaagggggtggccgccggccgggccccgccctggggccgcctccccgcgggttccgttggctgtggcggcagctgacgcttgtggcggcggtggcttcggggtgggcgtaagatggcgacagcagcgcagggacccctaagcttgctgtggggctggctgtggagcgagcgcttctggctacccgagaacgtgagctgggctgatctggaggggccggccgacggctacggttacccccgcggccggcacatcctctcggtgttcccgctggcggcgggcatcttcttcgtgaggctgctcttcgagcggtgagagcccgggagcgagcggctcgggggccgggcgcgggccgggggcgccccgctgtgggaagggccgagggccggaagcagaactgcaaggaaagcccggaagcaggggctgggggagcttgggccgcggcgggtgatgctaggcgcgtgggcgaggtggtagcctagatggagaaggagtttggggcgtgggcaagagaaagagtgagggtctaggggaatgctgggccccttcaatgttagatccggagttggattgggggggtcatataggcctcctcccaacctccaagggtcctacagatgaggaaacaggttcagtgtgagctctggcagaggccccgaagagagggataggaaggggccaggagaaccagagctagttgtgaccatggaagccgaggggtcaacgcaagggccagacgttccaagggaaaggaatggactcatcagactcttaagatttgttaggacgcttgagtttccgagaattggggggaacaggattagtttggccctaagagttggtttggtatgtcaactcatgcacgtttgttggtaggagggtagaaatctggttgggatagggtgtggtggagccctaggcttccaaagtaatggaaagatgtcagattagttgcagaacaggccttggggcctgaaatggaaggaggagtgtgttcgaagggatggaggagagccacagggctttatcagaggacagctatattgagccagattcttttttcttttcttttttttttttttttttttgagacagagtttcgctcttgttgcccaggctggcgtgcaatggcacgatctcggcttaccgcgacctccgcctcccctgttgaagcgattctcctgcctcagcctcccgagtagctggaattacaggcacgcgccaccacgcccggctactttttgtatttttagtagagacggggtttcgccatgttggccaggctggtctgtaactcctgacctcaagtgatccgcccgcctctgcctcccaaagtgctgggattacaggcgtgagccaccgcacccggccttgagccagcttctaaatgagtttagcagaattgcagtatactttgttcaaccacatgatttcacctttaagtgaatggatcatatgtttgtccaagataaagatattcactgaggctttggtgtgtgatattataatgtgaatttatacctgtgggtgattttgatcaagtctactcagactccaagaaaggagacatgtttctgccataggcctcaggtaatgagggtggttcttggacatctgttcgttttgcctttatccaagcataaatgattgtaatgcaggaatgccctttctaggatgggaatatgttgcaggtgaaataatctgttaatttctgaaagatagcatctgtttgggattgcttctttgatttgcctactgtttttgactcaagtctttcaaaatcttgtgttctatttagctagtcacgcatccatttattcgtagtatttgtgcatcatcatcatcaaaatgctctgccagacgttcaagtgcaaaaataaagatgcttaagtgaagcaaatgaaacccaaagatctaaatggctttccttggccctcaggaacttagtgtagcaaggtttttttttttttctttttctttttcttttttttttgagacggagtctcgctctgtcgcccaggctggagtgcagtggcgcgatctcagctcactgcaagctccgcctctcgggttcacgccattctcctgcttcagtctcccgagtagctgaaactacaggcgcccgccaccatgtccggctaattttttgtatttttagtagagacggggattcaccgtcttagccaggaaggtctcgatctcctgacctcgtaatacgcctgcctcggcctcccaaagtgctgggattacaagcgtgaaccgccgcgcccggccttgttttgtctttttacgtgtaatcgttgtagttagtcatcctggagtggaggcacaaactgcttgtctgtctttggaataaactagatccaggtactctcttccatagtctctgtatatgagggccaaaaaaaaaaaggaggaaggcaatgtaatcactacaaaggaaaatacacaagtcaggacaaatttttttttaaaaggtgattttcatagaaaaacatctctgcttttcatataaatatgtgccaatatggaaatttccccatgttagtggtaagaggaaatagttttgttgcttataaacacccattttatataaacttacgtatctcttgagattccaaagtgttccctcagatggctgaagacatatatcccctggcagagctgctggaagggatcctttacctgtgggaattctatctgagtgtttctatggtgctccagtgtcagaggagtacaggtggatgggaatactgagctgaaagcattctagtatgataattcttggctagtaaagacaggcaccttgtttgtctcatgtttgctcttaggaaagtttaaccctagaagcactcttgctattttgtttcttttaagacccattacctcagtaatataattcactgctgacttgccaattcctcttttaccgttctggtcttccataaagaaaatagaccactccactcttattgttgtttttgagacagggtctcagcctcacccaggctggactgcagtggcacgaagctcactccagcctcgacctctttggctcaagcaatcctcctacctcagcctcccaagtagccaggaccataggtgcacaccactatgcccagctaattaaaaaaaaaaaaaaaaattgggagagcggggcatggtggctcacacctgtaatcccagcactttgggaggccgaggcagggagatcacttgaggccaggagttcgagaccagcctggccaacatggtgaaaccccatctctactaaaaatataaaaattagctgggcatagtggtacatgcctgtaatcccagctactcaggaggctgaggcatgagaattgcttgagttggagaggcagaggttgcagtgagccaagatcacactgttgcactccagcctgggctgcagaggaaaactctgtctcaaaaaaaaaaaaaaaaattgtagaggctgggcatggtggctcatgcctgtaatcccagcactttgggaggccgaggagggcagatcacttgagcctaggagtttgagaccagccttggcaacatggtgaaaccttgtctctacaaaaaaatttaaaaattagctgggtgtgatggtgcatgcctatagtctctagtctcatctacttgggaggctgaggcaggaggattgcttgaacccgggaggttgagactgcagtgagccgtgatcaaaccactgtacttcagcctgggtgatagagtgagaccctgtctcagaaaaataaataaaataaatttttgtagaggcctgagctcctggcctcaagcgatcctgctgcctcagcttcccaaagttttgggattactggcatgagccactgcccctggcctagagccacttgtagaatgcaatagaaggcatatcaaaaatatcggggcatggccttgcatgctggctcacacctgtaatcccagcactttgggaggccgaggcaggcagatcacttgaggtcaggagtttgagaccagcctggctaacaacatgaaatctcatctctactaaaaatacaaaaatagccccgcgtagtggcgggcgcctgtaatcccagctacttgggaggctgaggcaggagaatggcttgaacctggaaggtggaggttgcagtgagctgagatcgtgccactggactccagcctgggcaacagagcgacactccatctcaaaaataaataaatattggggcctggcatggtggctcacacctgtaatcccaacactttggaggccaaggtgagagaattgcttgagaccaggactttgagatcagcctgggcagcatagcgagaccctgatcctacaaaaaataaaaatgttagccagatgtggtggcatgcatctgtagtcccagctactcaggaggctgatgcaggaagatggcttgagcccaggagttcaaagctgcaatgaactatgatagcgccagtgcactccagcctgggcaaaggagtgagaccctgtctcttaaagaaagagaggccaggcacagtggctcatgcctgtaatcccagcactttgggaggctgagacgggcggatcacctgaggtcaggagttcgagaccaacctggctaacatggtgaaaccccatctctactaaaaatacaaaaattagctgggcgtgatggcatgtgcctataatcccagctacttgggaggctgaggcaggagaatctcttgaacccgggaggtggaggttgcagtgagccaagatcacaccactgcactccagcttaggcaatagagcaagactctatcacaaaaaaaaaaaagagagagagagagataaagaggtatattgggacaattagtcatctttcctacattttctctttttttcagagcccagaatccttgcatacattttctcattctaaaatcctacctatttagtttgtagaaatgatttatgtagtaatcatagactgctaaaagctagaactccggcctccttttacagacagttactaaggcttagaaacatccttcagcttttcagaggttgcaacatacaactggtctttttccccagcccagttctctttcactgatagggccgttcatcttttcctattccttaaaccccctttcaagtgttaagatttaacctcttgttctagtattctagtatttgaagaacaaatttatttcctgttacacacttcatatacatttaaaaaaaaaaaaaaaaaaaaaagaacaaatcagccaggcatggtggctcatgcctgtaatcccagcactttgggaggccaaggcaggtggattaactgaggtcaggagttcgagaccggcctcgccaacatggtgaaaccctgtctttactaaaaatacaagaaattagctgggtgtggtggcatgcgccttaagtcccagctacttgggaggctgaggcaggagaatcgcttgaacctaggaggcagaggttgcggtgagctgagatcatgccactgcactccagcttgggcaacagagtgagactctgtctcaaaaaaaaaaaaaaaaaaaaaaagaagaagaacaaatctgtattcatcctgttcttagttatttaacattatccttttaacttgaactttgcttttttttttttttttctttttttgagacggagtctcactctctcacccaggctggaatgcagtgacttgatctcagctcattgcagcctctgcttcccaggttcaagcagttctcatgcctcagcctcttgagtagctagcagtacaggcatacactaccacagccagctaattttcatatttttagtagagacagggttttgccatgttggccaggccggtcttgaactcccggcctcaagtgatccacctgcctcggcctcccaaagtgctaggattacaggcgtgagccaccgcatctggccaactttgctttgtttgtttcatatcattattgcatatttaaatgcatcttactctatgtgcctagatacatagtctctatttgtgtttcaggaatctcccaaagaataaatatagagggtacaatttggtcttactttctcttccttctcatcaaccacactgagcatttattaaatattttttaagtttccatattccctatagagaactgtagcctcacctgatggggatgacttggaaagccatctgaccataagttaagcatatttagctattttgttaaagaactgcagaaaggtgattattacccaccaaagcacagaggcttgcctttgtgggcctctgttgactggttcattgcagtggactgtactcttgcacagtgcctcagtgcagcatgtgagtataatgattgagaagggtctattcttgtccactcagatgccctgaggagtaacccagaatctaattattcaatctgaaatagatatttggcttaagagaggtgaaattataatttctttgtttctgttgttaaatttcaccatactatgtttgcatgttgtacacttttctacagcttctctttctcccctttcctcttacacacactcaggctacccactgttacctatcaaaagagagataagaaagtcttccacttgttgcttctttgaatattgtgtgctgattagggaaagaatagtccaaggtgtggtccaagtccaagtaggcctcttggatctgacttaaactgaatcttaaagataaaattgtttgaaacttagtattttgtcccttgagcatattttccctgggatcaagtaggagtttgagacaatattgataccatcagatctatataggttcatttattttaaatacggtactataataggagctttatgttgccagaagaaagtaatttggcgaattatacaggagatagctgagagctttcaccgctgcttattcattattccagtcccctcttctctcttattacttcaaggcaacctcactggggtgtctaaagagccttctcaatgccattctctcagtggggattgaacagactcattcgctggcctgtcatgtaactgacaacaagagtagtgattcattttcttgtgcatgtttccatttatttccttttttcttttcttttttttttcttttttttttttttgagacagagtctcgctctgttgcccaggctagagtgcagtggcacaatctcagcttactgcaacctccgcctcctgggttcaagcgattctcctgcctcagcctcctgagtagctaggactacaggtgtgtaccaccacgcccagctaatttttgtatttttagtagagatggggttttgccatgttggccagactggtcttgaactcctgacctcaggtgatctacccacctcggcctcccaaagtgctgggattacaggtgtgagccaccacacctggtctcaatttttaattgattacatattgacagtacttttgacatatcaagttaaacaaaatacattgtcaacattaatttcacttgtttctttttcactttttaaaatgtggatattagaaaattttaaattacaggctgggcacggtggctaatgcctataatcccagcactttgggaggctgaggtgggcagatgacctgaggtcaggagttcgagaccagcctgaccaacatggtgaaaccccatcactaaaaatacaaaaattagctgggtgtggtggtaggcacctgtaatcccagctactcaggaggctgaggcaggagaatcgcttgaacctgtgaggtggaggttgcagcgagccaagatcgcaccattgcactccagcctgggcaacagagcgagaccctgtctcaaaaaagaaaagaaaattttaaattacatatgtgactcacattatatttctgttggatggtgatgacagtaattcagacaatattaataataattgagaaaataattttaatgtaaattcacatttgatacactttttaggatcaaaagatgatgcaaaggtattagatgttcctttaaataatgaatctaagacattttagtaaaaataagatttctaaatgtaaattattttctgaaatattcaaatgactggtcatattctattttgagtaattttttgtttttttgagacagagtctcgccctgtgtcgcccaggctgtagtgcagtggcgggatctcggctcactgcaagctctgcctcccgggttcacaccattctcctgcctcagcctcctgagtagctgggattacaggcgcccgccaccacacccggctaattttttgtatttttaatagagatggggtttcaccgtgttagccaggatggtctctatctcctgacctcatgattcgcccgcctcggcctctcaaagtgctgggattacaggtgtgagccaccgcgcccggccgcttgagtaatctttgattgacagttgcttctagccaagcattgctctataattttgcctttttacatctatcttctcggtgttaatgatctataagaaagtttgtcaagtaggtaaatgtccatgcagaactgcatagctctgataaggcattgagaataatcacactcttactatatctcttctgtaaaatacaagatttcttgtaaggatattccttgtagtttttagtttttgggtattgtcagcattagtaagcagtcgcaattacaggcataaagtgtctcaaactagatcagattgttgtggttgtgtttagggcaatctccagttatagattgaaatcggttaacttgaatatctactgattccccagaaatcagtcatctcctacacttgataaacaccaaactggtaggttatctgatgacccaggaggataaggctgagttttaatttcatccttacaagtggcacacttccatgaaacactttgcctcttagttgagaattaagttttcacccatttgttcatctgttcattcttcaacatctatttattgaaagcttaggatatgtcatatcaaactatatgtgatggttttagaagttggacaagaaaaatgtaaaaataaataaaaaggtatcaaactatgtgccaaggattaaaaggtgaataaaccatgatttctaccctggagagagcaacaaaatcagtggttatcccttatgtgtgtttgtgtttctattttaagcaaatgcattaagttgtataattatccattgaaaaaaggtaaatatgtttaatgaaaggaacaagtgggtttatcctaccactttggcctgaattcactttagtgtcctctcagtagaattcttctagtacattagaatgattggatttacaaaaatatacaatctacatgcattccttgagaaaaacatctattacagattttttttttttttttttttttttggtcatggtctcactctgtcacctaagttggagtgcagtggcacaatctggtatcactgcaacttccacctccctggctcaagccatcttgccacctcagcctcccaagaagctgggactacaggcatgtgccactgtgcctggctaatttttgtattttttgtagggatgaggttttgccatggctggtcttgaactcctgagctcaagtgatgcttccacctcggccttccaaagtgctgagattactggcatgaatcaccatgcctggcctacagtagattattttgcttctgtctagatagtgtcaattattgtttcaggtttgatctctttttttttggacaatttcttttttcctcatctaatattctccgttgtatgcctttaatgaagtcaaggatctaggtaaagtgaataatgtcagaaatgtttgtcaggtcacagctggaatttgaagagaaccatttcagagatcttgaatgaactgccttatttttggggaatgaccttcagattgggctctgtttatggacttgtctcccccatgaaactgtaggtatctaatgcagtgctttgtacattcatattagctattcagtaagtgtttattgaatgaatcactctgaaacctacttctgcttgagatgttgcgactctagtacagtaattactgtttttttttctaattttccttcctaagagacggaatcttgctatattactgtatcagtcagggttctctagagggacagaactaataggatggatatatatatgaagggtagtttattaagtattaactcacactatcacaaggtcccacaataggccgtctgcacactgaggagcaaggaaagccagtccaagtcccaaaactgaagagcttggagtccgatgtttgaggggaggaagagtccagcacaagagaaagatgtaggctgggaggctaggccagtctagtcttttcacgtttttctgcctcttgccatgctggcagctgattagatggtgcccacccagattaagggtggctctgcctttcccagcccactgactcaaatgttaatctcctttggcaacaccctcacagacatgtgcaggatgagtgttttgcattcttcaatccaattaagttgatactcagtattaaccatcacaattacccaggctggaattcagtggccattcacagggctgatgtcactacagccttgacctcctggcctcaatcagtccacctgcctcagcctccatggtagctggaactacaggcccagctacataatttcctttttgactcctgagattcctatgctgtacagcagtgggttctcaaatcttttgctcaggactcctttatattttaaaaaattattgaagaccccaaatagcttttgtttatatgagttatatctatcaatattttctctattaaaaactaatactgataaattttttaagtatgtattaagcttcactctgtcagccacgctggaatgcaatggcatgatcatgactcactacagcctccacctcttggctcaaacaatcctcccacctcagcctcccagtagctgggaccagaggtgcatgccaccacacctggctactaattgttttatatatatatatatatagtttgtttgtttgttttgagacagagtcttgctctgtcacccaggctggagtgcagtggcgtgatgttggctcactgcaagctctgcctcccaggttcacgccattctcctgccttggcctccccagcagctgggactacaggcgcacgctgccacacccggctaatttttttttgtatttttagtagagacggggttttaccgtgttagtcaggatggtctcgatctcctgaccttgtgatccacccgcctcagcctcccaaagtgctgggattacaggcgtgagccaccacggccggccttttttttttttttttttttgagacagaatgtcgctctgtcgcccaggctggagtgcagtggcgcgatctcagctcactgcaacctctgcttcccaggtttaagcagttctcctgcctcagcctccgagtagctgggactgcaggtgtgccaccacacccagctaatttttgtatttttagtagagacggggtttcaccatattggtcaggctggtctcaaactcctgaccacaggtgatccacccgccttggcctcccaaagtgctggggattacaggcgtgagccaccatgcccggccactaattgttatattttttgtagagacaagatttcatcatgttacccaggctgggccttttttttttttttttttttttttttgagatggagtctcgctctgtcgcccaggctggagtgcagtggcgcaatctcggctcactgcaagctctgcctcccgggttcacgccattctcctgcctcagcctcccgagtagctgtgactacaggcgcctgccaccacgcctggctaatttttttgtatttttagtagaaatggggtttcaccctgttagccaggatggtctcgatctcttgacctcgtgatccacctgcctcagcctcccaaagtgctgggattacaggcctgagtcaccgtgcctggcaatttttttttttaatggccctcaaaggaagctgcaaagatcacttgagcacagaccatgcaagaaatgttgggtttggtggtataggtatcttgaaaagtgcaataccttgtatacaaggaatcctcttcttttaagaatttactcagaagaatacattgtaactttttgttctcagggattgtttttcacttttaaaaattactgaggactccaaggagcttttgtttatgtgggttacatatacccatcaactttaccatattttaaattaaaattgagaaatttaagaaatgctgaccgggcacgatggctcacccctataatcccagcactttgggaggcctaggtgggtggatcacctgaggtcaggagttcaagaccagcctggccaacacggtgaaaccccgtctctactaaaaatgcaaaaattaaccaggcatggtggtgcacgcctatagtcccagctacttgggcagctgaggcaggagaatcacttgaacctgagagcagaggttgcagtgagccaagatagcgccactgcactccagcctgggtgacggagcgaaactctgtctcaaaaagaaatttaagaaatgcttattaattcattaaaaataacaacaggccaggtgcaggggttcacacttgtaatcccagcacttagggaggcagagacaggaggatagcttgagctcaggagctcaagacctgtgtgggtaacatagcaagacctcgttctccacaaaaagggagaaaatagacaaaaaataataataaattgatttacatgttaacataaataagctttttgaaaaatattattttccaaaagaaaaaatagaagaacagcattgattttacatttttgcaaatctctttaatatctggcttaatagaagacagctggattatcctagcagcttctgcattcaatctcttgtgatacattgttttgattgaagtatatgaagaaaagatggcctcacacagctttgtcattgaaaagcaggaagtattttaatagccctttcaaataatttgatatttatctttgatactacaccaaaacacaagtagcagttttttgttttgttttgtcttgttttgagacggagtcttgctctgttcccaggctggagtgtagtggcgcgatctcactgcaaccttcgactccctggttcaagcgattctcctgcctcagcctcccgagtagctaggattacaggcatgtgccaccgcacccagctaagttttgcatttttagtagagatggggtttcaccatgttggccaggatggtctagatctcttgacctcgtgatctgcctgcctcggcctcccaaagtgctgggattacaggcgtgccacgcccagccacaagtagcagtttcttaaacgttgattcctaggtagaatctgaagccatattaatgagcttttcattttattatgttaaaatccattgttctatgttcattgtgttttgttgttgttgttttgaggtggtgttttgctcttgtcgcccaggctggagtccaatggtgcagtcacagctcactgcaacctctgcctcccaggttcaaatgattctcctgcctcagccttccaagtagctgggattatgggtatgcgccatcacgcccagttaattttgtatttttagtggagatggggtttcaccatattggccaggctggtctcaaactcctgacctcaggtgatccgcctgcctcagcctcccaaagtgctgggattataggcgtgagccaccatgcctggcctatattacagtttgaatggacatcatgtatccatcatttggaaaatactggttcattcagttatgcaaatgtcccacatgtcaatatgtgacattatacaatattttaaaatcttgcctgtaatcccagcactttgggaggccgaggtgggcgcatcacaaggtcaagagattgagagcatcctggccaacatggtgaaaccccgtctctactaaaaatacaaaaattagctggacgtggtggtgcatgcctctagtcccagctactcgggaggctgaggcaggagaatcgcttgaacccaggaggcagaggttgcagtgagccaagatcatgccacgggactccagcctggcaacagagtgagactccgtctcagaaaaaaaaaaaaaaaaaaaaaaaaaaatcatattagtttatctcattataaccaatctcatcagaaaagtcttaagtattgagaagttgtcaggctgaaaggcaggtaaaagttttctaaacattctaagtttcacttgaaagcttgaattttatcattggcaacaatgcttttcttgaaatgacgggctcacttattatagttattactattattattattattttgagacaaagtcttgctctgtcgcccaggctggagtgcagtggcaggatctcagctcactacaacctctgccttctgggttcaagcaattctcctgcctcagcctcccgagtagctgggattacaggcggccgccaccacgcctggctaatatttatatttttagtagagatggggttttactgtgttggccaggctggtctcaaactcctgacctcaggtgatccgcccgcctccgcctcccaaagtgctgggattacaggcatgagccactgcgtctggcctcatttatttttgagaaagtttttgctaaatactcagagctgactaacgttagtctgtcagtcctttcaggtaaaagtggtattctatggaaaaagcgacttagtttattcagcttgcagtagtcatacaaatggttttccttgggagccatatactttggtatgcatcagaagtgctttttgggtacatccattttatcacagaataagtggagactgggtttcaccatgttggccagggtggtctcgaactcctgacctcaagtgatccgcttgcctcagcctcctaaagtgctgggattacaggcataagccactgtgcccaatcacagaatacttttaaaaaatatattcaagggtcaagatttaataaaagtaataatttgtagtgcttcatcaaggacattcttaagcaaaactggcatgttttaaaaattgagaagacctagctctacagtatagtaactactagtatggtttggtgtcactaccttgatttggtctaaagtaccataatgttttacctaccattgatttgcacaatcactgcaaatgtcaacacagtgaaaaaggcaaataataatattgttatgaaaatagtttagtttgtagagcccctgagagtgcctcaggaaccctcagggatctgcagtccataccttgagaccctctaccataactgaatgaggttactgagggtgagcgtgtagagtacgaaaagaacctctaagtgaaccctgaggaaacaccatgtttcaggaaaaggcagaggaaaaataaactgcaaaggagatagaggaatgacagccatacgttatttgataatattagtagttggtataggccgcgcacggcgactcacgcctgtaatcccaacactttgggaggccgaggtgggtgaatccactagaggccaggagttcgggaccagcctggccagcatggtgaaacccgtgtctactaaaaatacaaaagttagccaggtgtggtggtgggcacttgtaatcccagctactcgggaggctgaggcagaatcgaacctgggaggtggaggttgcagtgagccaagattgtgccattgcactccagcccaggtgacagagggagactccatctcaaagtgggtgtttaataagtgtttactttgtcctaggcattgttctaagtgctaagcttgaatcctctttagtaagtttatgaggtaggtaggcattactgttatcctcattttacagatgagagaactgaagcacagaggaacttgtccaaggtgactcaactagcagtgcttaccaggcagtctagttccactgccaaagaggtagagggagaagactaggaagagtggcagtaaggaagagaaaagggcatttcaagaaggagattagtcattaatgtatttggttggtgcaaaagtaattgtggtttttgccattaaaagtaatgggaattacttttgcaccaacctaataaaatgctgctgaaaggtcaagtaagataaaggactgaaaagcatccatttgttttcacaatatggagatcattgacaactttggcaagaacagcttcagtggagtgtagggacagaagccagaggggagagaaaggagagttgaggaatgtgtgggagtttagttgtgagtttggggaaggccagagggtgctagggaccgggagggctgttttaagatgtgaaaaacttgagcatgtttaagatctgatgagaagaacaaagttgagagtgaggctgaagataatagaaggaaggagggataagtagaatgaaatttctgatcagtaaagagtgggtctaaagcacagggagattggttttagatgtgattagtttagattgagtgattctgatgccaaagttgaggacattccattttcttcttagcctaaatgcttgagggtttggctatttctacttctttcctcctatatctttaactgctttaactcactgctgtgttttagagtctttattttactggaatttctttggtgaaggttactacagatctccaaaaattgccaaatgtagtagatactgaagtccttgtcttggtctttcccttatttgatacaactccacctctgaccttcctgtcccctaaattcaccttttatgctgatgttgtccagcgttctgacctcagttctcttttaagtttatattcctttcatatgtaatcacagccacccccacaaatttagctatcacttacattctcattcatttgtattcgtatattctgttctttctctctatatatatatcatacccaagccccttttccaagtgtatttgcatgctagacagttccatttcagtgtcccatgggtacttcagattcagcatacacaaaactcaactcatctttcactcccaaacttttttttatttcattattttatgttttggagatggcgtctcactctgtcacccaggctggagtgtagtggcacaatcagggctcactgcagcctccacctcctgggctcaagcagtcctcctgcctcagcctccgcagtagctgggaccatgggcacatgccaccacatccagctaatttttaaaattttttgtagagacggggtctcaccatgttgcccagactggtcttaaactcctgttctttttatatgtctactttggcactttatatttttccagaaattgatctaagctggtacttctcaatctggaaatattgctgcacacataaaaaataacatttgtggctgagtatgctggctcacgcctgtaatcccagcactttgggaggcgaggcaggcagatcacttgaggtcaggagctcaagaccagcctggccaatgtggtgaaaccccgtctctactaaaaatacaaaaattagctgggcatggtggtgcacgcctgtagtcccagctactacttgggaggctgaggcacaagaattacttgaacctgggaggcggaggttgcagtgagcccagatcacgccaccacacttcacttcagcctaggcatcagagcgagactctgtctctaaataaatacataaataacatttgcattatacagtaaggtatatgaggccagagactacagactaaaggtttctggctacccgaaggccccatggatcaccctgagagctaaaatcaatatctcagcataagtatagcccatttgtgttacttgccacaatagttgagaagcttaatctagactttggttttatttgtgtataattcatattcatcagtggtgtaatgaatcacaaaagtagcattgtgaatatacatcctgtctttgataggaaaaagcgaaagcactaggtaatttcatcctaattaacccaggcttaggtcaactgctgctatgtatctggagagcaggaaaagggcagagtgaaatgatctctacaaagcaggacaaatctaatactgtcaggatgggtcactagactcgtgttcctggagttacaggtggaaagtagtagcttctttttatagaccactaaatgcctacttactaaaatctgccaggaaaggaaaaatcttgtctgacaaattattttaaaatgtggattgatcctggagaagacagaaagccacactaaaagtataatttgtcagtatcatctagcacagcagttttcaaactatgatctcaggactcctttacaatcttaaaaaattttcaaggatcccaaagagtttttgtttatgtggatagtacctatcaatgtctactgttttagaaaaaaaatggggaaaatgtacatgttttctacatgtatttatacatgtataaaatgtctacacgcacacacacacacacacacacacatatatatatatatatatattttttttttttttttttttttttgagatggagtctcgctccgtcaccccaactggagtgcagtagcgcaatcttggctcactgcaaccttcgcttcccgggttcaagcaattctcctgccttagccacctgagtagttgggaatacaggtgtgcacgaccatgcccggctaattttttgttgttgtatttttagtagaagatggcatttcgccatgttggccaggctggtttcaaactcctgacctcaagtgatcagcctgcctcaacctcccaaagtgccggtattacaagtctgagtcaccacgcccggcctatttatttatttattattgagacagagtctgctttgtcgcccagactggagtgcagtggtgagatctcagctcactgcaacctctgtctcccgagttcaagagatcctctcacctcagcctcctgagcagctgggactacaggtatgtgccgccatgcctggctaatttttgtattttttggtagagatggggtttcaccatgttggccagcctggtcttgaactcctgagctcaagcagtctgcccacctcagactcccgaagtgctgggattacaggcatgagccaccgcatacagcctatttatttttgagacaggatctggctctatcacacaggctgaagtgcagtggcgcaatcacagcccactgcagcctcgacctcccaggctcaagtgatcctcccacctcaacctcccaagttgctgggaccacaggcatgagctaccacacctgtctaacttttgtgttttggggagagacagggtttcaccacgtttcccaggctggtctcaaactcctgggctcaagtgatccacctgtctcagtctcccaaagtgctaggataacaggcattagccaccgtgcccagcccatatttattcatttaaaaatagcaatggcctgggaaacatggtgaaaccctgtctctacaaaaaaaaaaattttttaattagctgggcatggccaacacctgtagtcccagctacttgagaggctgaggtgggaggatcacttgagcttaggaagtcaaggctgcagtgagcagtgatcacaccactgcactccagcctgggtggcagagtgagaccctgtctcaatataaataaataacaatgaactcattacgttttatgaaaaataactattttccaaaacaaaaaactgtgagaagagtagcattttaacatttttgaaaatatctggcagctgtagtctcatgtcagcgtctgcattcagtctgttgttatatgtcatgtaacttatggaaagttccactgtactctcatgagagagaatagatttttatgaaattatagaattattctgaagatagttttgaccttgtagacctactgaaagggtctctggatcccccaggggtctctaaaccacactttgagaaatgctgatgtagcagaaatgatgaatgccaggctctggaaattgaccaccctaggtacctattttttttttttttttttttggagatggagtctcgctctgttacccaggccagagagagtgcaatggcgtgatctcagctcattgtaatttccgcctcctgggtaaaagcaattctcctgcttcagcctcctgagtagctggggttacaggcacacaccaccacgcctgtctaactttttgtatttttagtagagatggggtttcaccatgttggataggctggtctcgaactcctgacctcgtgatccgcccgcctcagcctcccaaagtgctgggattacaggcatgagccaccgcgcctggcctagatacctgttttataagttataccaaataccaaccttttgtatgatgtagaattaatactttctcaaaagctataatttcaaataatttcactttcttcagtaaggtaattcattaactgtgtataactaaatctatatatttaatttttatcacaaattagaaaagattattttccaatcacatctggaaaatataataaagcttcattctgtagcacaaaataaacaatcaacaagtatttgtcaaatgttctttttttttttttttttttgagacggagtctcactttgtcgcccaggctggagtgcagtggcgcgatctcggctcactgcaagctccgcctcccgggttcatgccattctcccgcctcagtctcccgagtagctgggattacaggcgcccgccaccacgcccggctaattttttgtatttttagtagagacggggtttcaccgtggtctcgatctcctgacctcgtgatccgcccacctcggcctcccaaagtgctgggattacaagcgtgagccactgcgcccggctgtcaaatgttcttacgctccatatagctggaactgactggatatgagtagctttatgcttttcaccgaactctgaactaacgagggcaggatgtgagctaatgacaattctagattgttaagtccactccatgatccagataatagtaattttaaaattggcttcaccgaggtgagcagaatatagacctgttatatcaaagagtatttcttgcttctcactttctgctggaggtaccagagagtacccagactgaaatatgtttctagtgaaataataatagctactctttaatgaatgtttgctaagtgtcaggtattggtgtaggcatacattgtttcattttatctttaaaataaccctgtgaggtagatattatctccattctatgggtatgtaacagtcacaaggtctttcagctggtaaaatctgtctaactgcagatctgagttttaatcagctgactgcctctggattaaagaagcctgggttaggggtaagagtaggaattggaaaggctgttttctgcctttggattttcatgcaattatgtcgataggagaaaggaggagacagggtttttagatgatttttatctctgatatggcatcaactcaacaacaaagaatgacggcctcatttactcttctgaatgctgattaattttgggtcagaattgacctccaatacaacaagagtgggtttcactaaaacatgttgcttgtcagttactgagcaactgctgagcatagtaccttggtaaatataaaagcagtctatttgtgtttacaaggagtttaaacatgagttgggggttaaatattattggtatacagaatagtataccagtaaatgtaaattaaggtatccactggcattggcctttgaatggaactattttttttttcccccccaccggtgtaaaagagaatgtgttacagatgtggctaaatttatgctctgaataaatattactctatggctcaggaactttggtgataaggtaaaaagttttcatagagggagataaagtttcttattctcaatccctcctttagagataatatattctaggttcaaatgcagctcaagaaaataggttaacggcactccattttacacctcccagtcatattttcattatgggactccttaagatgctaagggctaaaactggttttgacttatcctgaaagtggcaatatagagttttcctagtgctgatgttcttaaaaatctctgattacgggggagagtgagatctttcttgaagaaccaaggaatagttcctcaattttcaaagattcaaaagttggaaattaattataatcaatcaatgataacatcatagaatcttagatatacaaaaaaatcttagaaatcatctcatataacctctttttattttttattcttcttcttttttttttttttttttttgagacggattctcacactgtcgcctgggctggagtgcagtggcacaatctcggctcactgcaacctccgcctccagggttcaagcaattctcctgcctcagcctcccaagtagctgggattacaggcgcccaccaccacgcccagataatttttttttgtatttttagtagagacggggtttcactatgttgaccaggctggtctccaactcctgaccttgtgatcctcctgcctcagcctcccaaagtgctgggattacaggcgtgagccaccacgcccggcttttttattctttttaaaaatttaaatccttgggactctgcttgatataacctcttcttttagatgatgaaaccaagacccaagaggtaagtgattttaccaagtttatatgccttattagtagatctgagactacgatagagtgctaataggtgatttccttctcacctttcctagcttcctgatttctttcttctcgactcctgaaagatctaagtatttccataatctcttggttaggcaggaaggtatccaagatccaggatatctatatgcaggaagagcttagtctcagttctacttttccctccaattaagatcttggtcttttgatgtaaggaaactgccatttattaatcacctcctttgtgccagggtctttcatatacattatctcactgaattacttacaagattcttatgaagtagattagtggttctcacattttaatggacatgtgaatcacctggggatcttgttaaaatgcagattctgattttgcaagtctgagatgggctcaagattatgcatctctaaaaagcttccagccagcacagtggcccacgcctgtaatcccagcattttgggagactgaggctggtgaacattgtcaccctaaagaagtgataaatgttgaaagtgatggatatggtaattaccccagtttcatcattatactatgtatacatgcattgaaacatcacattgtaccccataaatatgtacaattattatgtgtcaactataaataaaatttttttaaaaagaattggcccgtgggttttctccattacagatttattgccaaaccctgtgcactctgtattggcatcgaggacagtggtccttatcaggcccaacccaatgccatccttgaaaaggtgttcatatctattaccaaggtaagtgggcaaagaaacagagaggaatattcacataaggcgttgctccatggggcaggggaggatagagagcacgtacctctaagggtaaggataggatgggatggtccttcatatttgagtagtccatgtagctatatggagagctttatcccctcagggaaaacctttgggccctacgtatgtcaagtttacgtacgtagtaggtttgagttttaggcccagcagccacccttacccctctttccccagacacataccatatctggtttttgtttttccttgttccagtttctgtcactgcctagttgtgtgatcgagatggagacagtactgatagcctttgcagtttgggttttttgttttttggagagacaaggttttgccatgttgcccaggctggtctcggactcctgggctcaagccatccttcggccctcagccttcaaaaatcccaggattacaggcatgagccaccatgcctggcctgcaatttgggtttttaatatccttttttactcagcttgggctggaggaagagacaaaaggatatgtataggtgagcagtacaggtccttgatatgtaagataaaatttcttactaaaaatgactttgggataaaacttggaaagataaacatcacttgagccacttatggctatcataccttgtcgctcagctagtcaatgggattgaaggaggggtatgaggagacgggtgttctgactctggttatacattcacagtatcctgataagaaaaggctggagggcctgtcaaagcagctggattggaatgtccgaaaaatccaatgctggtttcgccatcggaggaatcaggacaagcccccaacgcttactaaattctgtgaaagcatgtaagtacgcaaggagggagggagggaataaggaagacggtgggatacaactggactgaagtttctgttttgaacatcacttctgttgttaggacaacagttaatggatatagagaactaactcagcctattataggtaggaaagaagggaactggaacactgattcccttaagtttcttgggcatgttgccactaagctaggtgtggttctattttgttcccttttcctaaatagattgggagtaaatccttataactgtacttatgtaagtagatgtactaacacatgtataccttaatagagggagtactagcttgcttgctataagttgacaatttttaggaagcattccttttctgggaaatactatttttcattttattgagctttttctcattatcctgtctgtgagcactgtattagtaattgtcatgtaaagaaaaatgctagggagtctgatgatacagcctaatattttcctaatgaaagatgacgctgctttggcttttttttttttttttttgagacggagtcttgctctgtcaccagactggagtgtagtggcacagtctctgctcactgcaacctccgcctcccatgtccaagcgattctcctgcctcagcctcctgagtagctgggactacaggtgcacgccaccatgcccagctaatttttgtattcgtagagacaaggtttcactatgttggctaggatagtctcgatctcttgacctggtgatgcacctgcctcggcctcccaaagtgctgggattacaggtgtgagccaccactcctggcccctgtctttggctttttaaatgacagtagttgcctattctaggaattgatcctctttctcaccagtaactcttatccccaaatttgctatcttgacttccgtagcctcagaggctttggtttgagtggacatttgtctaacctttactctttgcccacccaggtggagattcacattttatttatgtatattctgctatggaattagatttctctggtcggtgagtcttaactttctctagtcctctgttgggttctaatcatgcctagatctctagaagtaagagttaaatacctttagatttttttcttttctttttttttttttttttttgagacggagtcttgctctgtcacccaagctggagtgcagttgtggaatctcagctcacttgcaacctctgcctgttgggttcaagagattctcttgcctcagcctcccgagtagctgggactacaggtgcacatcaccatacctggctaatttttgtatttttagtagagacggggtttcaccatgttggccaggctggtcttgaactcctgacctcaggtgatccacccgccttggcctcccaaagtgccaggatttcaggcatgagccactgagcctggcctaaatacctttagatctttatatttcccccaacttttcctctgtgatgcccacagcccaggtttatatcctaatagattgtcttctgtctggggcctgacttcagtaactttataactttactgcttctcccctagaagatactaataatactagtaataactaaatcagcataatacttaatggtttacaaagcacttgacaaaaattgaaggaggagaaatggaataaaccctttaaagtgggtgaaacaggtattattcctactttttagttaattgtcagaatcaaagaagaatttcagggggccaggcacagtggctcacacctgtaattttaacactttgggaggccaagatgggcagatcatttgaacccaggagttcaagaccaacctgggcaacatggtgaaaccccgtctctacaaaaagctacaaaaattagcctggcgtggtggcgtgcacctgtagtcccagctactcaagaggctaaggtaggagaatcgcttgagcccaggaggtcaaggttgcagtgagccgtgatggagccgctacattccaacctgggtgacagagcaagactctgcctcagaaaaagaaggaagaagaattttaggctttttgattctttagttcatgtttttttccccataccatactgtttctctctaaatgatatcattgtgttttcaaaatattatagacaaaaagctggcagaactaaaggaagagaatagacaaatatacagttgtatttgaagattttaatacttttctctcagtaattgacctaaaccctaggcaaaaaaaaaaaaaaaatcactaagggtgtaaaagatatgaatgacatgatcaaccagttttaccttattgacatttataaaacactacaccaacagctgaagaatacatataattttcaagtgcatgtagaaagataaactaatgctgggccataaaataagtctcagtaaatttcaaaatattgaaatcttaaagaatgtgttctctgaccataacggaattaaattacaagtcaattgtaatgagagacatggaaaacatttggaattcgcctgcatgaggttgctcacacctgtaatcctagcactctgggaggctgaggcaggcaggttgcctgagttcaggagttcaagaccagcctgggcaacagggcaaaactctatctctactaaaaatacaaaaaattagccgggcatggtggcacgtgcctataatcccaactgctggggaggctgaggcacgagaatcgcttgaaccttggaggcagaggttgcaatgagccaaaatcatgccacttcactccagcctgggtctctgtctgtctcaaaaaaaaaaaaaaaaaaaaaaaaatttggaagttaaacaactcttctcaataacctgtggatcaaataaaaaatcacaagagaagaaaatatttttaattgaatcatgctaaaaatcatatcaaaatttctgggatacagataaaacatacttagagggaaatttatagctttaaatgtttatattacaaaaggtttaaagttgatctaaatttctgctttaggttcttgaaaaagataagcaaaataggttaaagtaaggaaataataaaaaataagcagaaattggccaggcgtggtggctcacccctgtactcccctcactttgaggctaaggtaggaggatcacttaagcccaggagttcgagatcagcttgggcaagatggcgagatccagtctctatagtgagaccccatttctaaaaaatgataataaagtaagtaagtggaaattaatgtaataggcattagaaaaacaatggatacatttgtggggtttttgtttgtttgtttgtctgagacagagtctcactctgtctcccaggctggagtgcagtggtacaatctcggctcactgcaacctctgcctcctgggttcaagtgattgtcctgcctcagccttcctagtagctgggactacaggaatacgccaccaggcccagctaatttttgtatttttggtagagacagattttcatcatgttgccgggctaatcttgaactcctaacctcaggtgatcctcccacctcgacctcccaaagtgctgggattacaggcgtgagccaccacgcctggcctgttttgttttgttttgttttgttttttaaagacagggtcttactctgtcacccaggctgaagtgcagttgcgtgatcacagctcactgcagcctcaacttcccaggctcaggcaatgctaccacctcagcctcccaggaaacttgggactacaggcatgtgcacaaccacaccgggctaatttttgtattttttgtagagatggggttttactctgttgcccaagttggtcttgaactcctgggctcaagcaatccacccacctcaccctcccaaagtgctaggattaacaggtgtgagctactgtgcctggccatggataaaattaataaagccaaaagttcattctttgaaaggtttgattaaaattgaccaactccaacaaaaaaaggaaatatgaattatcaatatggaaagggttatcactacagatcctatagtcattgaaaggataataagacagtattatgaacaatttaatgataagaaatccagcagcaaagatgatgtagacaaactccttaaaggacataatcattattccattagagatgattacttttgacttctgaacatggcatggagatatctttcttggttatcaaatgaatcattgtcttcctgtatatatattccaggtagtgatatttcctaaaactagcctaaagctctcactgttcttatttacctcaaagcattgtttttctatttataacattctgttgtagaagaacagtctagctatttattgatcctttagggagccctaaaatctgtttgggggcttttctgtcctcttttgccccagcctagagagaaggggattatatgaggtagatcttgaagccaggtgagaatcttgaggactgacatggattatctgttttctcttagtcaccttggttctgggacatccgacagtgctggcataactatccatttcaggtaggatctgagtcgtttcaggataggggtcttgaatgtgtataaggtggagtgagtgagggtcctttgccagtccccaggacagatggtgcgtttccttgggattgagggattagggactgagtccctttaagtcatattcagggtatctatttttttttcccccccactgctaagagtcatatgaggtatctattcctgaggcccccatagcaatgaaatccaatgagttttttgttctgattttccccatttaattccccctaattgggctaaaagaaaagcaagtttctggtatttaatgaggtactttctggttcaggtgtcttttttgtatcaagggtaacttggaatcccagtagagcatcttggttgtaacctatactggaaatatgtctaggaactgctaaaggggtggaagagaaggcctatgtgtatttaatcctgtgaaaagcactaattgcccagaatcctagacatactgatttgattgtgttacagtatgtgttaactgtatctcatctctgcaagatgagagctgaagatgtgtgtgcagaggagcaagggaagaggcttaagtctctacaccaatccaaagtctgttagctattgcatatcttggcagataatggggaggagagatgtctaataatttggggtattggtcctccaaggcagagaaagttggagagatggaatgcacctttgactagccggtaatctaactacttctttctctcttccagcctctttcaagtgggctttatcactattatatcatggaattggccttctattggtcccttatgttttctcagtttacagacattaaaagaaaggtaaggacgttggctccctcaattccccaacttattacatcctcctttctagcagcttccatgactgccattacgatgtattatcttccctgagactgcaaaaggagaaactgggtttgatggactcttagcttgtcgtaatgttcccagaaatgagactgaattaatgatgaagtatatttaagacattcagggaagccccaggatgagaacaattaaccagctaagaagcatacttttttccatattcttctttaagcttcttacatatctaaagctcaggaaactagtcagaattgggggatagcaatgccttattcagaaaaaatgtctgattccagaaaagctggatatggctttcacatggcattagggacccttgctctctctgttctccctttctggttaccccacttactcaaagaaagtcaattggaaggggttttgctctcttcctgctattgtttaggaagcaaagattgagagaagtgagctgacttgcccagatagtgacagagttggaaatgacttaagttttacacaacttaagtcatttaaaggcagaatctttacctttttattagtgtctacctgaaataatgtggttctagcagctctaaccctaatctgtcactaactcagggttatctttgatgaagaaaaccagggttagcatttatgggaatgaattaaaacttacccaggttgttagtgttatctaacatagaaacttgatactcaatttttatgccttttactctcctatggtcagaagacacaggtcactttattaaaattttattttaattgtgatacatataagaaagtttgaaatacatatttaagttttaaaaataataaactgagaagtatttaatagatgtgtctgataactcaagtatttagagacttccccaggtctaacttgacatttgaacccaagaggaaattagagccacaaacctctcccttccattaggtccttgtggttgacgtttctctcattaaagcagaagagtcatagaatctcagggaactctaaggcttgtatgtcttactgggatgttatccccaagtgtcagcttagcatccatgctatacgtattctgcagttaccaaaggaaatttttactttctggcctctgagctgcattaacatagagtatgggtcagtcactgatgtagggagtgttcagttaaatgctaggtagccaagggagagtctaagcagaatggaaactttttttttttttttgagacggaatctcagtctgtcgcccaggctggagtgcagtggcgcgatctcagctcactgcaacctctacctcccaggtttgagcaattctcctgcctcagcctcccgagtagctgggattacaggcacatgccaccaagcccggcttatttttgtatttttagtagagacggggcttccccatgttggccaggctggtctcgaactcctgacctcaggtgatccgaccaccttgccctcccaaagtgctgggattacaggcatgagccacctcgcccggccaatggaaactattctatatggggtggggtaagattcttagagaataatgcaggacgttgggttggctggtgtttctagggcccagcttttacctccctcttctatttccattccttcctaggacttcctgatcatgtttgtgcatcacttggtcaccattgggcttatctccttctcctacatcaacaatatggttcgagtgggaactctgatcatgtgtctacatgatgtctcagacttcttgctggaggtaaaaacccaatctctctttctccatcttcttcttctcttcttttcttcctatgtgaggaatgactttctccccagctcaattctttcttcctttctccaggcagccaaactggccaattatgccaagtatcagcggctctgtgacaccctttttgtgatcttcagtgctgtttttatggttacacgactaggaatctatccattctggtaagtggtagggctgtagagttgtggtaggtatgagcctaatgatacctttttgccaattctcattttgcccattcagtttttctgttctattctattctactttcgccaatagaacacaagaaccctattgccctgcttttaccttagcctgtgctgaccttctgtggactctcataggacctctgctgcctcagaccgtatttctagcaaggtcggatccagactcagagtacccggcttggttggcttctcaggactgactcatctctgaggaacagtcctcattttatgcctaagtaattcctttgacttcttttgcactgttgatacaattctcagtcccttcttgcttgtgttcctgctctggtcccaaccctgacacacacacacacacacacacacacacacacacacacacactcctctctctctcttcctccctctcctctctctccctccctcccctctctccctccctcctctctctctccctccctgtcctcctctctctccctccctctcctctctctctcttcctccctctcctctctctccctccctcccctctctctccctccctcctctctctctccctccctctcctctctctccctccctccctctcctctctctccctgtctcctttcacttttacattcactgctctatgggaatcagctacctactgtcctatcctatatgtgcctgaggagctcagtcattcataggattagagtcccactgctgtcctaatttcgtgaaactctggatatttgaagtgattaataatgtgacttaatccatcagttcctaagatttatatatctttctctgtccctaaggatagaaaacacaacaggctcctccctttctttattttcttactgtggatgacggtccctggaacttcagctgataaaagggctggtaggaaaacac

SEQ ID NO: 798 - DNA, 4222 bp, Homo sapiens; identical to SEQ ID NO: 685
  source 1..4222: mol_type = other DNA

SEQ ID NO: 799 - DNA, 18349 bp, Homo sapiens
  source 1..18349: mol_type = other DNA
aagctgcgaggcgcatgcgcgttgcagggccgtccgctctgctgccgccgctgttgcagccaccgccgttgccgcctccctgccggcaagtgtgtgaagaagaagctgagcgttgtcgccgccgctatgggggtgagtgaggcagagagaggagatgggaggtccaggggcgctcctcgctaccctcgccccctttgttcttaaacccccctctcacgtgaccccgaccccctccagcctcacgtgacccctgacccccacatgacccgactcccccattctaagggtccctacgctaggcctagcccgggaatcctctggagagcccctggtccggggccccaccccctcggcgcccccagcgtcacgcccgccccttcctgcttcgcggacccgttactggcctccccaccaccgtcccccgcggggaccctggggttagcttcccgctcccccagggtcactcatcacctggctgtcaccagcttcgtcgcttttcacatccgaggtcaaccctggcttggagggaattgaggcccagaggaaagaaggcgcctagccaaggtcatattgtcgggggcgtcagaccccaccttgggcctcccgaatcccagtccactgcccttcccgttactcgagtctcagcgaagccggttcccctacactctttcgaaacctctccaccaggttcctgctgctcctgataaacacagccttcctttcccatagactcctgccttcgacgcctcctggttgcaatgaaatggttcttacgaccgcttgggttgttaggggttttggtagtgcaggtgttttttgcaaggggagggctgtgcaggtgtgcggggaagatgcggggaggcgggggcggcggcccagccgcggatggatattgaccacttgttccgtgccggcagcctggaggtgcattttagtttactttcccgggatatagggtagggcagaagttatttgcaagtttctgtgcgttcaccttactaagtctcaattacagcagtatcagtcaccctcctaaaaagataacgcttttcctagtattggctgtattctttttttttttttttttttttttttttgatatggagttttgctcttgtcgccgaagctggagtgcaatggcgcgatctcggctcactgcatcctccttcttctgggttcaagcggttctcctgcctcagcctccccagcagctgggattacaggcgcccgctactatgcccggctcatttttgtatttttagtagagacagggtttcaccacgttggccaggctggtctcgaactcctgacctcgtgattcacccgcctaggcctcccaaagtgctgggattacaggcgtgagccaccacacaggcctatattagtatttacatggaatttccatcaccttaagggaaccctgactttggagcccgaggtacctcacttccagccccgtcttcgctgctggtggtataatagtgtgccagtgagttggcctttatgtgtttgaatttcctcacctctgtaattgggatgctaatacctcccccttagggtagtagtgaagattaagtgagataatggatgtagattgctaaggaggtgtctcctaagtagtggctgttatttttgtctgtatcctcagccttaactttactgatctaaaatggatttgtgctatttttaacccattgggtttgtccctactgttgttaacctagtttttttttttcccgtcactccactatttatcgactgaacaaatcaacttattagacaaaaatagttgtctaatccgtgtcaaaacagtcatcgtgttttaacaaatagttttgggtattacgtacttcatatgtagaaaaccaagtctagagaccttaggcatatttaacctaaattttggtgaaaggtcctagacacagccattgttgaaactaaatgaaacctgtgtcccttagtaactgtctaaccagaagcagccactgcggattaagcagaaaacaagaagtgtaacatgccgttctagttcaacacttcctcgttggttggactgaaatagcaggccctcaacaccataagacagggtgaaggaaaaaagaaatatgccccagagattctgcgatccttgcttcctttagggcctcaatcttatactttacagatgtgtttctcacatgagaccctacaaagtctcttctggcctaaaattgacagtaagagagacttgaattctcctccctgaaacagctggaaccgtctcatcaccctcattccacaactgtgggtgctggggaagtcatcattccttgtagttaccctgtggcagagcctggcctcaggctgagtgaggcttcagatggagcgctttctcttcagttgccacacacgtgtcctagttgccacatttgtgtcatctttcaggagttagaatttatatttctcttgcttcaccaaaaacagattctttttggatattggatagtatatggggtagagacattgatactgaaaatctaagagatgccaaattctttttctgaaaagtggctcctcctcccatctggatgtttcttttcttttcttttccttttttttttagacagagttgtgctctttttgcccaggctggagtgcagtggcacaatctcagctcactgcaatctctgcctcccaggctcaagtgattctcctgcctcagcctcccgagtagctggaattacaggtattaaccatcatgcctggctacttttttctgtttttagtagagacggggtttcaccatgttggctaggctggtcttgaactcctgacctcaggtaatccacccacctccgcctcccaaagtgctggggttataggcatgagccaccgcgcccagcctgggtgtgttttttttaatttgtctttatgaccccttccagtcgtagaactgtgtgtggagttactttttcaatgggaatagtaaggggaagagttttacactgcacatggaaacatttatgtaacactttataacaaaaaatgccatatacatgtgattgtgacatggtggaaggagcatgactttagggttcaaacgtggatttggatcttggatgattcattcagcagatgtgaactgagtatctgctgtttggtgagcactgggtgaacatagccagataaagcggatctaccctcacctcatggggagagttggagggagtgggaggaagagaccgctttgagaactctcctcaccgcctctgtgaccctgcaagttccttaactctctgtgcctcaggtttctcatcaaagaagtagtcacacctaccatgctgggttgtgaaaagtaaaatagatcacctttattaaagcaccggcagaagatctgagggaggtctttgtaaacagaagtcccctcctgcgactgttggtgtagacattgcgagccccattttatggagaagaaaactgagagagaaattttgagcaacttgctgaaaagagcttaagtaacttgcctgaagtcacgcagctagtaagtgaaagagctgagaatcaaatccaggtcttttgattcaaaatcccgcactctctttttttgtacaaagctcccttggaaaagacacttaaccacagtgagctttactgttcactgtgcttattatccattttaattaggagcattttcctgtgtccctgtaggacagccttacttccacaaggcaggggcaaagctaattggaacagtaggagaccacttttcctagtgcggcccctccctgcctgtctggcccagctggctgcaccctgccttctgccccatgggcaggcagcggagctcgtaaggggttcttgagttattgcggtctcaggccatggcagctccaggccttgctctgaggattgccaggtctacatgaatgagcccacaaatctactagaggcccggctggccctcctgctgcttgttcttgggaattactgctcatgcttagaagtgagatggagggaacccaggcttcagtgctttctgggttctgggcgttacccttgccctccagcacctttgatccctgagccctgtataagagaacaagcatgtagggtggagtaagggagcttgtacctgcactgaaggtgtgctggcttctaacctgcccttacagctccaagaggccaacatttgtacccccatcttcatggagatggagttgctttcataagtcattctgggggtgtcaggaagagcataggcccaatctgattgacgccaaagctcatgctcttctgccccatggtgcagccctggacaccttccatccgacgcttctctgtccctcacctctgcctcagtgcagagggtagggtgtatagcggcactgtgttggcacgctgttaccaaaccagccaggcaatgagaaaggagttgccgagtggttgctgagggcttctgaagcccaggccttatcgtggcagggtgcaagaatctttgttgatgaccaagtggaagtccactatgcaggacataggcgcctcagtaggggacagtgtggccagtggaacaaacatgatctgcagcccatccctgggattgagtctcccctctgccctttattcactgcagaactgagtggtcacattgtctcttcaaggctcagtttcctattgtgtaaagggaagtgatagtttctgccctgataattgaaaccataacctaggccgggtgtggtggctcacacctgtaatcccagcactttgggaggccaagacaggaggatcgcttgagctcaggagtttgagactagcctgggcaacatagtgagactcccccatctctaaaaaaaataaagaaaaaaaaagaaacataatgtttgtaaaggtactttgcaagctttatctctgtgttgtcttgaaatctaaatttccagagaaaaagatgaatgctctaaacctgtccatggtagagggaggctagttctgttccaggagtccagccttatgaagacagtctattctctattttgttccttcctctagggaggtaagatatgagatcttgcctgtgttccacagcgctcagccatgagataattaatagctggtgttggtagagtttgtggctataagaacaatccctgtgagttcctggtatctgaactcctttcttcttggttgattaaagtaggaggtaagcagtgtcattccttggaaaatagtgggtagaactgattctgagaacttccccagcatctggtttttcaactcatgcagaaggttaatcgctctgagtgtcctttcctggggccagtccgtgtcagggctagatgtaattgggagttgtcaaacctctccagagagctcagggaaaggaggggtgttgggggggaggtgtcaaaagaggctgctctattggtaaaaagcagagccaacttaccagtgcctttgggatgccttctggggaccagctgggtggtgcatgcagtctgcatgcctgtgctctcttgttgtcctggggagagagaatgagaatagccttttattgaacacataccatattaaccctcataaggaccctcagtcatcaagccaggggaggctcagagaagtgctgtgcctcgtcctagcactgcagagggtggagagcaggaagaggctttggacagccctggcgcagtggctcacgcctgtaatcccagcactttgtgaggctgaggcaggcggattacttgaggtcaggagttagtgaccagcctggccaacttggtgaaaccccgtcactactaaaaatacaaaaatcagctggacatggtggtgcgctcctgtaatcccagctacttgggaggctgaggcaggagaatcgcttgaacccaggaggcagaggctgccgtgaaccgagatctcaccactgcattccagcttgggtgaaagagtgagactccatctcaaaaaaaaaaaaaaaagaagagaaaaaaggaggttttggatgaggcctgccaggtgtcagagcctggctcttgccgtgtgttacctggcttttcacaatagggtgagtgggtcttaggcctgagagaatctcacgtcggcctcaaaacaggacctgatctagaagcagctgtgggcaatttgccattcgctgctctatgccaggagaatccccacttgctgctcctctgctgccctgctgctgactgtgtgcctgcagcttcgtcttgctggccatgtgtcatctgtgtcctgaggtgaaccctttgggcccctgccctctgccctgtcactgggtgtgccctgtcactcgttggccttaactgagcagggcttctgggaatggctctgtgtccttgagtccgaacacggtggcccccacttgaaatgagacccggctcccacaggagctgtggccaaccagatctttgtctcccaaagctggaagacaccgaaaaggctttgaataaacttaggaacagccatcaacggctaccttagatgctgtctcctccctgaagcggtcttcagtgtgtctaaagttgggtgttccctccttaggagggagcgggtgagtgaatatttactaagtgcctgctgggggctggcctgctgtaggcgttgtcagctgtttcgctgggtccccacagtgtctgtgtcaggacggccagtgctctttctgaagggaagctgagaagtctggtgacctctgaggactccccactacaaaatgacctgcttgggtctttccgcccctccaaatgtgtggcagcagaggtgggaaatttctcactgctgggccaggcctgtggatgcagggcccttcgattccttaaagggaaagtcagtgcttgattggccacagccattccagctaacgttgcttttccctgttgcagagaaagtcaagcaaagccaaggagaagaagcagaagcggttggaggagcgagcagccatggatgccgtttgtgccaaagtggacgctgccaacagggtgattctccctttcttcccagtccctgcctcctgggacttcagcttggtttataatttgacttattttgtctccaccctgtggcagaattgtgacactacccacccacaccgcctctgcctccttgctgtgcagggaactgagctcatacctgtgtgttggaagttggcgccagcagttggcccaggtgtttgggaaaacgtggattccagtgaagtggctgcctccctgtggatcttcttccttatgaatagaggaggatctagataatttttttttcttttgtgtgagacagggtctcactctgtcatccaggctggaatgcagtggcactatctcggctcacttcaaccttgcagcctctgccgcctgggcccaagtgatcctcccacctcagcctctcaattagctgggactataggtgcccaccaccacacccgggtaatttttgtagagacggggtttggccttgttgcccaggatggtcttgaactcctgagcccaagcatttcacctgccttggcctcccaaagtgctgggattacaggcgtgagccacagtgcccagcccctgcctccatttagtatcccattttttggtcattcttttaacccactcatagtaaacactcatttataaggatgtggctcaggggcttgattttccatttggagttgtaaccaggtaaagtcagtgtgcagcagatcaggtagcctcttctttgggttagctgtgctgtgagcaggttgtatgcccacaggctaatgaggtctcctcttgccctgtcaggtgatgccaaacttaactctcctgggcctttccaccaaagccttcctcgcacatgtgacttcagagctaggcaaatggtgggttttgggaggctgctcctggttctgaagttagtctcccgttgtgggtccccacagcatcccactccaagacaacagctcttgggataggatctgcacctccgccccacttgtctgtgctgttcctcttttctttccctccacagcttggagaccctctggaggctttcccagtgttcaagaaatatgatagaaacgggtgagtcacattgagcattaccaactgctgtctcctcgagtgtcttcaggaattccctttccagagtaggcttcctcagacacaaattttctcattgttcttcgtatttacgaaaaaacagggctgggtgcggtggctcacgcctgtaatccaagcactttgggagaccgaggtgggtggatcacatgaggtcaggagttcgagaccagcctggctaacatagtgaaaccccatttctactaaaaatacaaaaaattagctggcacggtggcgatcgcctgtaatcccagctactcgggaggctgaggcaggagaatcacttgaacccggggggcagaggttgcagtgagccgagatagcaccattgcactccagcttgggtaacaagagtgaaactccatctcaaaacaaaacaaaacaaaacaaaacaaaagcagaaactgactcgtgccctatattgatataaaatcccccaggtagggtggcagaagaatccataaatgagcaaagattgcacttaatctcagactgatgtctctttagataaatttttcttttattttttgagatggagtcttgcttagtcacccaggctggagtgcagtgacgcaatctcggctcactgcaacctccgccttctgggttcagccgattctcctgcctcagcctcccaagtacctgggattataggtgcgtgccaccacacctcactaatttttgtgggtttttttttttttttttgagacggagtctcactctgtcgttcaggctggagtgcagtggtgcgatctcggctcactgcaacctctgccaggttcaagtaattctctgtctcagcctctcaaatagctaggattaaaggcacccgccaccacgtccagctaatttttgtatttttagtagagtcagggtttcaccatcttggccaggctggtcttgaactcctgacctcatgatccacctgtctcagcctcccaaagtgttgggattacaggtgtgagccactgcgcccagctaatttttgtatttttagtagagatggggtttcaccatgttggccaggctggtctcgaactcctgacctcaactgacccacctgcctcagccacccaaagtgctgggattacaggtgtgagccaccgcgcctggcctgatgtctcttcaggactgattattctctctgcaaagaatcattgagctgaaacaaacttggaaaattatctaggctgacactcacatttaatgcatgggaaactgaggcccagagagtcaaatgagctttctgagtttatggagtttcccctgacagctgaggggcttttaatttccaatctagtgctctttccctgagtatacagtataattgttaaaagccaattcctggctatttggccctgaacaaattacttttcttctttaaaaagaaaaatatttgctgggcgtggtggctcacgcctgtaatctcagcactttgggaggccgaggtgggcggatcacgaggtcaggagatcgagaccatcctggctaacacggtaaaaccccgtctctactaaaaatataaaaaattagccaggcatggtggcgggcacctgtagtctcagctactcgggaggctgaggcaggagaatggcgtgaacccgggaggcggagcttgcagtgagccaagattgcgccattgcactccagcctgggcaacagagcaagactccatctcaaaaaaatgtatatattttttggtagagaaggggtcttgcctatgttgcccgggctggtctcaaactgctgtcctcaagtgatcctcccacctcggcctcctaaagtgctgtgcccagctgaccctgaacaaattacttaacctttctgttcctcaattttctatttaaaaatgggcctgggccaggtgtggtggctcatacctgtaatcccagcactttgggaggctgaggttggaaggatcgtttgtgcccaggagtccaagaccagtcctggcgacataggaagaccctgtctctacaaaaaaaaaatttttttaattagctgggcatggtggcacatgcctgtattcccagctactgagaaggctgatgtgggagaattgcttgagcctgggagatgcaggctgcagtgagccatggtagcagcattgcactctagcctgggtgacagcaagatcctgtctcaaaacaaaacaaaaacccaaaaaccaaaaatggttctaataatagtacctttctcatggacttgtcaggaggataagatgtaaagtgttagttcctgcagcataataaaagctagataagtgtttgctgttattttattttaaaattttattttagattcgcggggtacatgtgcagctgtgtagtggtggggttgggcatctagtgtacccatcacccaaatagtaatcatcgtacccaataggtaaattttcaaccctcaccctgtttgctgttactattactgatccagttaactataggctctggagtgaaggccccctcacgtttttttctcgttttggtttctaaaataggaagtataatctgccttacctgagatgctgttgatgagttgtgcttccagaatgtaacatcttggcttggggataaactggggctctgggggattgaattgtagctgggcttcttaataactctacttggagaagtcactcatattcctcaagcctcattttcttacctgtcaaataggatgatgatgccaaacttgcaagctgtttttttttttttttttttgagatggtgtcttgctctgtcacccaggctggagtgcagtggcgccatctcggctcactgcaagctcagcctcccggattcacgccattatcctgcctcagcctcccgagtagctgggactacaggcacccgccaccacgcccggctaattttttgtatttttagtagagatggggtttcaccgtgttagccaggatggtctcgatctcctgaccttgtgatccgcccgcctcggcctcccaaagtgctgggattacaggtgtgagccaccgtgcccagccaaacttggaaggttttttttaaggaagaaagagaatatatgcagctcagtaagtagcagctggtatgaggttttttttgtttttttttttttttgagacagagtctcgctctgtgcctaggctggagtgcagtggcacgatctcggctcactgcagcctctgcctcctgggttcaagtgattctcctgcctctacctcctgagtagctgggactgcaagtacatgacatcacgccctgctaatttttgtatttttagtaaagacggagtttcgccatgttggccaggctggtcccgaactcctgacctcaggtgatccacctgcctcaacctcccgaagtgctgagattgtaggcgtgagccactgcgcccggcctggaaagtcttttgacatactttagatatcccatattgtgatatctcatagtgttttcgtttttgtttttgagacagagtctcgcccaggctggagtacaatggcatgatcttggctcactgcaacctctgcctccctggtacaagcaattctcctgcctcagccgccggagtagctgggattacaggcaccccccaccacgcccggctaattttttgtatttttattaaagatggggtttcactatgttggccaggctagtctcgaactcctgacctcatgatccgcccgcctcggcctcccaaagtgctgggattacaggcgtgagccactgtgcccggcctcatagtgttttcatattccgtattcccattgacttccagaaatgtggaatagctccaaaacaggcattgccagccaagtctgggctcctctggtgccttgaattttgtgtggttcctgtggttgtgatcttactttcatgtactttaatggagaattcgtacctgcaggtgggctttggacattttatagttaagataggtgcagtgctgtgtttgggcagctgtgatggctaagtgggtgataaagaaaggaagatgcttcaggggcagggagttctgaattcataaggctgagtgtggtgtgccagtcagtagaggtgatgggattccagtgcgtacatcctctgggggttgtgtcaaaggtcactgaaaggtattgatacgggagctctttaaaggcttagagtttgctgactctagtcctttcagaatgtagtgctctctagggaatgtgatttcacagatcagtcaaggagtttaactgttttttacttaaatttcatttagaaacagataccttaacacttaggcatttgtgggtttagaaaaacagtgttgggctgaagcctgcttcacccggtttttttttgtttgtttggagacagagtttcgctctcactgcccaggctgtagtgcaatggcacgatcttggctcactgcaacctccgcctcccaggttcaagcgattctcctgcctcagcctcccgagtagctgggattacaggcacccaccaccatgcccagctaatttttttgtagttttagtacagacgggatttcaccatgttggtcaggctagtctcgaactcctgacctcaggtgatccatatgccttggcatcccaaagtgctgggattacaggtgtgagccaccattcctgcctcaatctgtttgatcagctgagagtatcccccctgctcagatgaggcaggcaggactcctggggcggggtggggcgtgttgagccgtagtcttctcgaaggacctagggtcacccagtggttttgaaggcgcaattggtagataagaggaatggggtcccatgggagcctagtgaggagtcagctcagaaattacagcaacaggaaaaatgcctaagggcaggaactaaataacagaagacatgagtgtttataacaaagtacagaagagacagaaaaggtagaaaaagaataaagagagagcagagagggacaagaagtttacaaagtgccgaggcggattaggacagcttggggaggcaggaaacgggccttgtggttggggggtgggccgtgtggccacagttgttaatctcagcctgaaagactttgttcctgcaccttctctagtcatgctggggcagatacagggttggcttttctctgtgcagtaactgagactgggccttcctccctgtgattctgagggaggaacagcagtgccctggcaggagtgctgtaaccaattccgtacacgtcctgtcctcttctcaggttgaatgtctccattgaatgtaagcgagtgtctggactggagccagccaccgtggattgggccttcgacctgaccaaaacgaatatgcaaaccatgtaagcttgtcccaaccaggggagcctagttcctctcgcagctttcccgtctgactgctcccaaattccccaggtatgagcagagcgagtggggctggaaggaccgagagaaacgggaggaaatgacagatgaccgagcctggtacctcatcgcgtgggaaaacagctccgtccctgttgccttttctcacttccggtttgacgtggagtgtggggatgaagtcctgtactggtaggagccatggcttgggggaggtaggggagagagaccctggcgatgttccaggcactccagccaggtgacaaagcccctggacctacctaggtctatgagctgccaaggactgcaagctcctctgccagaccttacagcctcttcatgtcccatcctgcacgctcacctctctgctttcttcacctagctatgaagtgcagttggaaagcaaggtgcggcggaaaggcctggggaagttcctcatacagatcctgcagctcatggccaacaggtaaggcctcccttcttaggaggcccatatagcactcagttggaaggagctgtcactgaggcacttgccattctttgagccttgttggaggaggaggctcataggcatgttttgggagaaaggtgtcttagaaccctctcagtaagatgctccctgccttattatgactccagattttgtttgtttagctcagtgcagtgaacatcttttttttttttttttttttgagacagagtttcactcttgttgcccgggctggagtgcaatggtgccatcttggctcactgcagcctccacgtaccgggtttaagcaattcttctgctcagcctcccaagtggctgggattacaggcgcgcactgccatgcctggctaatttttgtatttttagtagagacggggtttctccatgttaaggctggtctcgaactcctgacctcaggtgatctacctacctcagcctcccaaagtgctgggattacaggcatgagccaccacacctggccagtgagcatcttttgagtttctaatctctgccaccttctgtaccgaagtaatggtgctacagagaggaagtgggaaacatccttgctctggaagaagccagtctggtcagggccgatgcctgtgcagtctgatcagcctgtgatgggggaagcagtgagtgctgtgtgggggtccaagacctccagaggctagaggccaaattcaggaacactcgtgtgggtgaaagggaggtaacagacaaaggcagaaaggaaaggaagcatgaccttagtctctgtgtcttttcttttttgagacagggtctcaccctgtcacccaggctggagtgcagtggtgtgatcgtatctcactgcagcctctacctcccaggctcaagtgatcctctagcctcagcctctggagtagctgggactaaaggcacatgccactatactgggctgatttttttaaatttttaaatgttttgtagaaatggggtcccactatgttttccaggctggtctctaactcctgggctcaaatgatcctcccacctttgcccctcaaagtgctgggattacaggtgcatgccaccatgcctggccatgtttctctttctaaaaggcgtttgctctgctttcttccagcacacagatgaagaaggttatgttaacagtatttaaacacaatcatggtgcctaccagttcttcagagaagcgttgcagtaaggagctgggtgtgggcccttctgggtggtaggtgggcctgcccagggccatttttctggtcctggccctcactcattctgatgcctgagctcatggtccagtggtccatgggggttcaggttcagggagatggtatggcagtgctctctgatttggtccactgtccacctcctgcaccctcatcctaagggtctcatcagtgtggctggtagaagagttctcgggccagggaggaaggcactcagctgcctgccaccaacccttttctcctgcctgccttgcagatttgaaattgatgactcttcccccagcatgtccggttgctgtggggaggattgctcctatgagatcctgagccggaggaccaagtttggggacagccatcactcccacgcgggtgggcactgtggtggctgctgccactgaactctcagagccactttcaagtcacaatgctctctcctaaggcctttcctctttcctggtctcactgttcaccgggtgtcctcagagctgtggcctccccagccctgcacgtgccaggctgcgccctgagagcacagaaccctggggagaagtggtatcagctgctcctcctctcctaggagaccagagtgctagaagggaatgaaagggagagggaagagtaggtggggccgggcagtgaagctcatcctccacagtggctgcctcctcatttggctcctggggcctgcagtggaggttctcgcacctctgcagcccctagattcctggcaacctcccctcccctgacacatacacacttggacaaatggaatgtttatgtccacctttatgaaagttctggagtcctgggtctggggtttgctggtccccaaagaggaacacactgggtgtaagatctgggtgtagagggcggcttcagagagactcacgcttgcgcagttggaattgctgttaacggagactgggaagatcttttgtgccaagatgcagggaaatgaagaaagctctttccagctgtttttatggattcatggagtgggctcatgttgggaccagctgactctgggaggaagactgcctctccatcgctgtcagagagcctgaaaggaccaacaatgaggtgttcttgggacccgccatggggatgattgcttctctaggctcctggatgttgctgcattctaagcttaacctcctggtctcatggcagtgacttgagcttttgattcatagaagaaagccagaggttctgcttgttcttgtctgccagccctcgtcgttctttctcctctgcctctcacctctaccccaaatacctctgttcttagtctcaaggggagaataacatcagggagcccctcatcttccccagaaggacttctcgttcctcatgtagttaactccattgattttcctatcttggtgctgatagctctctaagggtagggcacacctccccacagccaccctccctcttcagagagcccccagccagcagcaggcccctctgcctgcactcctcaggcttgcccctcgctgcctcagtgaggcactagtgccactgccgtggcccagccgggccatagctcaggctgcagcagaaatgcctctcagtggccaacagttgcttttctctctggtgtcaccctgtggcaacaggctggagcaggggaaggagaaagccttcctcttctctcataggatagaaaggcaggctcagaactaatgctcatcctgatctctaggccttgttcctcttccagggaagaaaagccaaatccttatcaaggaaaaagcacctaacagctccctttggatatccctgagctctgctgtggggagtatcataaaggttctagccttcgtgaagttgttctcgtggaggtctgttggtccctctgacctcagcatctgctcacatcccaccctctgcccaactctggcagtctctcctggcagatctccccagagtggtccttgcttctcacctggattcctgcttgtgcaggagcctgtgtacacagggcctccctcacccagcctggcccctctgctgagcactttgcgctgctcttgatgggcagcagtgggactgggaactccttagagagggccttgcagctttacactggaataagtctgcctctgcctctgcctcaccctgctggctcctggtgggtttcatcccaggcagagttgacattgctggaggggtttggtggactcctaagaatcatgaaaccacaggagcatgtttaggaagagatttgtctctggtccctgtctctgaaaggacacagatgctaaatatttattgtcttagatcatggattcctgatacctctcactcaaggggaccaaaagggacccccccgtgttcatcccttgtaaggtgagttcagtctacgttgtctctttccagtcactggatacgtggcaccaactggtcaatgggtgcttggtgccataccctgctcaccctagtctctgcaggccatgtcctgaagggttcctcaggaggtcgggactagggtgggagaggcactatctgagacctgcaatcactcttgttggtcttgagcccattcatttccaaaacatccatctttctccacttcccccaggtcttggttttgagaaacagcaggcatggctgagtgcggtggcttacacctgtaatcccagcactttgggaggctgaggcaggcgggtcacctgaggtcaggagttcaagaccagcctggtcaacatggcaaaagcccatctctactaaaaaatacaaaaatcagccaggcgtggttgtggcctgtaatcccagctactcgggaggctgaggcaggagactcgcttgaacccaggaggtggaggttgtggtgagctgagatcacgccattgcactccagcctaggcgacagagtgagactccatctcaaaaaaaaaaaaaagagaaacatagcaggccttttttaccaggctttttgtgttttgtttgtttgtttggagcatgttaagatttttttaagatttttaaaattttagttatatccaccctatttcaggttatttttgttggtgtcaagtatgtataggacatgtgaatggttctttttaatttttttttaagaggaaatttggaagataaactccttgatatatatatatatatatatatttttttttttctttagcagcttgttatcactggaatcaaagggaaaaagtgatctcttcttgcattggttgtatttgtatgtcacaaataaaagacactttggtca

SEQ ID NO: 800 - DNA, 21098 bp, Homo sapiens; identical to SEQ ID NO: 681
  source 1..21098: mol_type = other DNA

SEQ ID NO: 801 - DNA, 32744 bp, Homo sapiens; identical to SEQ ID NO: 680
  source 1..32744: mol_type = other DNA

SEQ ID NO: 802 - DNA, 32744 bp, Homo sapiens; identical to SEQ ID NO: 682
  source 1..32744: mol_type = other DNA

SEQ ID NO: 803 - DNA, 32744 bp, Homo sapiens
  source 1..32744: mol_type = other DNA
gggctccgactccaagcagtacggcgggaggcactagagggagctgcggccgctccggcccggccccgagcaccgcctccccagccagcgccgccgcgatggcggaggacagcgagtctgcggccagccagcagagcctggaactggacgaccaggacacgtgcgggatagacggggacaatgaggaggagacggagcacgccaaagggtaggggcggcgcgctggcgcaccgggcgcgacagggcggggaccgcgcgcgccacggtctcccgttcgggggtggctcccaggactgggggttcttcggccgctccgccccgcgatggcttctccgtggcgcggagcccatggtgaggtccggggcgcgcggctcgcgggagagtgcagtgcgcggggaggcgaggcccggggtgggcggggaggctggggcccgggcggggagacgctactgtcacttgccgcgcgcccccggccagcctcgcccatccccgccggcggcctggcccaggaggcgcctgttgccctcgcccgcgggtggctccggtgggcgccgaggagaggcgctacgcccttccctttgtggcggccgcagcctggggtaggaggtcgccctcctctgctccctgccatccttgttaagtcccttcagactccctctccgcagccgccacccgaaaagaatgggcaaagacgtgggtggagcggcgtggaggtgccccgatggtgtcggggccgcaggcggcgaactgcgcaaagttctggcgccgagggggtcccgggcccggcccctgctggggatactgggctttgcaccgcctcgcctgtccctagagctcttcagagcagggccgatcccctgaaccgggctcccgctgacctggccgtatcctgtttgcaaagctggtatttgatctccaaaactcgatgcaccacgcattttcacacttgatcggatttcttaatcctttccctttgcccccgaaccctgcagacttgatttgctcttctgttggagaaaaggattgcttcaggtgaaggccggtgttgatgctctctttttagaggcagtgggtcattttaaataaaaactggtgtccttttaaagtgctgtttacattacccttttaccctattggattcaaactatgcgctggcacagagcggttcttgctacacccttagaagtgagatttttcgaaccatggtgagtgatggagaagtgggtcagcttaaaaaacatgatagggaggcctgagtcacagatggtttactcagttcgtagagagattcttgaaatgattgatcattgaaagtgtaaatcatttgcattctacttgtctactttaagatttattatagaaagggacttttgactgacctctaattcattataaaatattaacaaatgaagaaaaagaaaagctgactatgtgcatctcccatttgcaagttgtttttatctttgccgtgaatacttcagtggcggctgcaagtatcgaatgttcgagtctagaatatttttttttttaaagagaggaaaggaaattgcataggaatctgaacctgagccctgtttatgcagggatagaaacgtgtttgtgatagatagctaaatacaaatatgtttttgaaacggtagttctattgccagaaatgggcccaggtgcagatgcaagctgatggattagcttcagtacctgtgttttctttctggagagaccctggacttttatcttctctgctgtaatttctgtttattgttcctcctttgattgatattctaggttgggggcttgattaggacttctttgcttacactgttgagaatgcccctggtacaaagaattcctcatctgtgtgcgcattgatctgagcctgtcccccgacacctttcaagaagctaaagttcccagagtagcacccagaggcatctgtgctgccttcggaagttttcagttttgtatatcagcacattttatatattagaaaggttaatcaaaatttagagatgccccatggactgaaatgttttcaccaagagcagataccatgttaatagcttctagtgggaaaagattaacataatggatgtattgtactctatttaaatgtaaggagattaggaaaactccaaatgactgctctccttggattgcctgtttggatttgaatttagacaatgtgtgccaaatttgggggagtaaatgtgttttatttggctcatgtactgatgatatcgcagtagaaacctaggttttctttaagtagctcaagtttgtaaatgttaaaatttgaaagactctttttctatactcggcctcttcattcccatcagtttaaataaataacaaataatgagcctttggatgaatcagtaagaacatgtttcacctcttaaaggcagtttgtcaatttgaggccaccaggcagcggccagtgcagagaggtaatttactgaatagtgcccttgtggcctgaaagaattcatttaccccaccactcagtataatgtatttactagtccttttagacatattaagttgaaactaaagcctcaaataaaaggaaaatacccaattagagtcttgttttgcaccaaaatgtaagtatttaaatatgtaaaactgcatatgctgttcttttattttcatggaattttcttcatggactaaaaagggtatttcgttttatagataatgctaagagtccatgaatgaaatatcagatgttttatgtttaattaaaagcaatggcgtaagtattataaaatacttgagtctcactgtctttatatcttgtttttcatggaaaatgtaccttttttttttttttttgagacagtctttctctgtcacccaggctggagtgcggtggtgcaatctcggctcactgcaacctccgcctcctggattcaagcaattctcctgtctcagcctcctaagtagctgggattacaggcgcgtggcaccacacccagctaatttttgtatttttagtagagatggggtttcaccatgtttgccaggctggtctcgaacttctgaccttaggtgatatgcttgcctcggcctcccaaagtgctgggattacaggtgtaagccagtgtaaagagttaaatgtactctttaactttttggtccacccaagcgtggaagtggcaaaccactataaaactttcatgaattacaaaaaacatgggggaagaagggattgtcagttttaattagtgagactatattcagacaagtataattttattattttcaaacaatgtttggcaattagaaccaggctaatagaggattgcctaaagacatctttatataacttactttaacacacgatttgcaattagaattagggagtaggtctttataaagagcttgaaggagcctggaaagactttctacatagataaaaattaacctcagtccagcttcctatatgaattattagaaatagtccagattactgaagatttctgttctgctatgggtggcagtggtacaaaaaggtgacctggaggatgattttttttttttttttgagatggagttttgctcttgtcacccaggctggagtgcaatagtacgatcttggcgcactgcaacctccacctcccgggttcaagcaattctcctgcctcagcctcccaagtagctgggattacaggcgtgcatcaccacgcccagctaattttgtatttttaatagagacaggattttaccgtgttggttaggctggtctcaaactcctgacctgaggtgatccccacctctgcatcccaaagtgctgggattacaggcgtgtgccaccatacctggctaattttgtatttttagtagagatggggttttaccatgttggtcaggctggtcttgaactcctgacctcaggtgatcccctggcctcggcctcccaaagtgctgggattacaggccatggtgcccggcctggaggatgaatttcctaggagctttcaccgttggatctgaggttaagatgctcaaggatctttaatacttccctcattttgctgtgtttttgccttctgttactttcttctgaagggctttggggacattgaggacaggccaaattgttgaagaattatttagaacccactgtcttctcgctgtccttttgatgtccggcttctccagttatgaaatacatttggtattggtcatgatctcttactgagctaatgttatggtccattgttggagacagagtcaaataaaattcgtgttgaactttggtaacaaaaccaaatctgtccccttgcttaaccaacattgacttacagagagcatatacttcctagaaaaatagatgtttctcatagctttccgttaagagagcttttccctcaatattcactggaagcagctactaagaagatttatataggaaccaaaataaacataggtgagtatgtttttgttggcagatacatgactaaattagtccctggggtagacatgaaatagggttaagaccttttttttttttttttttttttttgagaccaattctcgctctgtcccccaggctgaagtgcagtggcgcgatctcggctcactgcaagctctgcctcccaggttcacgccattctcttgcctcagcttccggagtagctgggactacagtaggcgcccgccaccacgcctggctaatttttttgtatttttagtagagacggggtttcaccatgttagccaggatggtctccatctcctgaccttgtgatccgcccgcctcggcctcccaaagtgctgggattacaggcgtgagccaccgtccccggcctaagacgtttttaagagttctttttcttagaaagattgaagatctggtattggacaaagatgaaaactttggaattcttttaacaaagaacataatctgtcttctaccatccccaatttagggggtaaaaaaaggaagttcttctttgggcactatgttgttgtatctgacttcatatgtctgttgttgaaattgagttgggaacttcccctttgtcagctgtgtggtatcagtgggaaaatgcagaaacattatgacttgcaataagtttttcttatggaaaatttagggataactcaaagctgccctttctgaaatttgatctgttatcaactgtataaatctaaatggaaaaatagattaacgacagtctttgcctgagggacctcctcaaatcaagaactactgtttgaaatgatcaagtgtctgctaagacttgcatctgaatgggtgatgtcaccctttggcccagaacaaattttttccagggttgtctaaatataggacacatactttgccatctttgtttgttagtgcaaatgtacgttatacatctatactagttaaaatcactttattttaacagaaccaagttctactccaagttcaagaaattgattgttgttttctttgaaaacatgttaatgacgttttaaaaatacgcttattcaaaaatcaaacaatagggccaggtgtggtggctcatgcctgtcatcccagtgctttgggaagccaaggtggaggatcgcttgaggccaagaattcaagatcaacctggggaacatagcaagaccctatctcgatgaaataaaaaatgagctagacatggtggtgcatgcgtatagttccagctacttgggaggctgagatgggagaattgcttcagcccagagagctgtgatcgcactactgtactccagcctgggcaacagaatgagactctgtctaaaaatatacatatatatatatctctctcttatatgtatatatttatatatatcacatatataaatatcaaaagatatcaaatatatagatatataaatatcaaatatatagagatatataaatatcaaatacagatatataatatcaaatacatagagatatataaatcaaatatatatataaataaaatatatatatatatcaaacaataaggtatataaggtagagtgaaagcccctggtcaccttatttcccagagctgtcaccactgatagtttaatgaactcactttttaatatgtgtgtgtgtttaacatcgctgggatcttactgtacctgggtgcatttgttaccatgtatgtttcgctgactcttattgttgtgtgctggaactttctggggtgatagtaatccagttgggcagtcatcaacacatggagcacttgcatgtgacaagtgtgactgagctgaatgtttttattttatttgaattaatttaaatttaaatagctccatgtgactagtggctatcatactggacagctcagatcatattcagtctttgaattttgtttataagctttcttggtactcaaaaatttctgtattttatttcctgtctttggtagaatatgtctagttttcattctttttttcttctgtggattatctgtacactttttttttttttttttttttgagacaaggtctcactctgtcatctgggctggagtgcagtggcacaatctcagctcactacagccttgacctcctggactcaagtgatcctcccacctcagcctctcaagtagctaggactacaggcacatgccaccacacctggctaatttttgtatttttgtagagacagggtctcactatgttgtctaggctggtctcgaactcctgaactcaagcagttcacccacctccgtctcccaaagtgttgggactacaggcgtgagccaccgtgcccggcgatctgtacattttgaacaagtatgttttcatctatatttctttatccatatcaaaaaattaaccactatttaaaatattctaccatctcacaagaaaaatcatgtaggatattttgacttcttttcatttcctaggtttaattgaaataacctggaattgtaattcttttatttttgcccttgtgtcactagagacttttttcttaactattacatgtttcacattcctgttaacaaaaacattttagactttcctgacagctttattgtttttatgggtttccatcgttctttataaaacacatcctcccggccaggcgtggtggctcgcacctgtaatcccagcactttgggaggccggggtgggcggatcacctgaggtcaggagttcgagaccagcctggacaacatggtgaaaccccatctctactaaaaatacaaaaaaacattagccaggtgtggtggcgggcgtatgtaatctcagctactcgggaggctgaggcaggcaggagaatcacttgaacccaggaggtggaggttgcagtgagtcgagattgcaccattgcactccagcctgggcgacagagcaagactctgtctcaaaaaaataaaagtaaaaaataaaacacatcctgtctttttcttctttaacagcattctcacatgattttttttcttagagtgcgtggatgatgtattttgagttcttgcatgtctgaaaatgccattcttttcccctcccacataatacatagcctgggtgtgcatgtgactctatgataacaatcgttttccttgaaactccataaacgttttaatatcttccagtatttactggtacagatgttgttttctttgtgtttttttttttttttttttttttttttttgatttttgaggcagagtctcgctctgtcacccaggccaggctggtctcgaactcctgaccttgacctcaggtgatccacctgactcggttccccaaagtgctgggactacaggtgtgagccactgtgcctggccagatgctgttttctctgcttctctgtcttttataggtaatcttattctttttgtctgttttaacttgttttcagtctagaagcttctggcattttttccctgttgttctattaccaaagggtttccatgtcctttcacatgctgggatcgcctgtcctttattttttattttttgcaatggagtcttactctgttgcccaggctggagtgcagtgtcgtcatctttgctcactgcaacgtccacctcccaggttcaagcgattctcctgcctcagcctcccaagtaggcaggattatagacgcacactaccatgcctagctaatttttgtatttttagtagagacggggtttcaccacgttggccggctggtctcgaactcctgacctcaaggaatctccccacctcagcctcccaaagtgctgggattacaggtgtgagccactgcacctggcacctttcctttactatctaaacaaaatggcctgagctgatacatgttcatgggggtttcttggggtcttaagttttcatggtcctcaggcacacccacactgcagccaacttgccccatcaccgggctccttgtgcctgtgtgtccttagggtgctctttttcttcaacatttgaccttgggtggaacacggttatcttcagttctgtgtctctcaccaccctcctcccaggaatcactaaaatccagctattgtgcacagcatttgctgaagcgtttgtggctaatggggagggagggaggtctgattacagagtagcgcagaaaacaactttgaattcagtgtcagacatcattgttcaccaagaggaatttgttactgctcacgcctttctgtgggtcatggcttcctctgcttctgagagtgtctcctgatctttcttctcctcttctctaagttcaaggtcagcccaaatgtcctttctttcatgaagccttccgcagccactatgaccaaaggcgctgacccctgccggaagccctgtagctcttagtgagtgtatctttcccgtgacatctttcccagttgctctcacctcatctccccagccctctgctcgggaagaccctcattctcctgccccaagctgtggctcctagaggtgagttccttgtccacaatcacaaatgggagatgtgggtctttgcgtctgttgcttaatgtgtgtgtagcatctaccaaccagctagagtaaaaggttttattttgctgggcgcagtggctcacgcctgtaatcccagcactttgggaggccgaggcgggtggatcacctgaggtcagtagttcgagagcagcctgggctacatggtgaaaccccatctctactgaaaatacaaaaatcagtctggcacgatggcgggcacctgtaatcccagctaatcgggaggctgaggcagaattgcttgaacccgagagatggagatcactttataagcacatactgcagtgagccgagattgtgccactgtactccagtgagcctgggcgacagtgagactctgtctcaataaataaataaataaataaataaataaatattttaaggaggttttatttaaatatacaataggttatctgaaaataaagtatggctggactttattagaattaaacattatagaaagtcaagtacccaaggtccatctgtctttctaacctctctccctttctgtctcagtctctgtcaactagactgccccaagcatctgttccttagttcagattctccagaaaggatctcactggtttctggccaagaaagggattatccaggcatgatccagtccactgtgatggagaagggaaagggaggggtagaagagaattgtgtggtacaacatggccactgagggccacacctttggtgagacctgtgggcaaagggagttttcagggaaggacatagtgaacaatgctggcaccttgctgggactgaattgtatctccctgccaattcatatgttgaagcctaaatccccaacgtgatggtgtctggaggtggcacctttggggggtaaatagcttacaagggtggagtccccatgaatcggatcagtgtatgcttataaagagatagagtccagtgctttgttgctctgccaagaataaggccctcaccaaaaacctgaccctgctggcaccctgatcttggtggacttccagcctccagaactgtaagaaataaatgtcttttctttaagtaatcagtctatcgtattctgtaatagcaggctgaactaagacacacctcaaaacatgtttgcagaacacagcgtgtctgcctgtctactcacaggtagattgtgtgcatggagacagcactttcagtctccaatccttgcaatacctggtaccttgcatgtgtttgtaacttactaaagatttgcagaatggattccaatagctcttaattcccattgacaaatttatttcaaattgtctttattttatatgcattaagaatatgtgaaggcttttctttttctacttctcattgagaggactttggctgtagagtttttagttttggtctgctatatagggcccaacatttttaaatggtaactaattttttgacctcttggcatatgcttatgtatttttcttttttttttttttgagacagagtatctctctgttacccaggctggagtgcagtggcgtgatcttggctcactgcaacctccacctcctgggttcaggagattctcctgcctcagcctcccaagtagctgggattacaggcgcctgccaccatgcccggctaatttttgtatttttagtagaaatggatttttgccatgttggccaggatggtcttgaactcctgacctcaagtgatccgccctcctttggcctcccaaagtgctgggtctacaagcgtgagccaccgtgcccagccttatatattttccctggttgactcattacaataacaaatgaagagattgtggcttatcagttttaataagttatccaggccataactcaaattcaaacttagcttttaagtctatctgactgtaaatctgttgcttttcactaaactacagtctcttggactctcaataagagtaatttgataatgtctcaaggtctttttctttataagtcatagattgattaccaacctgaacacctttggagccaaaattcaccagtgtaatgggtcaatgaattaatttttttaaaatcatacatttctttgcttaaagaatattgcaaatcaataattaggaactcttttgtctctagttccttaaaggactccttttattttatagcatcagtgtacttagtaacaagtttttttcttttttgcttctttcatggcttaatcatctcttttctgactgccttacctgtagccttgtacatatcagcacccctttctctggagcctctgccccctgcccccagcatcaccatcattcagagttccacgaagccaggttcctgtgagaagtgacatggcccacggaatctggtttttcatctcctgggtgaaagcgctgccgggaggtacccacttcagccctcttgtaccccattgctgcagcctatgcccagtctgccctggatggtggctctttgtggatgctttgagtaagttagtggcctgtcatgctttcccagccttaggagaaaacctggttggagtcgaggactgaatttggatgtcacctttacagtttctgttttgtttagtgcgcttctgttcctggcttaaactcacagtgccccggggaaatagggacttctttatttccgtagctgtgttctctcagtgttccagctcatatagtaccttcccagagaaggttggggattcagttaacataagaaattcccatagttttttcctttagtgtttctttttttgggagggcagggggatagttgttcttcactactttaggggtatttattaacattttaagaaaactgaagaaagaaccagtgaaagcagagtgcttattttggtttccaaatgaagtttttaaaaagttctttttgcgaaaccttttttttttttgttgagacagagtctagctctgtcgctcaggctggagtgcagtggcgcaatctcggctcactgcaacctccgcctcccgggttcacgcaattctcctgcctcagcctcctgagtagctgggattacaggcatgtgccaccacgtatggctaatttttgtatttttagtagaatggggtttcaccatgttggtcaggctggtctcaaactcctgaccttgtgatcctcccgcctcgacctcccaaagtgcttagattacaggcgtgagccaccgcgcctggcctgaaaccacatttttaatgtagaacattcgaatgaatcactaagcaaaaacgccatgccttggtatattcatatatacattttcctatttataaatatttacaaaaatgcaaatatggtagcctccgccccgtattagtccgttctcatgctgctataaggatgtacgttagaccgggtaatttttaaaggaagaggtttaattgactcacagttctgcatagttggagaagccttaggaaacttacactcatggcagaaggggaagcaaacacatccttcttcacagggtggcaggagagagaagaatgagagtgaggggggtgaaagccctttataaaatcgtcagatttcatgagaactcattccctgtcatgagtacagcatgagggtaaccgcccccatgattcagttacttccctccaggtccctcccataacacatggggattatgggaactacagttcaatatgagatttggatggggacacacccaaaccacatcaccgccttatctgtgattttgctttctgcagtttcagttacccttggtcaacgttggttcaaaaatattcaatggaaaattccagaaacaattcctaagttctaaatttcatgcccttccaagtagcatgatgaaatctggggccatcccaccctgtcccgccctggatgcgacttttctctttgccagcgtccccgcctgcaggtcacttagtagccatctctgtgatcaaattcactgtcttggaatcacagtgcttgtggtcaagtgacccttactttacttccatggccctaaagcacaagaggagtggcactggcaatttggatacaccatagagaagccataaagtgctttcttaagtgaaaaggtgaaagttctcaataagaaaagaagatcacatactgtggttgtaagaaggaatccttggggccaggtgcagtggctcatgtctataatcccaccactttgggaggccaaggtgggaggatcacttgagcccaggagttcgagatcagtctgggtaatatagcaagatcctgcctctacaaaaaaaaaaaaaaaaaaaaaaaaaaaactagcccggcatagtggcatacacctgtactcctagctactcaggaggctgaggcgggaggatcacttgagcccggaagttcaaggctgcagtgagctatgattgcatcactgcacttcagcctggatgacagagtgagacccaatctcttaaaaaaacacaacaaaaaaggctttgcagacgccaccgccaccaggagccctgtactaccagccatggtcaaccccaccatgttcttcaacatcgccatcaacagcgaggccttggggcacgtctccttcgaactgtttgcagacaagtttccaaagacagaaaactttcgtgctctgagcactggagagaaaggatttggttataagggttcctgctttcacagaattattctagggcttttgtgtcagggtggtgactttacatgccataatggcactggtggcaagtctgtctacagggagaaatttgatgatgagaacttcattctgaagcatacaggtcctggcatcttgtccatgaagcatacaggtcctggcatcttgtccatggcaaatgctggacccaacacaaacgattcccagattttcatctgcactgccaagaccgagtggttggatggcaagcatgtggtctctggcagggtgaaagaaggcatcaagattgtggaggccatgaagcgctatgggtccaagaatggcaagagcaggaagaagatcaccactgctgactgtggacaactctaataagtttgacttgtgttttatcttaaccaccagaccattccttttgtagctcagaagaacaccctccaccccatttgctcgcagtatcctagaatctttgtgctctcactgcatttccctttgggttccatgttttccttgcccccttccatgcctagctggattgcagagttaagtttatgactatgaaataaaaactaacaaaaaataataataatctacccataaaattgtgaaaaaggaaaaatacctttgtgcataggctatgaagtttaggagtgggtactagccatggttttaggcatctcctgggagacttggaacgccttcttgaggataaggggcacctactgtatactgtttgtattcatctgttgtcatttgaaaggaactgaatgtctttccaggtcaccacacagcctgcacctgagtcaggtcaattggctggccatcccgtcatgtggttctacacagggtaccattatttatttagtcccctattgctggaccctcatggccaaggctgccagtgggccccttcttccacagtgacagtttgttctgggcacctggagggccccactcatccctcctgctggctgggatatgtgtaccagtggtaggaagtcatcccacagcacctgcaccaagccagcatcctgggggcaggggagacaggacagagggagccagccctgctgtcattttagggcacaaattccccactgagggatgcagagaccttttcacgaaagataaatgtgcttgtgttgtgagcggctgttattttgggactggagcccacgcagctcaacctgtatactaactaataaaacgtctgtgtgtaagccaggtgcggcggctcacgcctgtaatcccagcactttggggggcgaggcgggtggatcacgagatcaggagatcgagaccatcctggctaacacagtgaaaccccgtctctactaaaaatacaaaaaaaaaattagccgggcgtggtggcgggcacctgtagtcccagctactcaggaggctgaggcaggagaatggtgtgaacctgggaggcggagcttgcagtgagccgagattggccactgcactccagcctgggcgacagaacgagactctgtctcaaaaaaaaaataaaataaaataaaataaaacaaaacatctgtgtgtagctttggccttagagacattttcgtgttttcattatgttactttttgaataagtagtgtgacgtattcagaggtcagctgtgtggtacaaaattcaaaagccatcaatgggaggcaacgaagttaagtctcattctccctgcgctgaacttctcccccataggcagctcctgttgtggactcttggtgtgtccttccagtggtggcaaggatgggagcatgtgcacatgtgtgcctctgcaggccttcaacacaaatggcagcatgcctcttgatttttcactaacagcatatcctggaggtctttatatatcaaaatacgtagatcaacctccttttagttttattgtatttttttagagatggcggaggggaggtctcactgtgttacccaggctggcctggaactcctgacttcaagtgatcctctggagttgctgggattacaggcgtgagccaccatgttcagctccaacctcctttttaaaaaggcggtgtgtgggtcctttccactcagagactcctctctctatatatagagagagctgtttctctttcccttctcttctattaaacctccattccataaaaaaaaggggggctgctgtatattgtagcattgaatggatacaccattacctcttcaatccatcccctattagtagacagtaaggtagttttaagtcttttgtgctagtacacagggctgaagttaatatccttgtacatgtatcacctctccagactatttcctgatgaatatttaaaaatctttctcagttaagttttaggaaggcagtgtggtgtgttgagatgagttttaaaccaggaaccaagaagcttccttcactaaccctcccttggactttggaagtcagttaacccctctggggatgagtgtctttattggtaaatgaaaaaaactgcttaaaaggagccatttgtctttaaaactcatgatttgacaagtacatactttgtcctgggcctggccccatcctcagggataacagaaggctggggaaggttctgagagggaatagctctgagaaaaccacagactttatgtatcagggactcatcagaccccagggttcttcttgagttcactttttgctgtcacttcctaaggaaaaggggaaaagatacgttttggcaaaggagagaccccagtcctgcttgtcccagctttaagccatcccttctagacactgccacttgctccttgtcttgtagacaacttctcagagctctgtggtatttctctgcttttaaaaaatttatttgtttctttcctctaccatcccagagtggaccatgacctctggctcccttttgaatctgggaggtgcatttccttttgtgtttgaggactccacgttcacctttgtgcttcctggtgaaaagcgccatttgtacagcctcaccaacttgtctttgacctttgactttgctcatagaaattgttttctccgtctctcatctctggcctttgcccttggacacatatcacaggctcatatcacagccttggatcaagctatctcatttctacgtttgagtattacaacttctgttttgttttgtttttgtttttgagacagagttttactctgtcacccaggctggagtgcagtggcacgatcttggctcactgcaacctctgcctcccaggttcaagtagttctcctgcctcagcctcccgagtagctgggattacaggcgcgtgccaccacacccagctagttttttatatttttggtagagacggggtttcaccatgttggccaggctggtcttgaactcctgaccttaggtgatccacctgcctcagcctcccaaagtgctgggattaccggcatgagccaccacacccagccaactttttttctctttttaaaactgtctagaactcagctcttctgagccaccagctccctcgaggctcataagccacggatctgtccctgtttgtctgtcaaatggctgaacaatttgaatttcatcttcaattgtatataatgatcttaaagatatgtaaataacaaatttttaaagcatttaaaatatttcttcctatattccgaccttgcactgtctacaaagccaggtcttacttcacaaactaaacttcatgtgagacgtgtttctggccaatgagtgttatatgaaagtttattatagtttaacattatctcttatcagaattgggcttttgtgtgatgtagacaccaaaattgtttgataattatgaaaggaggaggctggccaggcactgtggctcacacctacaatcctagcacttttgggggccgaggcgggcagatgacctgaggtcgggagttcaagaccagcctgaccaacatggagaaaccccgtctctactaaaaatacaaaattagccagcatggtggcgcatgcctgtaatcccagctacttgggaggctgaggcaggagaattgcctgaacccaggaggcggagattgcagtgatccgagattgcaccattgcactccagcctgggcagcaagagtgaaactccgtctccaaaaaaaaaaaaaaaggaggaagctaatgagatagaatatacattcccacatttcaaatatggtacaggtttaggagaaccaaaaacttggagcaacccaatatgtaagaagagggactagttagtaaactagaccagaagctagcgaagagggactagttaacaaactggactagaagctagcaagggggatcatcaagattcctctcttccagccacgcttgtattgattcccgggcgtattgttcagccattgtctagagctaggcatcctctgctgctaacagccgtgtaaatatttaaattattggctagtctcagtcacctttgtccaaagctgtagcctcaatagctgtagccacctgcctgcttgatggatctttgatgatgatctttgtccctcactggccatacacttttgggacggctctgagctctgagccttctagggcttgtccatgacttactgctttgcacagagacgatgttgctttgtagatacttcctacaccaatcccaagaggagaaggggcacactaagtatgggttgaagctaccagacccatgatggagctgaaatcctactttagatgaggccgtagtgcagccagatgatgacagctagaagggtgtcttcctgctctggactctgcattacacttgggaaaaaaagagtgaagaaactcatactggaattacacaaatgaaccactgacaaaaactcatttgtgtgacttcttcaaaccctgaactgcaggtgaaatccattatcgaatttgatggtcacatgatcaacttaggtaagatgggtgcccctgatccaggatgaggaccaactttggccagtacaccctgataacctgagttaaccttagctaacttccccaacggtgggtgtgaattctcttccagcagcaggtagtgtgatgaacctctgggttacctttgttttttatcaactgtaccaaaacctcatatttttttcctagtagtgttattccttctagtgaagtgttttgggattccaaccagaacaccagggcatgtgcacacacgtagcacaaagatctattacaattccataaaataggtgaataaaaaatgtccaaagatcgcaattaggcagtttacaaaagacctaaaaattgctggtaattatctgaaaagatggtcaacccaaggaagtacataaatgagagacaacgtagggtagtaattatgtggattttggagccaggctgtctggattcaagtcctgattctgccattattaaccatgtgaccttcagcaaattacttaagctctctctatttcagtttcctcatctataaaacgggaataataataataataatagcacttacctccgagtgtgacagtttacaaagttgatatctgtagggtgcttggtacagtgcctgacacatagtaagtgttgcgaagtgttgcctgctgtggtgatgattatgatggtgatggtgatgatggtggtgatgatggtggtgatgatgttggtgatgatggtggtgatggtggtgatgatggtgatgatggtggtgataatgatggtggtgatgatggtgatgatgatggtggtgatgatggtgatgatgatggtgatgatggcggtggtgatgatggtgatggtgatgatggtggcagtgatggtggtgatggcaatggtagtggcaatggtggtgatgatggtgatgataatggtgatgatggtggtgatgatgatgtgatggtggtgatgatggtgatggtgatgatggtggcagtgatggtggtgatggcaatggtagtggcgatggtgatggtgatgatgacagtggcaatgatggtagtaatgatatgatggtgatgatggtggtgatgatggtggcagtggtggtggtgatggcggcagtgatggtggtgatggcgatcaatggtagtggcgatggtggtgatgatgataatggtgacgatgttagtaatgatatggtgatggtgatgatggtggtggtggtggcggtggtggtggcagcagcaatgccagactgctttacaaagtggttgtttcagtttacattttaccaacagcatgtgagtgttccctttcctcacgttcttctgatattcttagattttaaaatgtttgccaaatcaatgggtgaaattgagcatgttttcttaagcttattggttgttaagtctgcctcttttgtcaagtgcttattcatattgtcagcccattcttctgtcagtcttctttttcttaatttttttttattgatttctcattcatctagcaaatattgaggatcttttatatgtcagacactattttcggtgctaggaatacaatagaaaacactgttttatggatcttatgttctagttagagagagacaatactgttccagctagcaataaattatatttaaaaactaaagcagtacaatcataataatagctggcttgtaccgaatgatttctgtgtgccagctactatactaaattcttagatgtatgaattcattttatcctcacattttttctaatactatttatttatttgagacagggtctcactctgttgcccaggctgactgtagtggcacgatcacggctcactgcagcctcaaactcctggactcaagtgatcctcccacctcagcttcctgagtagctgggaccagaggcacacacacaccaacttgcccagctaattttttattttttgtaaagactaggttttggtatgttgctcaggctggtctcgaactcctggactcaagcagccctcctgccttgtcctccgtcccaaagtgctgggattacagacatgagccaccacacctggcctaatactgttttttgaaaacatccttttacagctacagaaactggagcacagagaggttaagtaataaactcaaagtcacacagctgagaacttgtggagtcaggattcaaagccaggtagtcaaactctacttaatgcctgcagtcctggccagaatataatgttgtctttctataccatcctagagataaaatgtgaaagagaaaagacctttgtatatattctggctggtaatactttctcatttgtgttataaatgtctaaccttattctgtaacataaaaatttttttataatcactttaccatgaaatgtttaactttggtgtactcaaaagttattatctcttatggtttgtacttttgagtcctcgtttgagtaattgtttccttcacggacattatgaagttatcatttaattctttcacttactcatttgacagatgtttacttgagcatctactaaatgccagacactgttctaggcactagaaacatgtggagtaaatggacatcaccaccttcacttttaaggttttgttttccaagtttgggtctttcacccatttggaatttgttttttttttcatgttgtgggatgcagcaaactaattttatatttctgcatataggaattcagtttttctcatgctatgtattaaaaatttttttttcactactgatttatgatgtgatctttattatatatcaagtttctttactatcatgggttgttactgatatgtctgttgcatttcatggacctgtttatctgttcttcagttccgttgtagtttaataatgttttccttacaaaggtattgtgattattatacactagttcaaaaatgcatgaaaatacgaatgagaagattacaatcagctatattcccaccattttccatgcaggaacttggaaattcaggggggaaatatttgtaaaataattagtctcaaaccactaatgtttcttgtatttcacagtagagaggagctaagttatccctctggtggtacctgataaaatttaaaattactttttatccttggaattcacataccaaaaattgagctcctttgatgtcacttttttttttttttttttttttttttttttttttttttttgagagcgagaggatctttcgctgttgcccagctggaatggagtggtgcaaacatagcttactgcaaccttgacctcctgggctcaggtgatcctcccaccccagcctcccaggtagctgggactacaggcacatgtcaccacatctggctaattttaatttttttgtagagatgggggtctttctgtgttgatcagcctggtcttgaactcctgggatcaagcaatcctccctctttggcctcccaaagtgctgggattacaggcgtgagccgctgcacccagcccgatgtcactcttaagattgatgtgttagttgtatgagactgggctgctgtaatcaacagaccctaacatgggattgaacaacacagtggaagttcccttctcattcatggaccagccctaggcacatgttctgacgatggtgagggagttctccttcattctgtcatccagggtcgagactgcgccatcgtgtggctctgccatccttggggctctcacctatgtctgcatccagacagcacaaaggacaggaaggacatggagaagccacccataggggtttctgggcagcaggaagtgacacacatcacttccgctggctggaactcagtcagtggccacacctggctacaaggcagctggcaagtgctgtccagctgtgagtccagagagagaaacgatgggttttgtggatgtcatcctggaccacctgtaaagcgtttacatggctctgttacattggccctcccattaagtcttgtctgtagtttccatgaatacttctttgaagagatttgctggatgtgctcattaaatttttgccatttccatggctgagaaggaatgtgttcgtttctacttgaggtctgaatgtgccactgattctctctggatggaagctgaagtgtgcgggctttcagaggtggcaaaactgagagccttttctttgtggacctttcaagtgaaaccctggggaagagggaggtgggacttgagttcttgaagaccgaggaatctttttaaagggccacatgatatgcagggctgaatttccatgacttggtaatcagccttgagtactgggagtctgaattagtctttcttcattggatttccagggagagtcttctcttgggcctggatttgccttcagtatctggaagcccgcttagcacctctcccacccaggcacgggggcatctctttctgtcatgcgtctccctccagagtacctggagtcctgtgggacgcagacccctggctaagcagccacagctgactcctgatctgctctggccataacatcatcctgtcacccccagggacaggagtgtcacctgtcaacacttctgtttcatttgatataattcacataccataccattcactcatttaaagcataccattcaggccagacttggtggctcacacctctaatcccagcactttgggaggctgaggcgggtggatcacttgaggtcaggagtttgagactgtcctggccaacgtagcgaaaccccgtctttactaaaaatataaaaattagctggacgtggtggcacgtgcctgtaatcccagatacttgggagactgaggcaggagaatcacttgaacacaggaggcagaggttgcagtgagctaagatggcaccactgcactccagcctgggcgacaaagtgagactctgtctcaaatactaaaaaccaaaaataaataaagtataccattcagcagcttttagcttattcagagttgtgcacccatcagtacaatcaattttagaacatttccatcactcccaaaataaacccacatcccttaatcatgcccaagccctccatcttcccagcccctgaccaccactaatctagttctgtttctgtggatttgcttgtcaggacgttttatagacatggaattatacaatacatggtccttggcaactagtgtctttcacttagtgtagcgttttcaagatgcatccattcatgttgctgtttttatcgactctttgttttttttattgctgaataatccatcctatagatggaccacatttcctgtcttcattcataagaggatggtcatttgggttgtttccagttttgggctgttatgaatgatgctgctatgagtatttgtgaacaagttcctgtgtggacataagttttcatttctcttggttatgtacttacgagtgtaatggctagggtatacagggaatctgtgtttagtgttttgaggaactgtcagctgtttttcaaagccgctgccccattttacattcccatcaacagtgtatgagggttccagcgtctctccatcctccccagcactggctctttcttttttttttttgagacggagtctcgctctgtcgcccaggctggagtgcagtggtgcaatctcggctcactgcaagctccgcttcccgggttcacgccattctcctgcctcagcctcctgagtagctgggactacaggcgcccgccaccacgcccagcaaattttttgtatttttagtagagacgcagtttcaccatgttagtcaggatggtctcgatctcctgatctcatgatctacccgcctcagcctcccaaagtgctgggattacaggcgtgagccactgcacctggcctggctttttctttttgattataattatcctcatgggtatcaagcggtgcactggtcagctcttattctcaaagtctcgtttccttcatggcctcaggaaatggaaaagtagctcttcctcactgaagggctgggaagctctgcctctcatcattgtataaatgctatcagatatgtctgggagtttggaggctgggatgaccaacttagtgcccatttctgtagctccctgtcaatttaaagttgagatgaaagagagaaaaagaaaaactcttgctgaactagagtaaacaaaaatggtgacgctttctccattatgccaaaataagaatataaattttagcaacaccgtttggaagaaaaaaaagttttgatgtgtagcatcaattaactcccaaaatggagttttggaaacctcattgaacaggcattgtaagttatagaataagtgatataaacttacttaaggattttttggtgaaatagtctggtattttaattttttaaaatgtctccagatcccctcaagtttccatgagtttatctgttttagagactattattattgttgttgtgttgttgttgtagttgtttttgagacagggtctcactctgttgcccaggctggagtgcagtggcatgatcatggctcactgcagcctcccaggctcaagtgatcctcccaccttagcctcccaagtagctggcaccacaggtgcacaccaccatgcccagctaattttttactttttatggggacagggtctcactatattgctcaggctggtctcaagagatccttctaggctcaagcgatcttcccgccttggacccccaaagtgctgggattataggcgtgagccaccatgcctggctgagcaaattactaactgacactcaggacaaatatattttcatccagttggataggcatctacttcaaagcgtccttcccagtcactgccttttattctgtatctctctgtaaccaagcttcttggaaatttggagatattttaaagtggaagtattatacagaaaagctgtgaggtcccaggctcctagtggtttctggaaagccataaccagtagcagttagaatacatggtagaagtgggagagggataatcccctaggttgtgaagtcacaggcatgtccaccatgattttggtccctcccacccagcctgtggccccaagataatgctgaacacatagtaaatgttcaataattacttgatagtaagttgcagtaggctttaccattgaggttgaaacaatggtagctttcagaagtattttatggcctgggaatatgtgatggcaccacctctagagccagacttatccactcattcattccacaagcatttgtattagtatgtactggtgtgaggcattggagaccttagggacgcaattaagaatagacttcttaagtagcacatacaaatgcatacataaatcacactataacagtacaacggattcaccaattcacagggtgccagcaataggaacaccgggagaggaaagcctaaaatagtcctactcccaaaccagagaatatacaaaactgaacgtatctgcagcatatttctagctcatgtacctggctgtgatatgtttgtttaatcccaattgctagtcagatattgatgagtgtccttggccaccaggtgattttaaatataaacatcatgatagcacaaatttgattctattgatgaaaataaactgcttgttgtgaggtggcaaaaccttactatttttaaaccactagggtaccatttgacaaagtcttaatgtatcttccaaaataagcactgttttctattttagaattggagtggaaatatgaatctatagctcaagtgctcagttcttttttctttttctccagctctgttgcccaggccagagtgcagtggcacaatcttggctcactgcaacctccgtctcccaggctgaagctatcttcccacctcagcctcctgagtagctgggactacaagtgcgtgccactgtacctggctaatttttttttttccttttggtagaggctgggtttccccttattgcccaggctggtcttgaactcctgggctcaagctatccacctgcctcagcctcccaaagtgctgggattacaggcatgagccactgtgcccaacagcgtgcttagttcttaaacagtttctctcactattgcacatgcctttcatatttggatgtcacagaggaattatccattttaaatggaaaagttcattactttaaaacatgaataaccagtggaaagaaaagttcctttataacctagatgctaggtaacaaaactagcactttgtgttttgtttgtgattgtttgtgacagggtctctctctgtagttagacacttaaagcttttcattgttagcccccctagtaaaaatctttatcagggaacatttcctcctctgcaaaaaagtggtttgtttagttctgttgcttcaagattagtgttctgtcgtacccaagagatcttgataatggagtttttcatatcatgtatctctcctcccgaaagctgacttaaacgtagattaggagagtagtgataaccgtggaaactattttacttcagttataaaatgtggtttatctctgcaatcttcctgcttcgtgacttctaagcacctgcaggatgactgagcgggggctggtattcttctgcattgcctgttaccgtcttcactccactaccttttattcctcacctacatcctaacacagttattttctactgcatgtaacagctgtgttttttgaaatgattaattgtatgcaattcaatttcatttaatgatttttgtttgttggttggtttcaccatctttgcatttcctgcagaagtcctggagggtatttgggagccaaaaagaaaaagaagaaacagaagagaaaaaaggagaaaccaaattccggaggcaccaagtcagactcggcatctgattcccaggagattaaaattcagcagccttcgaaagtgagagctctgttttattttttcctctgtgtggtttctcgtgcatgagtgggtttacgcagtttagcgcgctgctgcatcagatgtgtagggactttgttgtgactgtgtgttgaatgccactagtaactggaagctcttgacagcctccttaaaatggactttggcacccaaataacgaaggggtacactgtgcttttgtgtgtgtgtggatacctgctgtgtttttcccttttctcagtgaatttgtatttagattgtcgttctagaagaaagtctcagtgtgagcttgttaggtttttttgaaattacactttaatatttgattacttttcgttcagaagatattcacattgtaatttttctgggtgtctgtctaattacctgaatagcacaacaccatctggcagcagatttcagcgggagcagccatgggtaagtctctcgttgactttgaattaaaccagtttgcagcggtcgttcttcattctaatgccaagggtgggaaatagttcctgacattctcctagtttaaaccaaaccagaagttgtccagctgggccccgtgttggcagatggtggccaagaagagggttgattgtactgcgtgggtgtctggtggcacagatggcagccatccctgtctgtggagccaacccccaggcaccctgtatgctgggcctctgggaaacacaaagccctcttgatgcaagaaactcacagtgaaaagggtagaaccagccaggcacggtggctcacgcctgtagtcccagcactttgggaggccgaggtgggaggatccattgagcccaggagttcaaggctgcagtgagttatgatcacaccactgcacttcatcctggacaacagtgagagaccctggctgaaaaaaataaaaaaagaaaaagaaagaaaagaaagaaaaggggtagaattagaaatattacaaaatagagatgattttgatgatcgtacctacaaataaattattgtgaataggctgggcacgatggctcatgcctgtagtcccagcactttgggaggccaaggcaggcggatcccttgagcccaggagttcaagaccagcctgggcaacatggcaaaaccctgtctctactaaaaatacaaaaagttagttaggcacggtggcatgcacctgtagtcctagctacttgggaggctgaggtgggaggatagcttgagcctgggaggtggaggttgcagtgagccaagatcacgccactgcactgcagcctggcgacagagaccatgtcaatcaatcaatcagtcaatcaatgtgagtagcatgtggtattgtggaaacagctcaaggggtgatgtctgagaccttgagcttggtctctgcccccttgctcactagttgtgtgcctttgcctgggtactgcacttccttcagcccagttccttctcttctctctaactcgcagttcgatcttgaggttccagttggagcatttttattgaagagtttttacatcctaaaacagtgcatatatatatatatatatatatatatatatatatatatatatatatagtagttgttaccattctacaagctttgtggatttccttttttcttatgcagagtttctgttgtgttccatgaagtgagacttgcaggtagttttgatgttgtcacctgttttacacaaaagaaccaggaatcactgagaaggaaaattacttgccccaatttttccctgactgactgcagggtgagaagaaaatggaatcttcttccctagcttttcaacttggttctcgggtaataaatatgctacccactagatacagctttccaaggtaactcatagaggataccaccataagcttgcaaaacactcttcccgtttctaaatgtcgcttcatcagataaacgtggcatccctgacctgcagcgtggacatctcctgttgctttcagcatcaccattggtctctgcccatcccttccacctctagtgactgtgagcctttcccctctctctggtcacttatgagaaactagagccaagccaggcagtggcgaactcttggcattatatggtaggtgtattggtcagggttctctagagggacagaactaatgggatggatggatggatagatagatagatagatagatagatagatagatagatagatagaggggagtttattaagtattaattcacatgatcataaggtcccacaataggccatctgcagtctgaggagcaaggagagccagtctgagttccaaaactgaagaacttggagcctgatgttcgagggcaggaagcatccagtatgggagaaagatggaggctgggaggctaggccagtctctcttttcacatttttctgcctgcttgtatcctagctgcactggcagctgattagattgtgcccacccagattaagggtgggtctgcatttcccagcccactgactcaaacgttaatctcctttggcaacaccctcacagacacacccaggaccaatactttgtatccttcaatccaatcaagttgacactcagtagtaaccatcacagtagggaatttcttttcttaatttggaggaagtcagtattgtcttaagatgggcttttttctgctgcatttttaaaatctggggctctttccctttaagcttatgccaactctagatagcactgtaaattacagtggactgcattgcagaatattctggtctacatacaagaaccaaaataaaaatgatatttggattcttataaacttcttagtgttataaaacttggacattttttccaaggtactattaaatttggaaaacaatgggtaaagagtatagttgctggttagtatgccacagaaagcatgtgtggaagaaaaagagaatatacctgcctcttatataggagtggaatcgtgggaagttaatgtcgggtagatattcatctcaccttgcctgatgcacactcattcttcccaggtagtgctactatggaaggtgaatggacaggcatgagaaatgatcatagctgagtttcccttactgctttgtccctgtggatttggaaattgtgtttatttgaatctactttcagaaagcatttaaatagagccgtatgtggttgttcatgcctgtaatcaccacattttgggaggccaaggcgggcagatcacttgatgtcaggagttcaagaccaggctggccgacatggtgaaaccctgtctctactaaaaatacaaaaattagccaggcgtggtggcacaagcctgtaatcccagctactcaggaaactgaggcaggagaatcacttgaacccaggaggcggaggtcacagtgagccatgatcatgccattgcattccagcctgggcgacagagtgagactctgcctcaaaatgaaaaaaaaaaaaaaaaaagaagaagaagaagaaagaaagcatttaaatagtgaacattgggatatcaatgtttcgcaaagggacatttcatgtagaggtgtgctggtcaacccatgagctaattaggtagggaataaatcactctgaagtcttcttcatggagttggtcattttggtcattgggtcatgtggaacaaagatgctgattcatgtctgttgcaaaatagtttgagtttgatatattactgttagaagatttaactcagaaaccaggaaagaaatcaaggaacaaaaaattaaatcaagaaagaaaaagtaccatgacaaattcattatagtcattgtagttctatttttataagactgggctctactttgccattttaagctaaactgatgcacagttaagcattattagttgaaatatgctgtgatctcaattcctatttaaattgtaaggtcttctaatagatggtgttgttggagttcagatacacatgaatttcattttgctagaaatttgctccttttaatgttggggacttaaaagacacccaaggaaaagaagtcatccaaagatataataatgagaaccggaaaagtattttgttaaatttgtatgtgtcattaagataggacctttatgattttgatgttaaacaaatgtaagataaacagcttacaaaaactgtggccatcttggattgtgctgtgagacttccaagcagagacaaaaagactttcacctgcctccagctggacttcagaacttcgtttccttagggttcttgacagtgtttgtatgaaacaaaccctgttctgtgctgtgtacgatgagtaagcttcccaagttaaaattattgctccacaccacagatttcagattccaagtggaacagaagtccaaagttgctgtttataaacttctaagggtcgattgtacctttcaatggtgtccaccctgtgttgacatacagcaaaaccgaagggctcttgaaacttctaaccactttctgaattacagcgaagaatattctttgcatggtatcaaagttctacaatgtctcagtaattttacatattgaaaaaagtcattgatttccatattcagtcctctgcgctgtcttctcatttcaagtagtctcatgttccatgtattattacgttatttgaggaattaaaaaaaaaaaaaaaagaactggggaatctccaagagctggcgggaatattggctttgagaaaggaaccttagaattcaaacgtaatgttttacctaaaaaggagtccagtttccaacacttgggctgggaacgacaggctatggttgcccaggatctgaagtacagaggaaattgcttgtccttctggtgggagagtttgtctctagaggatcaggaggatcaggagggtcaggagaagggcagggtgtggccgggaggaaggggcatggttagagatttcttttcttgatcattttcatcccagttcagcactgagttcagatttcccttccttccttccttccttccatctgtccttccttcctcctttcctccctctctccctccctcctccccctgtccctctccttcctccttcctccctctccctctctgtctctcccccctaccttccttccttccttcctccctcgctccctccctccttttttcttttcttttctttctctctgtctctctccctttctctttctctctccttctctctctctccctcctttcccttcccttcccttccctttcccttcccttcccttcctttccctttccctttccctttcctgacagagtcttgctcttgtcacccaggctggagtgcaatggcgcgatctcagctcactgcaacctccacctcccaggttcaagcgattctccctcctcagcctcccgagtagctgggattacctgccatcatgcctggctaatttttgtattgttgtaaagacaaggtttcaccgtgttggccaggctggtctcttaactcctgacctcacgtgatctgcccacctcggcctcccaaagtgctgggattatag

SEQ ID NO: 804 - DNA, 2378 bp, Homo sapiens
  source 1..2378: mol_type = other DNA
tccgcccgcgacccccttccagacccgctcccgaaaccttgtcgaaggaccaaaggcgaccggtgcaggtgcttgctggtccttgttcttgtggcgcgggacggggacgactgtgggggagggggcgctggggaccggggtggagcgagcgtggtccgttctctggcatgtggggagggtgttcgtggaccccagtgcctgggagggagccccgtgctgcagtgttggcgtccgcagcgcgtttgggagtgtagatcgctgaataatacgggggaggggggatcccgggagactttagcaaggtcgctgagtattgtggggggcgcctgtcctgccgagatcctcgcttgggggccccgagggttctcagtgtcctgatctgggaagtgccgttgctgctccctacccctcgggggagctttggggacagaggtgcccccctgacgctgacctacttatgttctcaccaggtgcacgacgccagctcccttctggggggccggggcctgggggttgccatggcccccagccacctgtcagtgcgggagatgagggaagatgagaagcccctggtgctggagatgctgaaggtgagaggcaggggccccagggggcctgggagtggctgcagtgggggaattgcaagtggattcagccaccccctcccacccacctgagccagcctggacccctggagcgggatcttttcctcctgagcctcagccgccctgctgctgaaaaccacagcaggtgtggcaggtgggggctcacccccccagccctactgggaccccagcaccaacgccctccctggtctcccatctccagtcggctgtgcacgccagcacaacagccagctctgtgcctcggaccccaactcttcaaagcacagcccagcaccccaacctagcccagcagcctccctccagcctccactccagcctgaggcaacctccctgtccttacttccctggggcctcactgcggcattgctactgaattgagtgcccccacagctcctaattcactcatccatccatcattcgctctcgttcattcattcactccatacccagtgtgccacactgaacatcggactgtgctgccttcccttcccatttgggagctctcaccccgccccgggcagggtctacctcctctctttgtccaggaggccctagcgtttcggatggctgagccacccctcctgcccacaggccggcgtgaaggacacggaaaaccgcgtggccctccatgccttgacacggccgccggccctgctcctcctggcggcggccagcagcggcctgcgctttgtcctggcttccttcgccctggccctcctcctgccggtgttcctggctgtggccgccgtgaagctgggcctgcgggcccgatggggctcgctgcctccgccgggtggcctggggggcccctgggtggccgtgcggggctccggtgacgtgtgtggggtcctggctctggcccctggcacaaatgcaggggacggggcccgggtcacccgcctgtctgtctctcgctggcaccgccgccggggcgtgggcaggaggctgctggccttcgcggaggcccgggctcgggcctgggctgggggcatgggggagccccgggcccggctcgtggtccccgtggctgtggccgcctggggggtgggagggatgctggagggctgtggctaccaggccgaggggggctggggctgcctgggctacacgctggtgagggaattcagcaaagacctgtgaagctacagactgacagccagggcaggggaggagggaggggcgccagcacctgatgatcgcctactgtctgcgggttcttttacctgctctccctcagtgagtcctcaaccaccctgggcccagaaacagaggcctgccgaggggaggagcctggcctctgtccacccgtcagcagtgtgaagtctgttgtgtttgagcttctcagagtggaatgactccttttccttcctggccctcgggggcctctcgaggtcagcctctccaacccctacctcagctcctgtctgcactgagaaacctccccgggtgatgtctgcaaagtctgtgctgtccgtgccccaggctgggagagctatctggggagggggagaggaggccgagcagaatacaccccagagttagggtttgcgactccgcctccctgggacctggattgggtcagatgcctgtccttggaggggacaaggttgactgcttaggaggcgcgacgcacagggctgccaggcctggcccctctctgggaaggttgagagctgagacgggcagccctgtcccttcctccagatccgtctggttttttacaccgtttgttaataaagcctgaaaccgctg

SEQ ID NO: 805 - DNA, 32746 bp, Homo sapiens; identical to SEQ ID NO: 677
  source 1..32746: mol_type = other DNA

SEQ ID NO: 806 - DNA, 24588 bp, Homo sapiens; identical to SEQ ID NO: 622
  source 1..24588: mol_type = other DNA

SEQ ID NO: 807 - DNA, 32744 bp, Homo sapiens; identical to SEQ ID NO: 678
  source 1..32744: mol_type = other DNA

SEQ ID NO: 808 - DNA, 6215 bp, Homo sapiens; identical to SEQ ID NO: 679
  source 1..6215: mol_type = other DNA

SEQ ID NO: 809 - DNA, 32744 bp, Homo sapiens
  source 1..32744: mol_type = other DNA
gggcgcggagccctgctctcgcaactcaagatggcggacgagagtgagacagcagtgaagccgccggcacctccgctgccgcagatgatggaagggaacgggaacggccatgagcactgcagcgattgcgagaatgaggaggacaacagctacaaccgggggtaacgaaatcctcggagtccaattcccgtccagcctcccacaacctgggtctctggggtgcggggaagtcaccgggagcttagtctagccccaccctcatgttcttattggctaagtcactaggattctgcctggcgattggttattgcctttgtcatttaccaagggtgggtgctctggatattaagggccggagacgttcagtacttttattatataaaagttctatgcagtgttccactcgtgtgcttcaggccattcctgggaaaagagcatgttggacgatggttttcgatggtacaacacaggacagtctagtaacagtacagttcaaagggaacgttacttatagacgtgttgtttgaacaacgtgactagcaataaacgaatcataaaacatttcgcagcagttcaccctcagtgaggaaactcatcagactatacaaactgtatgtataattatattgtaaaatatcactaccagagaatcccaaaatataaactcaccttataaacctatgtaattaacggtatggtaatgctttgatttacatagtttccattgctccaaataatccataagtatcctgaacgatatattaatataattaagtcttcgaacatctttgccttgttacctttgcagagcagccccaggcttcaagaaatgagcgatgttgtttcttggagagtatttggaatcctcgggctccatactgcctatcctgtactttagggtcttgccattagttactatttgttcctagggatgaagaaacacaccaggcatttgaatgttgaattcttttcccaaattagtttttacttctgtaagccacagcttattcatctttcttcacatggttagtgcctggcactggcactcacgctgtctctccccatcttcctgtctatatttgtagatatatttttaaactgaaagtcgtgagagatttttgggtgtataacttgctgagtctgaggtagtctgattttcgtagccagcttgttattcgcagtattggtggcagtgcagatataaaggtataaagaccaaggactgcgtagaagagatggtcccacaagattatagtacatatttttattgtatcctttctatgtttaggtatgcttagatacacaaatacttaccattgtattatagttgcctgcagtactcagtaacatgcagcagcctattgctcctaggctacaaacctgtatagcatgttactgtaatgtacaccatatagcctaggcatttagtaggctataccatctagatttgtgtaagtacaccctataatgttggcaaggcaaaaatcacctaaccatgcatttcccagcacatatgcctgacgttcagtgaagcatgactgtatttaagtggtttataatctgcttgtggtaaatcttaggttaaaagatctagcttttatgttcttcagccggcattaaaaatcacaggaagggccgggcatggtggctcatgcctgtaatcccagtactttgggaggcagatcacgaggtcaggagatcgagaccatcctggctaacactgtgaaatcccatctctactaaaaatacaaaaaatttagccgggcgtggtggcgggcgcctgtagtcccaactactcgggaggctaaggcaggagaatggcgtgaacccaggaggcagagcttgcagtgagctgagatcacgccactgcactccagcctgggcgacagagcgagactccgactcaaaaaaaaaaaaaaaaaaaaaaaatcacaggaagaaagtagaggaataggaagcttgccaaatttagtttttataagactgttctgttgctgtaactcacaacagatctaatgtaataaaagtcttcttttgaagtttgatattcctaaaaatggaagagctgagaaagaggaagtaggaacaggaagaagggaaagtgaagctctcctgagtagagatctgaatcacagatgagagttggtgaatgtgaaagtcattccagaagtgaaagtgtggcattttctttgctctttttgtagttgcttttatttttatcttcttaactgttgtcctgaccagtgtccttaggtttgtgccctataatctgtgaatcacttttcaaaactgtgtgccagaaagttattttattggcctggcgtggtagctcacacctgtaatcccagcactttgggaggccgaggcaggtggatcacttgaggtcagcagttcgagaacagcatggccaacatggtgaaaccccgtctccactaaaaatacaaaatttagctgggcatggtggcgtacgcctatagtcccagctactccggagactgaggcaggagaatcacttgaacctgggaggtggaggctgcagtgagttgagattgcaccactgcactccagcctgggcaatagagcaaagccctgtctcagaaaaaaaagtggcacacagtggctcatgcctgtaatcccatcactctgggaggccgaggcgggtggatcacgaggtcaagagattgagaccatcctggctaacatggtgaaaccctgtctctattaaaaatagaaaaattagctgggcatggtggtgcatacctgtagtcccagctactcgggaggctgaggcaggagaatcactcgaacccgggaggcggaggttgcagtgagctgagattgcgccactgcacaccagcttggcaacggagcgagactccatctcaaaaaaataaataaataaaattattttatttgtagtagaagtaagtgataaccttaaaaactttgacagtttgcagtggtgtctctgtgcatggttatggtctgggtgaaaaaattatgtttattagcgtcccaaatctaaagatctgtgaaaatgagtttggaggtagtaggtgaaaaaccaagggcctagtctggaggagagagtctaattctggcactaagaatctggggtagagtcaacatttttccatgaactttgagaggaaatggttttggggagaagcagcaatgtgggaaaatgcagcacggcacagtagaaaagcatggactttggaataatttaaatctggtctgaggccaggcgcggtggcgcacatctgtaatcccagcactttgggaggctgaggtgggcagatcgcttgtggtcaggagtttgagaccagcctggccagcatagtgaaacctcatctctactaaaaatacaaaaattagctgggcatgatggcaggcgcctgtaatcctagctacttaggaggctgaggcaggagaatcacttgaaaacaggaggcagaggttgcactgagctgagatctctccagtgcactccagcctgggcgacagagcaagcctctgatctcaaaatctcatctcaaagcttggctctgacacttaacagtcctgtgaccttgggaaaggtacttaactcagagttgtagggattaatgagataacatctggaatgcactccttttcctccctcctcctctttcttcagatcgtccctaacctcccagcttgcccctctgctcttatcacatactgtattgtagcttttatcgtaacaatagttataataacaataaatataactacatgtttggtaatttttcttaatgtgtctggtacctgtctcatctgacagtaaggagcatgtaaacaggattgtgtcttcgaaatgcctagcacttagtgggcattaatgagtatttgctgtatgaatgaatggcagatattaaagtgcctagcccagtattagtggagtttcatctcccctcaccaagtgagaggatgtcagatttttcttacatacacattttctctccccaaataattctcattgtaagcctcactacagtttttatgaaatacctacagaggcagggcatggtggctcacacctgtaatcccagcactttgggaggctaaggcgggcgggatcatgaggtcaggagatcgagaccatcctggctaacacagtgaaaccccatctctaataaaaatacaaaaaattagccaggtgtggtggcgcatgcctgtagtcccagctactcgggaggctgaggcaggagaatggtgtgaccctgtgaggcggagcttgcagtgagccgagattgcgccattgcactccagcctgggcgacagagccagactctgtctcaaaaaaaaaaaaaaaaaaaaagaaatacctacagaaaccaggaagctccaatttgctgtggagctttccactgttgtgtgctttccactgtgtttggcttcttgaaatgttttttgtcttaatattatttaaaatgttctcaaaaatcatgtaaaaattgacagagaagttttcctttcaatgctagagagtctaaaatgtgtaatatataataaaggttaatgatagttcgagctaacccttattctcctgggcctttttttttttttaaagagactgtgtctcgctatgttgctcagactagtctcaaactcctgggttcaagtgatcctcctgccttagcctcccaaagtgctgggattgtaagcatgagccaccacacccagcctcctgcccctttttttcaggaactaaagtcatagtactctatgctaataaaatgagctaaattcatgtactggattctgttgcccgggctggagtgctgtggcgcgatcttggctcactgcaacctctgcctcccgggttcaagaaattctcctgcctcagcctcctgagtagctgggactacaggagcacactgccacacccggctaatttttcatattttagtagagacggggtttcaccgttgttgcccaggctggtcttgaactcctgagctcaggcaatccacctgccttggcctccgaaagtgctaggattacaggtgtgagccaccacgcccggccagttgtattagttacttatgtctctttgtatatgaatttagttcttgacttttctggtcttgtgtttcctccgtaattaaatcagcataaacatttggtgaatataaaacttcatgtggttgtgtgtagtggctcatgcctgtaatctcagcactttgggaggctgaggcagaaaaatcacttgagctcaggagttcgagaccagcctgggcaacatggtgagaccccatctctataaataaaaacaaaaaaacccaaacccttcatgtatacatataggtatacatgcatacatatgcagtgtgtatgggtgcgtctcttcagtttttctatttaaaaattttttaatttaattttaaaattattgttattactttggaaacagggcctcgctctgtcgtccaggctatagtacagtggtgtgatcatggcttactgcagcctttgacctgggctcaagcgatcctcccacctcagcctcccaagtagctaggattgtagacatgcaccatcatccctggctaattttctttttaaaaagtttctgtagagatggggtctcactatttagcccaggctggtctcaaactgctggcctcaagtgatgctgccaccttggcctcccaaactgctgggattgtgggcataagctcctgcatccagctggttttgtttgtttttttactgcactcaatttcccccagttacgtgcctagcgtaattatcctgaacaattgagaggagagtcagataagataacctttatgcagcatccccctgtagttcgtgattcatctatatggtttaatttgatttttttttttttttaatgagagtctttccaagaagtattgccaaagaataaatctcatcagttggcagattttaatttgggggtaataagtgaagattgtctgagtgttttggaacaaaaaagaacttttagactattgtgttctaggaatctttcggaatttattttgcagtgtcttcagtgtcattgagatcctggtaagcacgggtcaagagccctctgacaagaggtgtctcatctccatcctgctctcttactccctgggacaggttaacatggattctttataagttctcctcatttcctggttgtgagatactatcccttatgaaaacttaggaggagagaaaagtctttctgaaaataaattccataaagctagccttacttgtttttgtttttttcttcagcttctccaagagtcgttctttccctatttatttgatggcttatagctgcagctagctcttggaaataagaaatctttttagttcctttttaatttctcccttcaacttttggtttttcaaaactagatcaaagcagaatggaaagagaaacctcatcactgatatcaaataagtgttctaattttgtttcccaattaaatggcaattaaaaagaaactaatcaagagctgcttcaaagagaagagactggaaagcagaagaaatggaaagtaaatgagagcctatttcagggactcgctgctcatggcacagcagttttgctgatttttcacattgttcaactaatatgctcacgctaaaattccccagctttactaagttggcagttaaccctttccctatagagcccatagatttatgagccatacatttagtaacttcaggaggatgcttctttaactctttctcttcagctttttatctgaaatctctacccttcaggcctctcttccaattcctcaaagaagatgtccttgtgattgttacatttaagggacaaaaatatggtgttctctattgagagcgccaaaaatactaaaccggaattcctccataggctcagtatttgcctcaaaaatgtcccagcactttgagaggctgaagtgcgcagatcacttgaggtcaggagttcgagaccagccgggccaacatggcaaaaccccatctctactaaaaatacaaaaattagctgggcgtggtggcacacacctgtagtcccagctacatgggaggctgagacaagagaatcacttgaacccgggaggcagaggttgcagtgagcccagatggcgccattgcacttcagtctgggcgacagagagagcctccatctcaaaaaaataaacagaacaacaactttctagagctgctctcttgagagacaactgaggagtcactatggttaagtgtttagtaaatgttactattattactacgtagtgggcattgtgctaagccctttacttggattatatcctccatgatttcacttatgaagactttagcgatttttgtttgtttgtttctttttttgagtctcactctgtcgcccaggctggagtacagtggcacgatcttagctcactacaacctctgccttacaggttcaagcaattcttgtgtcttaacctcccaaatagctgggatcacaggtgtgcaccaccattcccggctaatttctgtatttttaatagagacacggttttgccatgttggtcaggctggtctcgaactcctggcctcaagcagtccacctgccttggcctcccaaagtgctgggattattacaggcgtgagccaccatgcctggactttagttttttgtttttttgggtttttttgagacagagtctcactctgtcgcccaggctggagtgcagtggcgcgatctcggctcactgcaacctctgccacccaggttcaagcgactctcctgcgtcagcctcctaagtagctgggattacaggtgcctgccactgtgcctaactaacttttgtagttttagtagagacggggtttcaccatcttggccaggctggtcttgaactcctgacctcgtgatccatcctccttgtcctcccaaagtgctgggattacaggcgtgagccaccatgcctggccagactttattttttattatttatttatttatttatttatttatttatttttgagacagagtctcgctctgttgcccaggctggagtgcagtggcgtgatcttggctcaccacaacctccacctcccaggttccagtgattctcctgcctcagcctcctggatagctgggactacaggcacatgccaccacgcccagctgatttttgtatttttagtagagatggggtttcaccatcttggccaggctggtcttggaactcctaatctcgtgatctgcccacctcagcctcccaaagtgctgggattacaggcatgagccaccactgcgcccagctagactttagtttttatagtgaggcttgagatttgcatctccactggtctctttgacatctcagaggatccattctgaacttgctaggtttctttcccctgctgaattgagttctgcatcttgagtctgcagcagtgtgaatcctatctttggctccatttaacagcctatggacgttcccaaacttgggacccagtttgtctcttcatgatagacaaatattattttcagaagtcattctaatcgcaccactgcactccagcctggcaacagtgagactccatctcaaaaaaaaaaaaaaaagtcattctagtaggtgagatttctgccagcattgagccactgctcaacatattcttgataatggtctctgaacagcatttgattttaccttggagttgcaaagtcaaagtctaactcgccaaacaaactcagtgtggaatatacacatttgtctcattccggttttaaggagtttagtataccagagcttttgtgacctctaaaaagcagttatcgtccatgacaagaattggctcgttcaccctcagtactctggcttactatcccagggagggccgagggtggcagcaaaagtggtcttttgtaatccctttttataacctgctgttctcttcacagacctcccagggtacctttttttgtgtgtgtgtgtgtgagatggagtctcactctcacccaggctggagtgcagtggcgtaatctcggctcactgcaacctctgcctcctgggttcaaactattctcttgcctcagcctctcaagtagctgggattacaggcacccgccaccatgcctagctaatttttattttttatttttgagacagagtctcgctctgtcacccaggctggagtacagtggcgcggtcttggctcactgcaagctgcgtctcccgggctcacgccattctcctgcctcagcctcctgggtagctgggactgtagtcgcccgtcaccacgcccggctaattttttgtatttttagtagagacggggtttcaccgtattagccaggatggtctcgatctcctgacctcatgatccgcccacctcggcctccctaagagctggaattacaggcgtgagccaccgcgcctggccaatttttgtaatttttagtagagaagggttttgctatgttggccaggcttgtctcgagctccagaccttaggtgatctgcccgccttggcctcccaaagtgctgggattacaggcatgagccactgtgcccagccccagggtaccttgatggcagtactaaagtgtttttatttttcccatcatttgggattcacaagcagtttttgatataactaattggtgggaatgtgcggagttgggggtattgcactgagtgatccttagccgcagaagtacagagactagacagctgatactgattcatgccatgtcatttccttctgggcatctttgccatttcattcacctctctttggtctttctgagtactaataggattattagtgaacttaccatacttcaagagttaattgatttgcaaaaggatttcctgatgtctaaaagtagaatcaaaaggatattagaggttagagtttattttaataagtttctctggaaaatttgaatttctgcccaaaaaattcattttttatttgagacaaggtttcactctgtcacccagatcgtagtgccatggtgcagtcctcctacttcagcctcccgagtgactgggactacaggctaatttttttgtctgtgtgtgtagagacaagatctcactatgttgcccaggctgatctctaactcctgtctttttgtttttcagaggtagaaaacaagtggtggctggtccaagtgcagtggtgtttacgactaatttgtcataaccagttatagatttctttgttccttttccactcccactgcttcacttgactagcctttgaaaaataaaagtaaaaagcaagtggccatgagatctgagagctacagtgaaaaagaaaagtggccaaatttgtgaattttatttcccaaacttttttttcttatgttgtaaacctgtggtctgtgtttaagacattgaaaccattagaagtagttacattagagcttttttgtttgtgctttatttacttattagagatggggtctcactttgtcacccaggatggagtacagtggctattcacaagcgtggtcgtggggcactactacatcgtgagactcctgggctcaagagatcctcccgcctcagcttcctcagtagctgggactacaagttcacaccaccacacctggctggacctgttttagcttctcaaggagtaggacagagcctaaggagagagaagacaatgaataagaaaattagggctggacatggtagctcacatctgtaatcccagcattttgggaaattgaagcaggtggatagcttgagtccaggaattcaagaccagcctgggcaacatagagaaactttgtctctacaaaacatataaaaattagccaggtatggtggcgtacgcctgtagtcccagctacgcaggaggctgaggtgagatgatcgcttgaacctgggaggttgaggctgcagtgagccatgattgtgccactgcactccagcctgggtaacagagtaagaaactgtctttacaaaaaaaaaaaaactcagtatttttttatttgagatggagtctcactcaggctggagtgcagtagtgtgatctcagctcactgcaacctccccctcccaggttcaagcgattcttctgcctcagcctcccaagtagctgggattacaggcgtgtaccaccaccacacctggctaatttttctatttttttagtagagatggggtttcgccatgttggccaggctgatctgaaactcctgacctcagctgatccacccaccttggtctcccaaagtgctgggattacaggtgtgagccaccgcacctggcctatttttttttttgagatggagtctctctctcttgcccaggctggagtgcagtggtgcgatctcagctcactgcaagctccgcctcccgggttcacgccattctcctgcctcagcctcccgagtagctgggactacaggcgcccgccacgatgcctgcctaattttttgcgtttttagtagagacggggtttcaccatgttagccaggatggtctcgatctcctgacgtcgtgatccacccgcctcggcctcccaaagtgctgggattacaggcgtgagccaccgcgcctggcctattttttttaataaaaaaagaaagttgataatttaaaatcccaatcagtagctcaagagcacagcatttccattgctctcatagaatattaacacagctgtcctgtgcaaacagaactgaagatgttttgctgaccctcttttgggctctagcttttcaaggtcttattttagtctattatgcctgtaaagcatcagtcaagcatataattgttgaactgttaactgtgtgctcagcacaactagaggcgctgtgggaagcagctgtataagatgtagtctggccgggcgcggtggctcacacccgtaatcccagcactgtaggaggctgaggcagatcacttgaggccaggagttcgagaccagcctggccaacatggtgaaaccctgtctctactaaaaatacaaaaattagccaggcatgatggcacatgcctgaaatcccagcttttcaggaggctgaggaagagaatcgcttgaacccaggaggcggaggttgcagtgagccaagatcacgccactgcactccagcctgggcaacagagcaagactctgtctcaaaaaaaaaaaagatgtagtccctattcttaggaaattgttaatgtcatcgggaagccaagaaagcaatatattattatatattaagtgttttaggagattatagttttaaaacaggcagacatcagagaactagaatagtcagagctgactttctggataaaacatgactcactttcctcattacttctaatgcttgctcctctcaaacaccaaagctgtgttctatagcccagtgtgaggaaacaatattctcttggctttggaggattctcaaatcaattcttacagggaacgaagccatagcctttggggggaaatggccccaagccaagtctttagagattgatggctcctccctagatgctagttggttggttgataaccaatttgcctcacatctctgggccttagtttcctcatctgtaaacaacaagttaagccagatggttctgagattccagtgttggaagctcagcttcccctcccctatgatagagctttttcttcccaggcatgcagttttgagcggattgcatcatccagtaagactgagaggaggcccacatatggaccctcgctgctcctgttgtctagaagttcctcttctcctgctgttcatctgccagcttacccttacctcccacccgctcacatacccagcattgcgctctatttctagaaataagtactgaagttagttttccatctcctccccaaggtctgaatttatacaggagcatccttaggatgtcttacatctttgaacttgtaacattttggtcttcattaaaagatgactttttttttttttttgagacagagtctcgctcagtcgcccaggccggagtgcagtggctggttctctgctcactgcaagctccgcctcctgggttcacgccattctcctgcctcagcctcccgagtagctgggactacaggcgcccaccaccacgcccagctaatttttttgtattgttttttagtagagacggggtttcaccatgttagccaggatggtcgcgatctcctgacctcgtgatctgcccacctcggcctcccaaagtgctggtattacaggcgtgagccatcgtgcccggccgagatgacatttcttgattgcttttctgctctgttcctggatcttttattctaattcaccctgtatttgctaggttggtcattgatgacttcttgagttgatcaactttagaatataagtctcacaatttttgtatgaactgccatctgccttctgggggaggaggcacttctgttgctgcaccaaggcaaactttactgaattctctactctttattttggaaccaagtgaaacaagttggactttggtttgctgtattctaagattctggttctggccaatctcagtttgaaataaggtgactggcagcttagatctgtgagagatttctatttcagtgtgccgaatcgcagcatgccctaggattcccacccagtgggtgtggacttcaaatccctttaaaaaggatgccagccaggcacggtggctcattcccataatcccagcacttttggaggccaaggcaggaggattgcttgagcccaggagtttgagcccagcctaaaattagccaggcatggtggtgcacacctgtagccccaattactcaggatgctgaagcaggaggattgtttgagccaggagttggaggcaggagctggaggctgcagtgagccatgatcgtgccactgcactccagcctgggtgacagagcaagaccctgtctcaaaaatgaacaaacagccaggtgcggtggctcacgcctgtaatcctagcatgttgggaggctgaggtgagtggatcacttgaggtcaggagtccaagaccagactggccaacatggtgaaaccccgtctctactaaaaatataaaaattagctgggcctgatgctgggcgcctgtaatcccagctactcaggaggccgaggtgtgaggatttgcttgaacctgggaggtggaggttgcagtgagccgagatcacaccactgcactagaggctgggcaacagagcgagactcttgtcttaaaaaaaaaaaaatggctgggcgtggtggctcacgcctgtaatcccagcactttgggaggccaaggctggcagatcatgaggtcaggagttcaagaccagcctggccaacatggtgaaaccccgtctctactaaaagtatgaaaaattagccaggcatggtggtagtcccagctactcaggaggctgaggcaggagaatcgctgaacccaggaggcggaggttgcagtgagctgagaacacggcactgcactccaggctggcaacagagcaagactccgtctcaaaacaaaacaaaaaaagaggccaggcacggtggcttacgcctgtaatcctagcactttgagcggctgaggcaggcagatcacctgaagtcaggagttcaagaccagcctgaccaacatggcgagacctcatctctactaaaaatacacagattagctgggtatggtggtatgtgcctgtattcccagctacccaggaggctgaggcagaagaatcactggaacctgtgatgaggaggctgcagtgagccaagattgtgccattgtactccagcctgggtgacagagcgagactccatctcaaaaacaaaaaacatgaatcaagaaacaaacaaaaaatgatgccagattcctggagaaggattagcctggcttctgtggggtcctctagttttgttttcccttagtccaaattgaggccattcttctgtgaagtggcgttggcttgctaggatgctttttgaagttctactctcaaggcctctgagcttggttccctatgaataattaaaattattataattaccatgaaagctaactggagtgggctccttggaagtctggttttgctgaattggttgtcttctgtttgggggtgttgactgtaagactatgtgtactcataatgtgtcctcacggatggggctcaatacttggtagctcagtgaaaatgactcattaaagaaaaaaaaaaaaaagtggccaggcacggtggctcatgcctgtaatcctagtactttgggaagctgaggcaggtgaatcacctgaggtcaggagtttgagaccagactgaccaacttggtgagaccctgtctctactaaaaatacaaaaattagctgggtgtgatggcacatgcttataatcccaactacttgggaagctgaggcaggagaatcccttgaacctaggaggcggaggctgcagtgagctgagatcgtgccattgcactccagcctgggcaacaagagtgaaactctgtctcaaaaaaaaaaaaagaaaagaaaaaacaacttccctgtgttcttcagccgtgtgcttgatgtacaagttgaaacaggatttttgctcagtaactggctgcttgtacaaattcaagccaatataaagaaaatgaaatttgctctctgattttagtttcggtcttggagatttctagatacttgtattggcaatgcataaagcagaacaagagttcagcccaagatccttccacaaaaattgggttcatgaggtgatagctacatggaagtatctccgctaaataggaagaacaaaggcaggaaggtagtttttacagtgattttgcatatttgtaaagacttttaaagttggaagaagtaattattttccccatgtgaaattatgtttagtaagtatccagttggttaatctacagcagttcttcaccttacctttttgattctttcttttgtagaattataaaaagttattcttatggtaattcatattaccataatttgttccataagctgttatggaaccagctaatttgtggttatggaccagataatttgttccataagctgttatgaataagaatttatattataaattgtatccaacaatgggacactgctttgtctcctaatatcagccaggtcttgtttgtttgttttttgagatggagttttgatcttcttacccaggctgtagtatagtggtgcaatcttggcttaccacaatcttcacctcccaggttcaagtgattctcctgcctcagcctcccgagtagctgggattacaggcatgtgccaccacgcccggctaattttgtatttttagtagagacagggtttctccttattggtcaggctggtctcgaactcccgacctcaggtgatccgcctgccttggcctcccaaagtgctgagattacaggcgtgagccaccgcacccagcctatgagccagtttttaaatcttataatgcttcacgtaatcctgagactgaagtgaaaatatctggagtaggaaaaccacagagttgtcctaggctgcagatggtcctgtgtgcaataacaaaattgagttactaagaagaagaagttatctttaggccataaatgactttatggtttctgttgtttgccatggccttgggggttttgctgagcatctggttttaaggaagttaccttatttcccctttgaatgttctcagtcttccttccatgttaatgccttctgggtctcattaatatcataccaagtaggtgtacttgcatctagacttcatgaccttatgcttggactaaaggaaccttcagacttaactggatctctccctgtcacagtctttctgcatcaggggcactgagaggcccggccagatggaagctgtgggaggcaagagtggacagcgtaagtgggaaatgagggtgataggcctagggaaaaattgggcttgataccttccaagttaagaagccgctgttactctaggatttcaagcatgggggggacacatggaaagccattttcacagaggtgagtcccacagctatatagagttcaggtgatgcagaaagattgtgaaggcaaagagatccagaaaaggctggaggtaacttaagtccaagggtaaggtcatgaagtctggatgtgagcattcctcccaggaacaggaagagataggagaatctgaagacattctgtgaagagaattggcagcatgtgatttcagatcactttctccctgtatatatatatatacacagtatctgtctgtgagatgatagtaatattcataataactccgaggcattttgagaccctgaagtctttctgaattataaattgtatttaacataatgttaatggaaaattgtattttatattgttttaattcttgggggttttggtgtttttttgtttgtttgtttgtttgttttgagacagtgtctggctgtattgcccaggctggagtatagttgtgcgattttagctcactgcaggctcctcctcccaggcttcaagccaacctctcaactcagcctccccagtagttgggactacaagtgtgcaccaccacacctggctaatttttggatttgtgttagagacggggtttcgccatgttgcccaggctggtctcaaactcctgagctcaagtgatccgcctgccttttcctcccaaagtgttgggattacaggcatgacccaccatgctggacctttcaattatttgaaaattgattgtctaaaatatacagttaaaattacctctgtgtttagctgattctacagattaggattcactgtactcaggttggactcctaattttgacttttctttttttcttttcttttctttttctttttttttttttccccaagatggagtcttgctctgtcgcccagagctggagtgcaatggcatgatattggctcactgcaaccacagcctcccgggttcaagcagttctcctgcctcagcctcccaagtagctgggattacaggcgcatgcctccacgcctggctaattttgtatttttagtagagacggggtttcaccatgtgggtcaggctggtctcgaactcctgacctcatgatctgtctgccgcggcttcccaaagtgctgggattacaggcataagccaccgcgcccagccaattttgacttttcagtgtggctaagaggctgagcatggtggctcacacctgtaatcccagcactttgggagttcaaggcagcaggatcactcaaacctagaatttgagaccagcctgggtaacatagggagacccctgtctctattttttaatttaataaaacattaatgaggctaagaaactttttgcttcattcatggggtgtgtcatgtaggggaaagcagcacaaggaagtccccttgatcacgtgcacacatgcacacgtgcatacacacagacatgtttcttttatttatttatttatttttattttttgagacggagtctcgctctgtcgcccaggctggagtgcagtggcgcaatctcggctcactgcaagctccgcctcccaggttcacgccattctcctacctcagcctcccaagtagctgggactataggcgcctgccaccacgcctggctaattttttgtatttttagtagagacggtgttttaccatttagccagaatggtctcaatctcctgacctagtgatccgcccgcctcggcctcccaaaatactgggattacaggcgtgagccactgcgcccggccacatgtttcttgtaatctctccatggcaggagtaactgggtgctattgttgttttagtttcccaagattcctaatgctgggttttgccagtggtgatccctcagtctgagcttgccgacagttgtcctcaatcctgcagatctggtttaggcatttcttttttttttcccttttttttttgagacggagtttcgctcttgtttcccaggctggagtgccgtggcgcgatcttggctcacaacaacctctgcctcctgggttcaagcgattctcctgccttagcctcccgagtagctgggattacaggcatgcgccaccatgcccggcttattttgtatttttagtagagacaggctttctccatgttggtcaggctggtctcgaactctgcacctcaggtgatccgcctgccttggcctcccaaagtgctgagattacaggtgtgagccaccacacccagccttttcctttttttttttttttttttttgagacagagtctcgctttgtcacccaggctgaaatgcagtggcatgatctcggctcactgcaagctctacctcccaggttcacaccattctcctgcctcagcctcccgagtagctgggactacaggcgcccgccaccgtgcccggctaatttttttgtatttttagtagagatggggtttcaacatgttagccaggatggtcttgatctcctgacctcatgatctgcccgcctcggcctcccaaagtgctgagattacaggtgtgagccaccgcgcattgctgccttttcctttttttgagacgaggtctgtctctgtcatacaggctggagtgcaatgacgtgatctcaactcactgcaacctccacctcccgggttcaagcagttctcctgcctcgtcctcctgagtagctgggactacaggcatgtgccaccaggccccagctaatgtttatatttttagtagaaacagggttttgccatgttggccagtctggccttaaactcctgacctcaagtgatccacctgcctcggcctcccaaagtgttgggattacaggtgtgagctaccacgcctggctgatttgggcatttctcatgactgaccattttggacacagattgtggcaatgttaatgtgcctttttcctcatccctcactcccttttcatactgtcttgtgctccagatccagctggggaaaatcatgaaacctaatacatttgggaggtggaggaaggaagggcaaagcattccagaaagcccatcactgccttttggctgtcatccttttacattcagagttcaaggaagtattgtggtatgaatgccttgttaacaattatcattcgtctttggtgccattaccctggcaatataaagaaaataagcaacataaaagcaagaacggaaaaggccctttcacacaaataggacatcccttgcccagcactccctccctgaaagccgagggggcgcgagtcaggaggagtgctggtgtcctccaaatgccctttctggacctgggttcttcagcctgcttctgaagccaacaggcttgattaaggaaggtctggctccacagaaagctctttgtcaggggtagcacaaaacagattttttttaaaccctgcattagtatttactttttgttacagtggtttgagtccagccaatgacactggagccaaaaagaagaaaaagaaacaaaaaaagaagaaagaaaaaggcagtgagacagattcagcccaggatcagcctgtgaaggtaacaaggaggttctgttttttgtgactcagtcactttttcacatgagagagttttgaggtgaatgtataggatcaacttggattgacgttctccactggtattacttcaagatggaagagttggatcccagtgctgtcctctgctgccctagacctaggtgatgaaactgctctcagtaccctaaaagacacagcaggtcagacactgactcccaagcatggtgcccatcagaatggacaggtgcgtactgcatgtgctgctgtgccagtgccctggggagctacgtgtgacagcccctggcgcctagagcagtggttctctgtcttaagtccccaccgctctgacaatgaaaggccccccctttctttttgagacagagtcttactctgttgcccaggctagagtgtagttcatgattatagctcactgcagcctccactcctgggctcaagtgatcctcccacctcagcctcccaagtagctgggactgcaggtgcatgccaccacacctgtccagtttttttttttttttaattttttgtaaagatggagtctcactatgttacccaagctgggtcttgaactcctgggctcaagcaatcctcctgccctagcctcccaaagtgctgggattacaagcgtgagccactgcattcagccaaagacttcttcttaagacctttatatatttgcaaacattctcttaatgccatagtcattataatgaaagccatgagtcccacagagtctttctgagttctactccatgagaaccactggcctaaaggcttacaacctgagagtgatgcactggcatgaaacccagagatatgggtaaggattgttttgtttcttaaataaaacaacattacaaaataaaacaattgcaggtaagtgttgtcttcttcaaagtaggctgacagaggcagggggacaactcaaacatattcataattcaccttttaaaactgcctctgagacctggggtggtggtttatgcctgtaataccagcactttgggaggccaaggcgggtggatcacctgaggtcaggagttcaagaccaccctggccaacatggtaaaaccctgtctctgctaaaaatataaaaaattagttgggcgtggtggcaggcgcctgtaatcccagctacttgggaggacaaggcaggagaatcgcttgaacccaggaggcagaggttgaagtgagctgagatcacgccactgcactccagcctgggcaacagagtgagactctgtctcaaaaaataaaaattaagtggccaggcatggtggctcacgcttgtaatctcagcactttgggaggccaaggcgggtggatcacgaggtcaggaatttgagaccagcctggccaacatggtgaaaccctgcctctactgaagatacaaaaaaaaattagccaggcgtggtggcacgcacctgtaatctcagctactcaggaggctgagacaggagaatcacttgaacccaggcggcagaggttgcagtgagccgagatcacgccattgcacttcagcctgggcgaaagggtgagactttgtctcaaaaaaaaaaaaaaattaaaaaaaaatttaaaaaaaggaacagcctctgaaacagtttataagcctcgcaaaaatccatattcattccaatatacccacactttgctgtatgcctcaaatgttatgcctcagcttgaatctgctaccttattgagatatgacttcaagtaatttttttactatttccaatataaaacccgctatgaaaaaataccattattatttaataccatgttgcacttcatttaaattagctccaaaccatcaccatccctacaaggtaggtaggggtcttccctttttattcatttaatttatttttgagactctgtcattcaggttggagtgcagaagtacgaacatggctgaccgcagcctcaacctcctgggctcaagcaatcttcccacctcagcctcccgagtagccaggactacaggtgtgcaccacgacacccagctaatttttttattatttgtagacatggggtctccctgcattactcaggttgatctctaactcaggctcaagagatctgcctgccatggcctcctaaattgctgagattacaggagtgagccatcacacatggccgagaatttatttaataaactgcaaggggaagaaaattaaaatgccacttcccaggcctaagcaatatgaacatactggtttatattctttctttcctttataatctaagtgaaaaacagaaaactaaataaaaatattagaagaaaatgtatgtagttttattaatctaagtctgacataggacccagaagccataaaacagaaattgacaaatttaaaactttgtagaagtcaaaagataaacaataatctgggaaaatatttgcaacatatgtattagtttaaaataattgaatgaataggcagttcagaaagaaaaaatgtgtaatcagtaaataataagatggttaaagtcataatggaagaaatgaccattaaagcaataattatttctcttagattggcatagattaaggcttggtaaacttttttttttttttgcgagacggagtctcgctctgtcgcccaggctagagtgcagtggcgcagtcttggctcactgccagctccacctcctgggttcacgccattctcctgcctcagcctcccgagtagctgggactacagccgcccgtgaccacactggctaattttttgtatttttagtagggacggggtttcactgtgttagccaggatggtctcgatctcctgacctcgtgatccacccgcctcgacctcccaaagtgctaggattacaggcgtgagccaccgcgcccggccacttttttttttttaatagggacaggggtctcactatattgcccaggctggccttgaactcctgggcttaagcagtcctcccgcctcagcctcccaaagtgctgggattacaggtgtgagccaccaagctcagctgaggcttggtaaatctaatggtgagggtcaggagctactctcatacactgttcgttggattactgatagtctctttttagagagcaaattgatgataaatcatttcaaaagtgcataccttttgacccagcaggcctctttcttaacttcatcctacagaaatatatatcccagtgggtaaaaatagatgtataagaaaatttatgctgggtgtggtggcctgtaatcccagcattttgggaggctgagttgggcagatcgcttgagcccaggagttcgaggccagcccaggcaacatagtgagaccccgtctcgacaaaaaaacaaacaaaaaaattacctgggcctggtggcacacgcctatagttccagctactcaagaggctgaagtgggagaatcccttcagcccatgaggttgaagccgcagtaagccatgattgtgccactgcactccagcctgggcaacagagcgagaccctgtctcaaaaaaaaaagaaattcactgcaacattgttgtattactaaagaacaaaatcaccaaaatgcccatgagtagggggctggctaaatatactgtggtccatacatacagtggacttggtagaatgggtaggtccaggtgttttcacctggaaaggtctctaagacagtctttaaagagcagtttgtacgataatattatatgatccaattttagtttttgaaaagtgtgtgtgcatttggaacttgtatgcaaaaaagtctggaattatatttgcctcttctcaccttcccaagtgaagactattgatcacaaagattatatttgggggatgggattgtgggtgtttactttctatgtgtcttacacatttctgcattgtttgaaatttacattgagcatgtattacttttgccatcaaacaacataagactaataaggggagaaaccctgcgggcagcacccacccatcatatagctcattgtcaaccactttttctctggttgtaatgacctctgggattaggacagaggaaccaaaccccttctttgaattgtaccctttaactctttttttttttttcttttttgagatggattcttgctctgtcacccaggctggagtgcagtggtgtgatcttagcttactgcaacatctgcctcccaggttcaagcaattctcgtgtctcagcctcctgagtagctgggattacagggacacgccgccatgcctggctaattttttgtattttagtagagacagggtttcaccatgttgcccaggctggtcttgaactcctgagctcaggcaatccacctccctcggcctcccaaagtgctgggattacaggcatgagccactgcgcccagcactctttttttttttttttttgagacggagtctagctttgtcgcccaggctggagtgcaatggcgccatctcggttcactgcatcctctgcctcccaggttcaagtgattctcctgcctcagcctcccaaaatagctaggattacaggtgcccgccaccacgcctggctaatttttgtatttttagtagagacagggtttcaccatgttggtcaggtgggtctcgaactcctaacctcaagtgatctgcccgccttggcctcccaaaatgttgggattacaggcatgagccactgcacccagctccccttaactcttgaactcataattaatcaaaagtcttactaacataatgggccttttttctccccaactttgtcttgtccagatgaactctttgccagcagagaggatccaggaaatacagaaggccattgagctgttctcagtgggtcagggacctgccaaaaccatggaggaggctagcaagcgaagctaccagttctgggatacgcagcccgtccccaagctgggtatgtacatgcttgctttctttgccaggtcaggggcgagggatctgcctcagctgtgccttcatgagggtttcatgctgaattactgtagggagggcagtagagtcctggagttccttggtagttgttttcagagggtggtttttaaaaatgcagcataaagactatcattcagagaccttaccattttatagcagcacaccttgagaacaaataatgattcttgccaacagcactggctcacacctataatctcagcactttgggaggccgaggtgggaggattgtttgagcccaaaagttcgagaccagcctgggcaacatagaccttgtttccacaaaaagtaaaaaaaaaaaaaatagccaggcatagtgacatgcacctgtagtcccagctactcaggaggctgaggtgggaagatcacttgaacctgggaggtcaaggcggcagtgagctgagatcacgccaccgcactccagcctatgtgacaggagtgagacccccaactcaaaaaacgaacaaaccaaaaaacccaaaaaaaaaacaaaacaaaactattggcacatgaagagtgggaatgtctgcccagaggtcttttttccacttaggtttatagagactttgtcttgtttgtctgggcacatgtttattcctggaatgggcaaagtccccagcctcttcccctttgtctcctagccaatgcatgcttactaaatgcaaagtggtttgagattttgcttagcagtgatggttcaacaacaggaatactatatatagatttcattagcaccccttaaaaaagctataatgaattgctaaaggggtggaataggcagaatatctaaaaggattctggaagggactggatcctgttagacgtgcctgccaagactgagccaagccaaccttgatggctgacttcaggactcagctgacaaagtttctgaagtggttgtaacatgattctggacccattggtggcctagttcctgttttctttgtgactgggaaagtaagtatgttgaaaaaaacatattccaacaccaaatgtaaatgactttcagcttgtccacattactgctcccctccagaaacacaatgagacttcactagtatgttcggtgcagaggaggagggtggggcagggccagacagggtagggctaaagactggtgaggtgaggaaggcagctgtgcccaaggagatttgtttgctgcagaggttgggagcagctaatccatgaggcctgcagacctgcaggatgggcattgcctaattgctagtagaaatgcagtttgtcgggccccaccccaaagctgcagaatcagaactgccagaggatttctgtccactttgaaagtttgagaagctctgctctagagcggatgcagttcttagaagcttggtcacaatagaagcaagctgaggaggtgcatccccacgggtgagggagagcagagcactgcccaggtggacaagaggggtgctgattcccccatcaccgtgtgtgtttggctgccctcatcggccaggtcccaggcccactggctaagccctccagcaaggctttgggccacagggtagggtcccagtgaccagtttctcgctgaggagcaggaaagatgcagagagccacacatctcacctctgaatgaaatccctgatgaggtgttgtgtggtggctgccatgtatcttggctctgttttcagatggcattttggagttttggtttgattttatttttcctgaggaatttgcaaatgagtaaccttgctacattcttcacagatagtggcacttgggaaagaggcagattgaggctgggcgcagtggctcacgcctgtaatcccagcactttgggaggtcgaggcaggcggatgacctgaggtcaggagttcgagaccagcctggccaacatggtaaaacctcgtctctactaaaaatacaaaaactagctgggctggtggcatgggcctgtgatcccagctacttgagagtctgaggtgggagaatcacttgaacctaggagacagaggttgcagtaagctgagatcgcaccactgcactccagcctgggcagcagagcaagaatgcatctcaaaaatgaatttaaaaaaaaaaaaaaagaggcagcttgggattaatttgcttctgttcctcttcagcccagcatactttgttttcctttcacctgtaaatgtagaaagtgcttcagtttagttctcagaaagctcaagagaaaaccacacagttgctcatacgggccctgacactttgaggaaggaggaacaaggtctggttttatttcttctggctttgccttctgtgcagtgtgtggtgtcggactccatggaagagcagtcaccctgagcatctgactagtctgcctttgaggtccagggtcagtcaagccccagttagattcctgtgtttgtgtcagcctgtaaaaagtgccaccttggcaggcgtgttagcctgcatggctgaggcgtcaccctagttctgagttttctcaggggtggtggtacctacagcttcttgccctaatttttttttcacttaattggaggactaatgattataaatctcgtgcatatcagctgcactgtgtttttacagtactctccaccttcttgggagagttttaattagatggtattccactaaagaaacctacaagtctctctgatttatttatttatttatgagacagagtctcactctgtcgcccaggctggagtgcagtggcgttttctcggctcactgcaacctctgcctcccaggttcaagcagttctctgcctcagcctcccgagtagttgggattacaggtgcccaccaccacgcccggctaatttttgtatttttagtagagacagggtttcaccatcttggccaggctggtcttgaactcctgacctcgtgatccacgtgccttggcctcccaaagtgctaggattacaggcatgagctaccgcacccggccctctcttttattttcttgagacaggatctcgctctgctgcccaggctggagtgcagtggtatgatcatggctcactgcagccttgatctcctgggctcaagcaatcctcccaccttagcctcctgagtagctgggactacaggtgcctgccacatgcctggctaatttttaaattttttgtggagacatggtttcactatgttgaccaggctggtctcaaactcctaggctcaagctgtcctcctgtcttagcctcccaaagtgctgggattataggcgtgagccactgcacctgactgagacctgcaattctttagaagcttaaaattatcctaggtttaccatggaaaggccttcttaggccgggtgtagtggctcaatgcctgtaatcccagcactttgggaggccaaggcaggaggattgcttgagcccagcagctcaagaccagcctggacaacagggaaagacctcgtctctacaaaaaaatttaaaaattagccagacatggtagcacatgcctatggtcccagtttctcaggagactgaggtgggaggatcgtttgagtcctggaggtcgaggctgtagtgagccatgatcgtgccactgcactctagcctgggtgacaaagcgagtccctgtctcaaagattaaaaaataaataaataaaaatgaaaggccttcttagcagaagtgttttagtctgtgtaacaactgtaagagccgcagatgaacttttgatcccccactcgagatcatgtcgttcttctttttaaagtcacccctttcccactcatgtcaacggaagcagtatccttttctgtctttggtcagtggaatgcagtgtggccactctgttttaaaaagtcactatcaaagggaggatgtgcactcacctggtttccatgggtcccagagagaagcttcccctctctttttcctctccttggcctttgtttggtttaatgttttccgcatctcagacattctcatttctccgaagtccttcacagttgcaccgcattgcttagttttgggtctctgatgtttgatgtcatggagagaattttgagggaagagtgtgcagaaagaaacccattgaaagctcagggttttctttaaacttccagattcttttaaagcaagttcgaagtgtcatccttagtcatttattggttcatgttggccttgagagaatcagctgcattcttgctgtgctctgcagagcagccttccacccctgctcagcaggaggtactcaaaggccattgtaagggagaaggcaggctgctccccacagagcaggacaagcagaggccatgatgctggcaccacaccgaggacagcacaggagccttgggctgcttcttggcatcgagggcactccacagtgggagtctagtaaaagtggctgctcccttttcagtgtttcctgtagctctactttttcacacccaccctgccccacatagtccacctgcagcctggctgattcctaattatccttgaggtcttgtcgttagatatttcctctgagaggtctttcctgacacacacacacacacacacacacacacacacacacacacacacacacacgtcccatagcaccctgtacttcattcttactggccctcaccatgccgggtggcatgtgcatccttgctcatctctttggtgtccatgatggtgaggacctgtgtctgtttcattcgccagcccctgccacagaactggcacattctaggattcagtgaacacttggtgaaggagtgagtgaatggaagtgcctgttgcgtgtaggacctagtagccagcctaaatgagaagatttagccttgaggttattttagtacaatagggaagaccatcagtattcttggccatggaaataattcagggggaaaaaaagaaggttctgaagtgtataggaaaaggtataaattcaatacaagttgggaaattagcacctagataagactagagggtctggccctcagttttgtaggctcaaaaatgtttttttaatatacatagctgtcagttggaagcggattgacttaaattcacaagagctactttatgaataatcaaatggtgggttttggctgggcgccgtggctcatgctataatcccagcattttgggaggccaaggcaggaggatcacttgagtctaggagtttgagaccagcctgggcaacagtgagacctcatctctatgaaaaataaaattagccaggcgtagtggcgcatgcctatagtcccaaccactcgagaggctgagatgggaggatcgtttgggcctaggaggtcgaggctgtagtgaaccaaggttacgccactgcattccagcctgggcaacagagcaagaccccatctcgccagtcatgagtttcctaactagggaagaaaaatatgacctctctcccaagcaaacctgttgggaagcctgattaccaacagagcaggctgcttccctgttgtgtgtccctgcactttccagatcctgacctgcagcacgtggataatgactcatttatttactatttccccagaagatggtatgtctcatgaggacagggacttggtcctttttcctgctgtacactaggggctggcatggtcactgagtcactggtgcacggttggtgctcagtaatgtgtctgatggaagagggtgagatgatcagtgccagcggtggtgtcgtgtgctgcagcctgatgcagccctttccaccacacttgccccacagattatcattctgggaaggtctagagcttcctgttacatgttagaatgaaatgtttggactttgggaggccgaggcgggtggatcacttgaggccaggggtttgaaaccagcctggccaacatggtgaaactccatctctactgaaaaaaaaaaaacaaaacaccaaaattagccagcgtggtggcggacacctgtaattccagccactcgggagtctgaggcaggagaattgcttgaaccagggaggtgaaggttgcagtgagccaagatcgcaccactgtactccaacctgggcgacagaatgagactgtctcaaaaaaaaaaaaaagaaaagaaaagaaaaaaaaaatatttgggatcaggagtctgaaagtcagtaaaagcatgaattgagtgcctagtctatacagagccctttgctaggaacactgttactgggttggtcccttttgaagactccattttccaaaatgcactaaacattgcattcttcccagtgtaaacatgagtgagcccattgtagaaccgaaatcatcccaagggccagaattcagtggtgaatctctcagcatatatgagtccgattgagctctggataggaatgagggctgtgtctttggagcactccccacatgctcccacagaggaggggcctatcctgctcagggaggggatgttgtgtcagggtgacttcccggcagcactatgtagacttggtgattcagcccaaaggcacttgcaggactctaaacactgagggcctgagttggcagtagcagttaactggctcacgctgctgaaagccaaggctggcagggccacgattgagcctggcgcctagaagccatcatctggttcagaaatgggcccagtacattgttgttgctgttgacacaaaagcagccttgttgtgactccttacaaacccatccagactgatgggcctgggccagggccctgacagcactctttacaccaaccaggaggcaggaagccaaattactaaagataaatgtttgtcattcagtgacccaagggagatttaaatggatttccaaaacacgaaccaccttggatcccagtgattgtcctgaggttttgccatgaattggccctcagttaggggctaagggtagctggaaagacggtttgcagttgccaagcacagaatgttcttcagatagagggctcctagggacaggaggaatttgctctggttgagttttgaactgagccctttactgccccgagggggcaaagggtgaggctcacagctgtgctcttctttcaggcgaagtggtgaacacccatggccccgtggagcctgacaaggacaatatccgccaggagccctacaccctgccccagggcttcacctgggatgctttggacctgggcgatcgtggtgtggtgagtgggccctcagaaggttacacctgcgggtaggagccactttcacagtaagccctgcagtctcacctagactacgtttactcgagccctagagagctgagccaaggaggtctgaacagactcccgtctgtaacttcctggggcatggccaagactccacataaatagctcttagcttttctggcaggttggaagttaacctctgtaggtccccgatgtggatacctgtttttcatt

SEQ ID NO: 810 - DNA, 1687 bp, Homo sapiens
  source 1..1687: mol_type = other DNA
aggggtgagcaagccccagacggtatctcctggatgccagtgagcggctgagagctgaagctccctggacactcaaggctcttgtggtgacaggtgaggggactgggtggaaggacagtgctctgagcatgcaccttccttgggatctggaggctgggctgttttttatgcttggctcttatgccacttcagcaacctaaaaacttacaataaagctggagggagcctttcctgaaacttgtgttggacagagaatttttgcgatgtatggtccctggagaaggacaaaagggttgcacgtgtggcctgcctgaggtaggtgccccctcaatgcacggagaagctgagagagccagaaaaaggaaacagaaaaaggaagagcggtgggtagttcatctaccagggctttatagaaggcatcttattcaatcttcaaaacaactctagaaggcaggttttcttctcccctgttctatagttgaagaaatggaggctcagagaggttaagtgacatgcctaaggtcacacagctagaaagggatggaaccagattccaatgcaggtctttctgaccctaccttctcccagtggcagaggcctgcttcctcatgggcaaacgcggaaagacacacccttgagcaggtctccctgttcctgcaaggctgggagccatgcaggcactcacatgattttctctctcttccccagtctgacgtaaaggcgtgcagggaggcctagctctgtctcctggacttagagatttcagacacagaagtctgtccatggctccttgtcacatccgcaaataccaggagagcgaccgccagtgggttgtgggcttgctctcccgggggatggccgagcatgccccagccaccttccggcaattgctgaagctgcctcgaaccctcatactcttacttggggggcccctcgccctactcctggtctctggatcctggcttctagccctcgtgttcagcatcagcctcttccctgccctgtggttccttgccaaaaaaccctggacggagtatgtggacatgacattgtgcacagacatgtctgacattaccaaatcctacctgagtgagcgtggctcctgcttctgggtggctgagtctgaagagaaggtggtgggcatggtaggagctctgcctgttgatgatcccaccttgagggagaagcggttgcagctgtttcatctctttgtggacagtgagcaccgtcgtcaggggatagcaaaagccctggtcaggactgtcctccagtttgcccgggaccagggctacagtgaagttatcctggacaccggcaccatccagctctctgctatggccctctaccagagcatgggcttcaagaagacgggccagtccttcttctgtgtgtgggccaggctagtggctcttcatacagttcatttcatctaccacctcccttcttctaaggtagggagtctgtgatctctttctgtgtgtattggtcagaatagaatccattcagctgtagcagcaagcaatccccaacctttcactgcaatgacctttcaatgcaataaaagcttattgtccattcacatctgagtcccatgtgattgcttgtggggtagcttctgggtttctgcttcattcagtctttttgattcccatctgtttcatttttctagtgccagcataatgttgca

SEQ ID NO: 811 - DNA, 13047 bp, Homo sapiens; identical to SEQ ID NO: 675
  source 1..13047: mol_type = other DNA

SEQ ID NO: 812 - DNA, 32744 bp, Homo sapiens
  source 1..32744: mol_type = other DNA
acacattctgctcaaataaagcctaggccaaactgcacaaatcaggtagtctctttatgtcattgcttgttctctggttataaatgtagctcacctcatcggaggtgggggcattctgaaccatcttcagtgtagagggctgcttggttctagaatccttttcttgctcaaataaagtttgttaaatttaatttaacttggacttttctttaacagattgacccagtcgacaggatctgaacttccagtgaccatcccaggaacagaaagcaactgtgtaagtgccctccagggcccattgagcccagggatctcttttctgggcctgaattgctgggtgagcctctctctgggattctaacttccacttattttgtgttctgagctctccacgtttatctcagcgacctttgttcctttttctctctctccttttttttttctttcttttttctcctgttttactgaattggatttcacttaagaggccaggcatctgattaagttagagtctgaacagggttcaaaatcaaattggattcaacagttaactagattggatccagttaaaggccttggggtaggtaattttgatcttttcggcatttgaatccagggttttgtgcttgagagagcatttgagaatcatgacagaaacaggacccagtcctacagggaggcctcagtctgactgggtcagacagaactcaactgggctctgtagataggtagagttagcctttctaaaggtaatctaaaattaaagtggccacagtggtgacatttaatttggacagaattgtttacttgtgaggcatattcagaaaaaacagagatcagaaccacccccccaaaatactgggatgtattttttaattggtactgggaggcacgcaaaagactaaattaatccaaattgcctccttaaaagatttctttgcaaaaggcaaacaaaaagcttaagcaacagactaaggacatgaagaaagaggggtgcagtttgaccgaattaaccctgttttgcttcctacatgtttttacctcaagtttctgaatctgttaaccttttggctcaattacctttttgccagaaagagctaggaggaattgttgaaaacctcttacatttaattcctaatagctaaggtatttctgcacaaacaaaacaaaaaaacctccaaaagaaaacaaaacaaaacaaaaaaaaccacacctgattggtctgttacacaattctgcagacaaaaggacaaaccagactgcagagtttatttagaaacattgtggaacattctgagctagaaacgcaacaaggagtatttcctttagggactgaaacagtattaacttatagcctgcaattagacccagtagctaagccataacctaattacttaaaagtaagtagcagtggttgccaaactggtagcgatcttctctgaggtagtttagggaaaaatttttcttgcatgttccacatgctatggaaagcctcttgaattccattctaactcactgtctttcagcaaacagactaacatcttatgaaattcttcttttgtcttctaagcatcatttaaaacactgaaatatacttaatcctcctgctctactacctctaaggacaacagtgaaaactgcccttgtgtgagtgtagcgtcacaagtaacaaccacttgtgttgatttataagattctccattagctaatcgggagttaatgctttgtgttaatgggtcttaagccaaacactagaagaagagaatagcaggcagtgtatgctgttacaatagaaacttttaagctccacatgttttataagactgttgacatttaactgcttctacctcccgacatgccactttcctcaactttagcttttcaaactgacttctgatcacactgcttcatcaaaacgcctgctgggaaagtcaccagtgaccttctgatcactagctgggttgattctttctccatccctgtccaccatataatttgtccttgccgccaggcttgtcacttattctccctcatgcaatccatgtaccagtcaaaactaatacatgctatttcccctggcctgtgcccatgctgtttctctgtgcaggccaccctttactctggtggttcaaattctaccaataccttggctcagctcagtggtaaactaggactcttaacactcagccttttattatcattattcggataaacatcttaattctgttataaaattaactccttgaaagattatagcttattaatctctacatctttcatggtttgtatttaatacactgctgtgcacataattactgtttaatacatatttgagacattgacttcaatttaattgaatttctagacggagcaaattatacccccaaagaacttgagtggatgcttcaaggtcacctgccagggagactttctaaaacgagctgttgtatctgaaaagtgcctctgagcagtgcccctgtagaagaacaaaagcatgtgaggctagacgcacacattttatcatcctcagtccgttctcatggggagcccaggacctctcttcaggggcgagtcttccatggtgttttattgtcaggcagagaacagtgctactgctgctgtagatttctctgactgggctctcctggctgtgacctgttagagcacacgtgcacacagagatgcacacacacacacacacacacacacacacacaatgatcatgtgcacagcacaggatatgagcagaaatacatcacatttctttgatccttattgcagtcaaggcacatgggtgcagctgcaacttgaactttagaatcagggtgtctcgttcctcgaatgagttcatactatctagcattttcattcttgccatctgtcttctacaataggtccctcttgttttccacctcatggaatgaatgttcttttatcatcctgtttattaaaaaacctccaacatatcactacacagaggaaaagcaaggctgttgtggatactcatgtgcttatgctgtgcacctacattcagccccagagccacataaagggctttctaataactgggatggcaattgcagatggccaacattataacactgaggcacagaaaatagtctcacctcttcccagtacttaggagcccagcgtggatagtggagagtgcacattccacatcttggttctgacactttcttgttgtatagtcttgtttcttcaccaatagaatgggtataagattatgtacctcatagatttgttgtgattatttaaacatatagcttcctaatccaatgcctggtccctaatgggtggttccttttaacaagcaaatattctcgactaccccataacatcagagaatagccttgaaacaatgttattgacattttaaaaatcaaacaatatgcaccccatattatagttatagtttcattgcaattacttaaaggagtgaatagacagactcaccttcatatccacttttaatctaactgagaatatctcaagacagtctattgagatggataaagtaagaaacagagacagagcttgttgatgtgtgtgtgagtcatcctccttgtgaggttctgtgtgtgatgaatggctcactggcgccctagggtcactaagaagagagaaaaagatgattagaagaaacggaacattttgcaataaaataaattgctatcaatatctgagcaagtgtatgactagattagccacatgaatgtctgtttcccagggtgagggaaaagctgtgaggcaaggctgttcagtgactggacttatatccaccatcactgattacaacattctcagcaagccgtatttcatctggacacattcagtccctgcccttgctaatgaagattaaacacatcattattttagctttccactcattcactgatgtcccttccagaagtcacctcaccccttaatttcctcctctgtaaagtaaagttcctactgttttctagctaccttcataaagatattcaaggatggctggaaaattcttaagttgtcagaggaaggcaccacaggtcaaatcccattaaaaacacatacagaaaagtattacattttctccatcataatggaccttcaacttaacaaataattcaaaatccggaggagtcctcacgccctggagaacccagctttagagggcggttattgtgatttttccctgtaataataatatttatttatttgtgtagcagtggtagcaagcataagaatagcaagcatcacgtaaggagtcgggaaacccagggttttttctagctctataactctgggcaaacctcagcacacaagcctaagccccatcttttacagaaaaggattggctctataacccttttacctcccaaatgcgaactctcatgcttatatagcactaagaagagtgagagaaaacatacacagtcctcaaagggtttacggtctccccacacctctgggcaacacaatctcagaacaagtatgtacaacgctgtgttgatcttcttatattcctgctgcctggttttattaagttcaatatttctgtatcatattcatgattccttaatttttttgtagagagttttagttttctaaaatatttatttataattgacaaataatagtccacatttatggggtacagtgtgatgttttgatctatgtatacattgtagaaagagtcaatcaaggtaattaacatatctatcaccttattgctttttttttggtgtgatgagaatgttaaaaatctattctttttagcaattatgaaatatacattattattaattatggtcaaaatgcagtgcaaccaatcactaaatctgattcctccagtctaacagagacttcgtaccctttgatcaacatctttccattccccatccctcctcctctcccctagctactggtaatccctctatactttttgtttctatgagatcacattttttctgagtccacaaacaagtaagattatacagtatttgtttccatgactggcttatttcacttagcacagtgttctccagctccatctatgttgtcacaaatgacaaaagttccttctttttcaaggctatatagtattccattgtgtaatatagtatgttttctttatccatactatcattgatgaccacttatgttgcttccatatcttggctattgtgaataatgctgaaatgaacatgggagtacagacatctcttcaacataccaacttcaattcctttaaatatatatccagagtgcaattcctgggtcatatggtaattatatttttagtttttttgaggaaacttcatactttttcccaaaatgactgtactaatttatgttcccaacagcatacaagggtttcctattctccagatccttgctaacacttatcattcctcttttggataatagctattttaacagatgtaaggcaatatctcattgtgttttaaatttacatttccctgatgattaaagattctgagcatttttcatgtatctgttagccattcctttctgttattttgagaaatgcctgttcagatcctttgcccatttttaatcatgttgtttgttttcttgctcttgagttgtttgagttccttatatattttgaatattagttgcttatcagatgtatggcttgtgaatattttctccccatccgtgggtggtctgttacttctgttaattgtttcttttgccgtgcagaagtttctgagttgaatgtgatcccaatttgtccacttttgctcttgtggcctgtgcttttggagtcctgtccaagaaatcttgcccacaccaatgtcatggagagtatcctcaatttgattttcacagtattgaacattaactgtgtagtgtcacagtttcaggtcttacgtttaagtattttattcattttgagttgacttctgcatatgagtgtgagataagtatatccacatgtagaagaatgccatttattaaaatgactgttttttcccaatttgtgttcctggcacatttgtcaaatatcaattggccataaacacttcgggttatttctgggcattctattgtgtttcattggttgaggcgtctgtttttatgccagtgccatgctgtttttttgttttgttttgtttttacaatacattcataatatttttgaaatcaggaaatgtgatgccttctactttgttctttttgctcaagattgttttggctattcagggtctttgtggttccatatgcatgttaggattttttttctatttttataaaaaaataacattgaaattttaaaaggagttgtattgagtctgtaaatcattgctttgggtattatggatagtttaacaattctaattttttcaatccataaacacagaatatctttccatttattgtgtcatcttcaatttctttaatcaatgttttatagcttttagtgtagagatctttcacctccttggttaaatttactcttaagtattttttctgatgctattgtgaatgagattatttttaaaatttcttttccagatagtttgttattagtgtacagaaacactactgatttttgcatgttgattttataacttgcatcttattgaattgatcacttttaacagtttttttggtgaaatctttagggttttgtatatgtaagattatatcaacagacagtctcatttattccttcctcatctgtctcttcccaatgaaaaagaattaacgctcagaattacagtatcttttcttgttccctcttttacctatcccactatattccaagaatagtaaatattaaaagacattgaataggttttggaatatacaatgaattaacttagatttgatctttgatattaacccacaagttttatttatatagttatatgagcattagtcagacttatcctctaagtcctaaaattttgtgtttaaaaattgtaaaatttacaaacaattgcttctgacgtaagaatgggaaaattgctttatttttataagtcctgaattcccagcttatattcatttggtgtcactgtcattacccataaatactactaggtattacatgaaattccattgtatacaataatgggttagtgtttttacctcattttagaaatgaggatatatgtgttaatgataaatgcagtgggaggaaagacattcgtatcccactgtcctaaagccaaacaataatgtttatgttgacctttcagatttgctcatcattttccttagctggaatcagaagaatagaagtcttagttttcagttttagattacgcaggttgcaactttattaacatgtgtatcgttgtccaggagaatccaaaaggcagcttagaagacggatgtttctaattatctgagtgactttgggcaccttttatttaatgtagccttaaggacccttccagttttgaggttatcttagcttttgattttcacagtattgaacacatgggattaagattcagtgagaaacagctgagtcagctattaactttctctcttcttacatcctccctggattttctaacaaatggtgcaattaatctaacgtagctaaaaggcattattaggtcacatgattggagtcatgggacagagggagggagatgggaaatggcaagtgctagctgacactgcagggaagaaataacaccactagaggcaaacttaagagcaggagatgcaagaactcacactgtatgtttctaggaacctctgtttagcaactgttttgcatatttttctggatttgtagctacttgacagaaaataatcagtggtgacttcttagacagcattccttctggtcaagctggtcttcagaatattaagctactgaacataagtcaaaagagaataaaagtttagtgtggattttcttgtatattaaaatgtgtggctttgatatactattttatttctgggctgagttagaatcaacttgataacaaaacagacatctcttcactcacagaacctggattgaggttctatttttgggtcttcactggaagttttgctactttggccaggatgtgtagacagcagagaattacagtgctcagtgagatgtgagctatagctgaagagctcatgaatcaagttttcctagtgaaaattatcactgttctttccatttaagtcacagatgaatagaattgcaaggctttcagcaaatccataatgtggacaattgagtcatattcctttgagagaggaaggagtagataaaatatcaggactgtaaccagtttccctaacagatgagtgagtgttaggagaaggaatgccgggttttgaacagagacttctatgggctccattcagtttcctctctgttcaaattctagagtttagctgacaagcttttcaagtctaataccacttactcctctagatttgtcttttcaccttacgcttcaacctcactaaacaacaagtgttctcctccaaacactacaaatccttctctatagaatacctttcctcaacagtttcaacttgtccttcttgttcctgcgtgcctttaattagtcaacatttatccctctatattccactgtatgcccggccttctctcttgtcctcttcctcactctgtcctggccaatttgttcttacatctctccatctactgcacagtatttgcctgatatttggtgtctgttccttgcctaaaacattgggaaaatctccatggtggggattgtgtcttagtcgtttggcacatccagttccaggacactcttcatatcctcaatgtggtaatactacataatcattcacttgataatagcagcagataaggtgaaaaggtagatagggaagagagagaatgaaataactgattttagggaattggtctaaggtagaattgaaattttggagcattttctatggccactcaaattagtagcatcctcttgagaaccttggttttgaagcaccagcctggaagtggcatgcatcaccttcacttttttccacttgtctcagtgtcagctggaagctttttgatgtgctacagcaaaaggctaagaaatggcgtattgaaatgagcacagaaagaagggcagaactgattttggtgcatgattagcagtccctgctggagtctgcagaccccaggaaaatcgtacatgtgttctcaaatgtctataagggatcaagtttcagaggcgtgggagacagaatcagagcataaagcatacttctttagtcaatcatagtactagggccctagggatagatctacacatgtgctatcacaaaccaaatcaaagcaaatatttattttgcactcatatgcatggcattgtgtttagcctcatgaaagacacacagaaacacaaggaaggcactgtttctgcctgcctctaatgatttgcagtgtagaaagattaaatcttaagcaactttacaagatatacaaagaataatagaggagatgtcataaggcaacaataactaatggcccaaattacagactaggcagagccggggcatagtaagaagtcagaggagggagtatgctatgcagtaggggtcaggtaagatttaaagaaaagtactgaggcatgaaagacaaggtgtgtagataagcaaggaaggagaattgggggagctagagggaactcattgaaaccccaaaaatcattgaggaccaccagttgcaaggttctggaccaagcctgggtgggcttgatgagtggacttgattctgacatcagggtggtgttgagttaggaaaattagtgctagagttggatttcacacttagatgaagggaaaatgaattttgtcaagggggatgctatttgactagggtctgaggggttgagaaatggtttttgcagtccaaaagtacagatggagcaaatgcaagcaggtatgaagcctatagtggatttgggaaggagaaacaaagaaacaaagatctattgagcacctgctctgctccagtattttgttgaggatttttgaatctatgttcattaggaatgtttgcctgtaattttcttttcttgtagtgtccttatttggctttgatactagaataatgctggcctcataaaatgagtttgagttctattgcacaatatggtgacaatttatattaagatatgatatagtacaaaatatctaaaacagaggcttttgaatgttctcaccataaagaaataataagtgcatgaggtaatggtaacactaaatacccttatttggtcattatacaacatatatatattaaaacatcaagttatacctcataaatatatgtaattataatgtatcagtttttaaaaatgaggtggctgggaatagtggatttatttctggattctttgttctgctccattagtctgtgtgtctgttcttatgccaataccatgctgctttggttgctatagctttatagtataatttgagacagctaatgtgatgcttctagttatattctttttggtctggattgctttagctattcagggtcttttgtagttctatacacattttagaattttttttctatttctgtgaagtatgtcattggtattttgataggaatgcattgaatctgtacttactttgagtagtatggccattttaagaatattaatttttccaatccattagcatgggatatctttccattttttgggtcctcttcagtttccttcatcaatgttttatattttccttgtggagatttttcatttctttgattaaacttatgcctaaaaatttaaaaagtagctattcagtaggattcaatgggattgctttctcaatttctaagatttttttgcaattggctattggctgagtacagattcaacgcaatccctatcaaaataaccatgacattcttcacagaaatagaaaaaaaatagagatgctatggatttttaaatgttgattttgcatcttgcaacttgagtgaatttatcaatttgaacagttttttgtggagtccttacgtttttctaaatataacaccatgtcatctgtaaacagggataatctgacttctttctttccagttgagatgccctttatttctttctcttgtctgattactctggctacaacttctagtactattaatatgtataaaagtggtaaaagtggtgaaagtgggcatacttgtcttgttccagatcttagggcataggctttaatttttctccatttggtatgatgttagctgcgggttgtcatatatagcctttattgttgtgagatattttccttccatatccagtttgttgagacatttcaccatgaagggacgttgtattttatgaaatgtttccgcttcagtcaggtagtggtgaagcaggccaggacttgttttcctccagttggggcagtggattctcctctgtcccagggaaggtctaaattctccctctctaggtttggaatcaggcactgtgggggctctgcctgtgctgtgttgcaccgtggcaggcctgactctaaattccaatacaaattcccatacccacttcccattcccttccccaagcaggaattgtctctctcctctctatggtgcctggcattgaggagaggtggttttggcaatgagtgattatccttcttaccttcttcagtgtgtatctcttcttgttattatgctaaaaccaggtactgtgatagctcacctgatttctttagctcttttgaaggtgtcttcttgcaaggatagttgttccatttgatgttcctgtggggggtgattgacagaaggcctgttcagctattttgctccccatatttgaaactcagcatttctttaatattccaatgtatcagtctttttttataattaatgccttttatgttttatacatactattagtgcattttgtgtacaaattttcttatagcccaaggtcatgaagattttctgcactgatgtttattggaagctttattgttttaccttttacttttaggtctacaatccacctaggattgatttttgcttatggtgtgagctatagattgcttcgtttttaaaaagaaactcttttcactgctttgcagtgtcatatttgtcatgaatttggtgtccacatgagtgggtcatttctgagctctctattatttccttagcctatttttcaatcttgatttctagaactaactaagtcatgttttctagcagagtaattctccccacattgttcttctctaagactgtctcactatttttgactatttgcattttaatattcatgttaaaattaactcatcaattttcactcaaaaagtgttgggatttagatggggatttcattgaacatactgataaacttaggaataaattacatgttttcattaatttctatctaatcttcatttatttaggactttaaaaatgtctctaaataatgtctaatcattttctgcataaagatcttatgcacctattattagatttattactatttatttgaagttgtttatgctattataaagtctgttttaaattaatttttgtcttagtctattttgtgctgctataacagaataacacagatggagtaatttataaacagaaatgtattggctcatagttctgaggactgggaagactaaggtcaatgcaccaaccagaggggagaagaacgctgactcctcatgtggtggaaggtgaaaaggaccaagagagagcccactcttgaaagccctttttacgattgcattaatccattcataagtgctctgccatcatgatgtaaacacctcccatcaagccccacctctcaatactgtttgcattgcaaatttcaacatcagttggggaaggggacaaacattcaaaccattttaaaccacagcattctggctgtggtcccccaaaactcacgtcctcgcatataaaatacattaattctttctcaatagtcccggtaagtccaaagtccagagtcccatctaaatggaagaaaatttgcagaattaggagtttgtaggcagatattcagaagaagccggcagaagaagttccttacccatgtagtgtcttaaaggccattagagataaatagccctgaggagtcagaagaatcttcctagattaatggttcatcattttctgtgttcccttacagaacggaagatatgggtgagactgaagcatggttcatcctgagacgaatcccctcccacaataaacctatgaaatcaaactatttatttatatgtttccagaatacagtggtgggacaggcacaggatagacattcctattctaaaagggaggaataggcaagaagaaaggggtagcaggtttcaagtcccaaagccaatagggccttacatcttaaggcttggaaaaaaatcttgactctatggcctgcctttcagacacacttgggttgacctcccaaggcctcagacaaccctgcccctatgactttgctgggttcagcccacacagcatctctcatgagttggagtctcatgcctgtgctctcccaggctggcagtgtatactagtggctctatgctttcagggtcccggggcggggtggtgggggggtccctgttcccattgcttcactaggcattaccttgatgaagactctctgtggtggccccacccctgtgacaagtctctgcctgggccccatgacttgccataacatcctttgaagtcttgttgaagaaattcatgcctcctcagctctggcactatgtgagcctgcagaattagaaccacatagatgcctcgaaggtttacaatctgccttctggaagactaggtgtggccaaggagagttgcattagaatgcatggatcagagtcctgagacagccctgatagagagcagcccacggagggcgccctgggcccatcatccaaaacccttctgcccacaaagccctaaagctctgggcctgtgattagaggggcagccttgaagacctccaaaatgcctttgggatcattctcccactttcttgatgagtaacacttggctttcttttatccatttaatctacaaattactggaattaatcagtgtaattagcaaggttgttgaatatgaggtcaatacataataatcaagaataacaataattaacagcattttaagtaatgctattatttgaatgtttgtcccttcccaaattcatgttgaaacaatctcccatccaacagtagtgggaggcagggcctaacaagaggtgtttaggtcatgaggcctctccagtctatgaatggattaatgctgttgcaaacagagctttcaagagtgggctttctctcttggcccttccactttctgccatatgtggatcctgcattctacttccctctagaacatttcaccagtttttgcgtgcactcatttttctaatgcatgcttgtgcaaaattctatgacattttatcaaatgtacagtgatatttgactagtaagcttatctcaaattcctggaataaattcaacttggttgtgggctgctatcttttttagttgttgctggcaaatctaaacattggttaaacaaatgtttaaatgttatttttttcaggtttcaggagtgcttgtttcggtttcaggagtgcttgtttcagtttcaggagtgattgttctgtaatttttccttcgggaatgtccgtatcaagtttgtgtaccgacattagattaacttcataaaagaagttaggggaagagttcttattttttctattctcttgaaaagtttataaaagttttgtaaatatttagtacaattcgccagcaaagccatctaggccggatgttctgtttgtgtgaattttttaaatttatagattccattcctttaatagtttcaggattatttagaatttctatttttcttgtgacagttttatgcattatattttttcagaaatgtgttaagtttaccaaaattttcaaacttattgccataatactggtcataatgtggtgtaattttgttttttactgcttctgagtctgtgacaatattccccttttcaatcctatattgttggtctttgtgcgttccctctctgtatctgtcttttggtcagtctcatcagggtttatccatattactagtctttaaaaacaaaacaaatcttaatgttgttgttttctttttcataatttccactatctttattcttttcattcattcttcttttaaaattccttgggtttaattcacaactttcttattcatttcttgagctagatattttagatctttatttttcaccctttctacttttcttacgtatgcttaaaattcatataaatgcatataaattattcctttaagtattgcttcggctatgtccccaaaatttgatatgttacattttgttatactttcaaaatattttctatttttatcatggtttcttctttgatccttggcttagttataagtgtcctcctaaatttacaaatatttagaaagtttaagtcctctttttgttattggtttctagtttaattgcgttgtagtcaaagcacacagtacgtatgatttcaaccctttggaactggttaacacttgcgttacacgtttgggaacatttgtattttaatgtttttgggtgaagttttctacatatgttcatgagagtcaagtttgttagccatgttttaaaaaaaatctattcatactgattttttgtgctttgattttattagctagtagaagataggcattgaaatttcccattatgattataggtttgtctacttcttcccgtagttctttttcatttatcttgatgttttactgtatgattgtacatctagaattttataattccaaatgaattaatgtcattatgaagtgctcctcttaattctcataatgcttttatctcagtgactagcttgcatgatactggtgtaggtacaccatctttctttttttcttgttgttgttaatgttttcactcttttcctttcaagcctcctgttttcttgtgtttaatatcgctacacatatgtaagtagcatatagttgtttttgaaaaatctaatttggcaatatttattttgtaaatgctttaacacaattgctgatattttaggtttatacctatcgtcttattgtatttttattttcccatatgtacttgattcatttttgcttttagaacagttgaatatcttttattattccttttcttttctccattgtttggaagtttttcctgtcttatcatccttccagtgattgctttacagatcgcaacatgccccttcccttaacaaagctgaaaattaattgctaaaaattgacaaatgggaactaattaatctaaagagctttcgcacagcaaaagaaactatcaatagtgtaaacagacaacctacagaatgagagaaaatatttgcaaggagagcagaagaaactcgaggagctaaaagtgaaagctgcagggaaggggcccctggctagaggtcaaattaagaaatctggcaaaaagtaagctgttccttgtgcctgaggagttggtgactcttgatttcatttgtacttaaacacctgtattccccgccataacatcttttgccacctatagctggaatgaagtgttgtctcggaactggtgtaaatataagaataaacttttgtactaaaaaaaccacaatgatataccatctgacaccggtcactgtggttattattaaaacattaaaaaataacacatgctggcgaggctgtggagaaaaggaaacacttatacactgctggtaggagtgtaaatcagttcagccactgtggaaaacagtgtggtgcttccttaaagacctaaaacagcatttccattgacccagcaatcccattactgggtatatacccaaaggaatataaattgctctaccataaagacacatgcatatgtatgttcattgcagcactattcacaatagcaaagacatggaattaacctaaatgcccatcaatggcggactggcttttaaaaatgtgtatgtggtacatatacaccctggaatactacgcagccataaaaaagaataagatcatgtcctctgcagcaacgtggatgcaactggagaccattatccttagcaaactaatgcaggaacagaaaaccaaatacagctgttcccacttataagtgggaattaaatgatgagaacacatggacacgaagaagggaataacacacactggggcctacttgagggtggagggtgggagaaaaaaacgggataaggaaaaatacctgtagggtactatgcatattacccgggtgatgaaataatctgtacaccaaacccgtgtgacatgagtttacctatataacaaacctgcgcatatgccccggaacctaaaagtttaacagatcctgaaagaaactgctacttttaatccatttattccctctcaatttgtatgctattatcttgtatcttaaacacacacacacacacacacacacacacacacacacacacacacttttatgccacatgagacagcactattgttttgtggctccatttttataaagctatgttgtcttcttcaaaaaagttaaaattcatctttacataatacagactagatctagaaattaatatacttttactctttgtacctgagcaaaacagaacactagaaataaaggacgctaaatagcataatagaaagtctgtatgtatgtgatttcacaagtaaacaattagacacatccctgaaaacactgtaactgtaagaaagcaacattttttcttctgatgtctgcccaagcccaccttccggaatccattcattaaacagctttatgtcaactttgacttcctccagttatctctgacactaatgacgaaatttttctttgacttttatcaaggtaaaattcattttaagaaatgaccactgatttgtttaagatattccagcatgggggaggagggcaaaatatacatttataaatgaataagtcttagttataactttattagcttttgactcaagtttaagtcaaaaaaagttgattttatcaacttttattaaaattgggaaataggcatgtggcatttgattatacatatctttatttttgtgtatgtttgaatttttctttaatataaagtaaaaaatagtggcttttttagttttttagcttttttaaatgaaatttaattttttaattgatatgtaatagatatacctacttttagaaaaacatcaggccgggcgtggtggctcatacctgtaatctcagcacctgggaggctgaggcgggtggatcatgaggttaggagttcaagaccagcctggccaacatgatgaaaccccgtctctactaaaactacaaaaattagccaggtgtggtggtgaacacctataaccccagctactcaggaggctgaggcaggagaatcacttgaacccgagaggtggagactgcagtgagcccagattgtcccactgcactccagcctgggtgacagagagagactccgactcaaaaaaaaaaaaaaaaaagaaagaaagaaagaaagaaaatcagtgtattttttgcctatcacatctgcagagtatttgtcccttacttagagatctcagtaagaaatatttattacaacacataaaatgcattattcactcatcaaagttgtcagataatttgctacagtttttttccttgggtagcattaggggttccttgaggatttcaaacttgaaaaacacatgttttatggcagcaattttattcactttattattttttccaacttttccctcccttcctctcataataacgtttattgatcaggcactgtgctagctactttatgtttgtaatctgctttaatcattcctgcaaggtagcaggtatcagcacctctcatttggagagtagtacgagatgggaaaagagagcaatactctgggggaggcatatcagataacagtgtagtttgaaaaagcacgtgtaataatataataaaaacggtcacacaacatagagttgatcaaatattcactactagtaggaatatactaaagacatatttttctaccccagacattagaatctcaaggggagtgggaagtgattatttgaaaagttgatcagtttttataggtagaaggcttttgtttatttactttgcgatgtggttgtttcttgccttttctctccgaattcccttgcagtatgggctggttacactgtgttccacctgcatgatgactgtgaagcttagaagtcacagagttctgtggttgttgtttaggatcactgttatgtagtattgacatttgattattattttgtgacaagagtctcactctgttacccaggctggagtgcaatggcatgatcttggatcactacagcctccacctcctgggttcaagcgattctcctgcctcagcctcctgagtagctgggactacatgcacgtgccaccacacctggctaatttttgtatttatagtagagatcggttttcaccatgttcgccaggctggtctcgaactcctgaccacaagggatctgtccaccttggcctcccaaagtgctgggattacaggtgtgagccaccacacccagcctgctattgacattttatattctaatatatgtgttttaatttaattcagctcttataagaacctgatgagtgagatgatcttaatcccattatacatagaacaaaatggagatgctagaggtaacttgcccacatttactatccaggctactgttgtaagtttaattaagtgcttcagaactttttctgttcactcctgtgtgaaagtgtgtgtccttgggctgtatgtctcatgcagagcataatttcagaggaggcggtattcactgatgaagtcctgggcagctttgaacacagcctagagtatttaaattgtggccacacacagtgtgacatcactctagtgatcatctttgaactgaatgagaagagtgtttcctctttaccctacatgcattcattttcatgtttattagcccaggcgaaaaactttcctgaggactgactctgaaaaccgatttaatacttctttcagctgctttcctctttcagctgtggacctagaagccatgagcagctgctctccaggacgtggtggtgatacccactgctgaaatagcatgtggagcactgatgcaggaggccagttttatgccttctgtcttggacaaagaaagcaagctggccctgacatccagttgtcatactttaagaataaaaaataaataagtaaatatatagataggtaataaacagggccaggcatggtgactcatgcctgtaatcccagcgctttgggaggccgaggtgggtggataacctgagatcaggagttccagaccagcctggccaacacagtgaaaccccatctctactaaaaatacaaaaattagctgggtgtggtggcacatgcctgtaatcccagctacacgggaggctgaggcaggagaatctcttgaaccaggaggcagagtctgcagtgagctgagatcacaccactgtgcttctgctgagtgacagagcaagactgtccaaaaaaaaaagaaaaaaaagaaaaaaaagataagcaataaatatactgataccctgtataataatacatattttagaactatggatcaaatattaaagtcttccacattcatacaatatccttaattaagatcaggctcaagtgagcatttctgacctgtatgtaattaaatgctgactgaattgaatatgtctacagtatgagaagaacacaacaaaataataggttttatagactgcctttgattttcacttagtggtgtttttagtttaataaaacctctgaagttttttataaaaacttttatgtatacaagcctgtttctttttctaagatttttgcatttcacaagagaaaattccattcttaacattaatgccatccccatcaagctaccaatgactttcttcacagaattggaaaaaactactttaaagttcatatggaaccaaaaaagagcccgcatcgccaagtcaatcctaagccaaaagaacaaagctggaggcatcacgctacctgacttcaaactatactacaaggctacagtaaccaaaacagcatggtactggtaccaaaacagagatatagatcgatggaacagaacagagccctcagaaataacgccgcatatctacaactatctgatctttgacaaacctgagaaaaagcaatggggaaaggattccctatttaataaatggtgctgggaaaactggctagccatatgtagaaagctgaaactggatcccttccttacaccttatacaaaaattaattcaagatggattaaagacttaaacattagacctaaaaccataaaaaccctagaagaagacctaggcattaccatttaggacataggcatgggcaaggacttcatgtctaaaacacaaaaagcaatggcaacaaaagccaaaattgacaaatgggatctaattaaactaaagagcttctgcacagcaaaagaaactaccatcagagtgaacaggcaacctacaaaatgggagaaaattttcgcaacctactcatctgacaaagggctaatatccagaatctacaatgaactcaaacaaatttacaagaaaaaaacaaacaaccccatcaaaaagtgggcaaaggatatgaacagacacttctcaaaagaagacatttatgcagccaacagacacatgaaaaaatgctcatcatcactggccatcacagaaatgcaaatcaaaaccacaatgagataccatctcacaccagttagaatggcgatcattaaaaagtcaggaaactacaggtgctggagcggatggggagaaataggaacacttttccactgttggtgggactgtcaactagttcaaccattgtggaagtcagtgtggcgattcctcagggatctagaactacaaataccatgtgacccagccatcccattactgggtatatacccaatggactataaatcatgctgctataaagacacatgcacacctatgtttattgcggcactatgcacaatagcaaagacttggaaccaacccaaatgtccaacaatgatagactggattaagaaaatgtggcacatatacaccatggaatactatgcagccataaaaaaggatgagttcatgtcctttgtagggacatggatgaaattggaaatcatcattctcagtaaactatcgcaaggacaaaaaaccaaacactgcatgttctcacccatagatgggaattgaacaacgagaacacatggacacaggaaggggaacatcacactctggggactgttgtggggtgggggaaggggggagggatagcattaggagatatacctaatgctaaatgatgagttaatgggtgcagcacaccagcatggcacatgtatacatatgtaactaacctgcacattgtgcacatgtaccctaaaacttaaagtataataataataaaaaataaaataaaataaacaacaacaacaacaaaagattttccagatgttaagatctaatgaattagaatttttttttttttttttttttttttttgagacagggtctctcagtctgttgcccaggttggagtgcagtgatgcaatcacggctcactgtagccttgacctcctgggctcaagcaatcctccacctcagccactcaagtaggtagcaccacaggtgtgtgccaccacacctggctaatttttaaaaatttttttgtagagatggggtttccctgtgttggtcaagctggtctccaactcctgggctcaagtgatgctcacacctcgacctcctgtagctacttgggaggcaaggcaggaagactgcttgagcctgggaggcaggggttgcagtgagctgagatcgtaccactgcactccaacctgggtgagagagtgagactctgtctaaaaaaaaaaatttatatatatatgtatataatctgatatatatatatataatatatatatatatatcacatacttttcaaaaacatacagaaccaggtccttaaagagacagtccttctatcatgtaattcctgtgaaaaacgggatattgtaataatgctacctgtaaacctgctttttttttttttttttttttttcgagatggactttcactcttggggtcacccaggctggagtgcaatggtacgatctcagctcactacaacctccgcctcctgggttcaagcgattctcctgccttagtctcctgagtagctgggatacaggtgcctgccaccacacccagctaatttttgtatttttagtagagacagggtttcatcatgttggccgagctggtcttgaactcctgacctcaggtgatccatctgcctcggcctcccaaagtgctgggattacaggcatgagccaccacacccggcctaaacctgctatttttaaaaacaaaaatatacacggttgcatgcatctccatcacgtcctctttcaaacctgtggatcctgtggcttaagtagacatcctaactgttactggcttgatgtgtagccccctggagccagatccttactggggtatgattagggctgaatggaattgggacaaccggatggccagcctgctttgtgttcactggaggtgggggagtgccgacccactggtgtggcacagcagagcaaggctgaggcttatcacaaaacgtgattattaaccagtagtgcacggagctgcactgggcattttctttgaagagtgactactttagtgatgtgtctgtaggggagagggtgaggtggcatagcctcagtgatttaaatctttttagtcacgtatatgatctctgcctatgatgacaattaggatttctcagattttcttcttactctgatgtttagcaccaggaccaagtcgtatctgttgagtccacttgtgatggtggaggtctgttatctccatatagagagtttaatggccctgtagacacaatataaagcatggcccttgagcaggagacttaaggttggctgggcacggtggctcacacctgtaatcccagtactttgggaggctgaggcaggtgatcacttgaggtcaggggtttgagaccagcctggccaacatggtaaaactctgtctctactaaaaatacaaaaattagccgggcatggtggcaggtacctgcaatcccagctacttgggaggctgaggcaggagaatcgcttgaaccctgggggtggaggttgaagtaagttgagagacgccactgcactccagcctgggcaacagagtgagactctgtcttaaaaaaaaaaaaaaaagaatattcaggcagaggcagcaggaatgtgtatgtttctcttgttggattcatcgtcttctctcccagctaaggagctgcatgggagtaattgtgctggtttctgttagatggatacctgcatgttctcagatggagcagagatcagaccctcttctcactaatacgtcatccaaattgctagcagtttcagcagtggtccagaaaatggtcaaatctctgtttgatgagtaaggtcaaggagtttccccttggagttacaggggatcatctcaagaccaggagcctctgcacaggagacacaagcatcccgtgaacatggaggacaacacatggcttcaaatcatgcttcgccatgtatgcagaatctctctaagatttctgtttcaaattcgcagatcaccacgctagtccctaagggcatagctacttctggttagtgagagtgaaggaggtagaggtcaaaagcatagattgcttccagaactgcagtccctaaacagaatattcaaatagggctaaggagcctcattctaaagtcagaaagtgactgtaatttacctggtaattagatatgctcagaagtaacttctgacttttcccatcaatttctaggctcccttaacacctgtaatagctggacaaaggaagaaagtcgtgctgcccttggtggaagtttggacccatccccagagaactgtatacgcttcctgctttcaaataatatgtgtaatcctatggggtctgactggcagacttacttttttttctgattcaaaatgccattcctgtatattattaaaatttggaaagtacataaagatataaagaaattttaaagcaccacacgatcccactactaagagttagggtctaaaatagtgtggtctgtcctcctgagcttttttctaggtgtaaatgagctagcatcagctgcactcagagcccataaacccaggttcactttcaaagtcgtgttcaggaacttctccttgcattctacctgatggggatcagatcttttcgacctaccagttatacacacacacacataaatacacacactcagaagttcttgatgttagattaaaaaaaaaaagaccctgatggcttgaagaattgacataccacaaaaatgtacgatgcacttttatggggtacacagaggtgaagtttgtcttataaatagatggtggatccaaggattaatttacagaaaaaaagctttggaaacttttaataaatatacagcaatttcaaaacattacactttatacaacttttatttttttttttaatagagacaaggtctcactatgttgcccaggctggtctcaaactcctgatctcaagtgatcctcctgcctcggacctccaaagtgctaggattgcaggcgtgagccaccacacccagccaacttttacaacttttaaagagagaaattacgaaatgtaattaaagttctgaataaatgccccaagaataatgagatcctgaagtctctttcacctgagccttcaaaggcatgaagcacaatgacaaaagtagggatgaacatatgaggaaaaaagaaaaaaaaaataagttgtgcctctataaaagccacccaccaaacacaggacaaacatgaaagtagatgatgacagactaacacttcagtacaaaaagagatgctttataggaccttaaactatctccactcaatatttttcatgaggatgctgtacttattaccgatacatctgactttgttacttctttgcatttctgctgcatttcaatctgagaaagtcataaattcttgaagctcttagtattttttctctcccttctgggaaggttagaaagatgacaatgataaatgcataaataaccagcagggagggaaggtgcatcattacatttagaaacacctgactgtcctagctttttattattttaagaaagaggaaggttattaaaggatattttagaactacagaaaaatcaataataataaaaactagtatctgtatgtgatgttagagttcacaagcactatcatcaatttccatttaattcttgtattagtccgttctcacactgctataaagagtattacccaagagtgggaaattatgaaggaaagaggtttcgttgactcacagctctgcaggcgttaacgggaagcatggctaagaggtctcaggaaacttaaaaccacggcggaaggcaaaagggaagcaggcacctttcacccgatggttttaaagccatcagctctcatgagaactaactcactattatgagaacagcatggggaaaccacctccaagatccatgaaccacccccaggatccaatcacctcctacctggtccctccactgacatgtggagattacagtttgagatgagattgcgttggggactcggtcccaaaccatatcaattcttaagcaattttgtgacacagattttttttattatccccactttataatttactaaactcattgaagtacataaagacatcatacagccatcgggggataactcagtaggcttcttggtctaattctgtgatcctcaaccaggagtgatctctccacctctagcagacatcggcagtgtctggagacatttttggttgttaccactaggtagtgctattggcatctagtgggtgagaccagggatactgctaaacaatgcacacgacagcccgtcacaacaaaggctcatccagtcggagtgtcagtagtgttgagattcagaaacactggtatgttctacactttcattagggtcctgatgaaactcttaaaacttggtgtggcggtttgtctaaacagcatcctttctctcattgttcttgctgtcagaacctcattttattcagggaagggcaccctaatctcagtttaggagtaaatattggttagactagattaatcatggtaatcccatttcctgtcagcagttgattatcagggatgggcatgtgacctggttctgaccaataagacacgaagggggatctgctagagggatgggttctgggaagtatgtttatactttttttttttttttgagatgttgaaattatttttaggaaggctaagaactaaaatcatttatatatgtatgatgagacaacaagggatgccaaaacaatttagaaagaatatacttactaaaattgctagcaaaggcaaaaaataaattaaaaagtaaacccaaaacaaattttagagataccatgccttatagaacttctagaattgatacattttaaatttatggaccatttccttgaattgaaattaacagcagagactttccaatctaggcaaaaaaaaatctgcttttcttcctccagaatcagagaaatcaatgaagtgaaacatgaaagattcatgtgaggtgccctctactgaaagcataaattttgatgcaatcagagaaaaacattatgagagaggatgatcattaagttaatatcttccaattacctacacttgtccctcagggtaagtcactgagttatgaatggtgtttgttcaactacaatagtccttcctaaccacataagattcttaaatccccttctatcagagaataactcttgtagtaaattaggattcctaaagggagtatcaagagctctcagtagtgttgaggttaaatcactctttccagcaataaacactatttctgaaaagtaaaactgaaatcgaacttgtgtcagttaagtgtcattgcaaagttttaaactgtgctcagtgtataaaggttttatttttccccagtagtactgaagtataattgacaaacaaaaattgtatatatttaaggtgtaacatgtgatgttttgacacatatatgcattgtgaaatgattaccataataaagctaagtagcatatccatcacctcacatggtgaccatttccttttgtagtgagaacaccacacagtgaaatggtcacttctgtgggctgcctttttggtgatggaagctcagcttgcagcagatgtgaaagtaaaacaacttgagtaggacttgcaattagagaaaaaaacttttctgagctctatgttcagaagtcagcttaattaaaaagctgatattcaggatatagtgttttctcttttttttggaaaaaaaagggccttctgcttttagtcaactgaaatctcctttaagaccttttttttggcctggtgatgtggctcacgactgtaattccagcactttgggaggccaaggcaggtggattacttgaggtcaggagttcgaaaccagcctgaccaacatagtaaaaccctgtctctactaaaaatacaaacattagccaggtgtggtggcgcacatctatagtctcagctacttgggaggctgagacaggagaatcgtttgaacccaggaggtggagtttgcagtgagccgagactgcaacactgcactccagcctgggcgacaaaacaagaaagactctgtctcaaaaaaaaaaaaaaaaaaaaatttttttgtttggcgcctttcttgttggcgtgatttttgcctctgtaacttgttcttccatttccttccatgcctgttcttccttccttttgccatctttgatatcacacgaaaaaaatctaggggagacgtctagagaccctgagaccccttaaggaacagagaaaaatgtgccatccgtcccctttaaggagtcttctgccttccttgcggagttccaagaatcattggaaggtttgccttcagtctaaagttctgctctctcttgaattgagttccctgaactctttggcttttgggagtagtaccaggaattgctttggactcagagaacatgacctttgagtgtgtgatggctgataagtcactggtgacggctgcagttttggaagtagctcatagcatttacaatgagtggttattacagctgggggctactcgtttctttgtgcatttaggtaagaaaagcatgatctgcaagcaaaaaacaaacagccacattaaaagatgggaaaaggatatgaacagacacttttcaaaagaagacatacacatggccaacaagtatatgaaaaaatgctcaacatcactaatcagagaagtacaaattaaaaccacaatgagataccatcccccaccagtcagaatggctaatattaaaatgtcaaaaagtaacagatgctggtgaggttgtggagaaaaggtaacacttatcaggttgtggagaaaaggtagcactgattcactgctggtgggaatgtaagttagttcagtcactgtagaaaacagcctggtgattgctcaaacaatttaaaacaaaatgaccatttgacccagcaatcctattattgggtgtatacccaaaggaatataaattattctaccataaagacacatgcatgcacgtgttcattgcagcactattcgcaatagcaaagatatggaatcaacctaggtgcccatcaatgatagactggattaaaaaaaaatatacaaaatggaatactatgcagccataaaaaagaacaagatcatgtcctttgcagcaacatggctagagctggaggccattgtcctaagcaaactaacacaggaacagaaaacataataccacatgttctcacttataagttggcactaaacattgagtacacatggacacataaaagggaacaacagacaccgggatctacttaagggtaaagggtgggaggatggtaaggattgaaaaactacctctcaagtactatgcttattacctgggtgatgaactaacctgtacaccaaacccctgtgacgtgtagtttacctatctaacaaacctgaacatacacccaaaacataaaagttaaaaaataataaaaaaactaaaccactgtacgggattgattaattaagtaatatgtaggtatcaggcatacgtgatcaatcccttcatttgtttatattggaggaaggatgggatccagccccattcacctaggagaaccgcagaggtagcaacactcaggaccttgatattggatctcctggaagtccatttgtagtgagggtcttcccttcagggtaaatataatttttagctctgaagaaggtttaagttttatatatagtctaggccataggtgctggagaccataactagtaaggctaagcctatggtggctttgcaggctgcgaaggataatgggtaatatggatgctaaaatgaaatgtaaattcaaggttataaggatgctcatgatgaatactgacagcattatgccttctagacatagaaatgagacattagatgagatcggtaaattattattcctgctagagatgtaatgaaggccaaggtgacattaatatagatagaaggcatttagtaattatgagtaatcataatttaatgagtcaaaatcatttgttttggtttaaactcattaccaattcaactcattctagtccattttggattcattcatgggctaatcctagggctaagacagtaattaaaatgagtactataataagtactaattttaggctgttcattcggaagggaagagaagaccctcactgcaatcaggcatccaggacagtgatcatatggtcccacactacctcttcctcctccctgggtcctgcatttaacttcctaatctctgctggtagcaatattaactgagtattcaagactctcagggcccctctcaaaaaaaaaagaaaaaagaaaaggaagaaaagcatggtttggtcacctgcaggctatagaaatgcttgccaatgagggataagactcccagaggggatgggctgaccagcgtgggctgactggcattgggttggccagcagcctcagggggctattctgacagtggagtacactgtggaagcatcgcactggctagtcccatggtgcttccctctttttggggacctaggattcagtgtgaaaatgggattcttgatttcggggtatctaagtgctctaccttccagccgtggctgtttttcacacacatatgaagccctggaagctgcaaatgctttccttgcccttttcatcaaaggactccaccttgaagtcagtaatctcatgaataaacaagctaagtggaaaagaccacatatcaagctcaatcagtttccaaaatacaactttctgacatttagttggccattttgaaactctttgtaaataaaatttatgtctataaaagaaatccccatttgtaagcgcatctctctctctgctcctaaaccattagaaattgtaggatgaagacattgacttaatatttacataacaaaccttatctttgtgtaagatatttttcctggcaagcttgtcttgactgggcctttacctgtgtccttctttgcctcagcaaataatggttttaaacctaagttctgtgcctttgagatacaaactttaatctgcgagtcatgtctatggaagtacaaatttagggttacctagctaacaattattttggggaactgaacgggcaatcaagagattgatcgtctaaagcgcgaagggaaactatttgaaaactgtcaaatgaagacccttataaagctattgtgtccggaatttattccttctggtaggttcttggtctcactgacttcaagaatgaagctgcggacctttgcggtgagtgttacagctattaaagatggtgtgtctggagtttgttcctccagatgttcagatgtggcctctggagtttcttccttccagtgggttcatggtctcgctgacttcaggagtgaagctgtagaccttcgcagtgagcgttacagctattaaaggtggtgcgtccggagttgtttgtccctcctggtgggttcgtggtctcgctgacttcaggaatgaagcggcagaccctggcggtgagtgttacagcttacaaaggtagtgaggacccaaagagtgaggagcagcaagatttattgtgaagagtgaaagaacaaagcttccacagcgtggaaggggaccccagcaggttgccactgctggcttgggtgaccggctgttattcccttatttggtcccacacacgtcctgctgattggtccattttagaggcgctgattggtccattttatagagtactgattggtcgattttacagagtactgattggtgcgtttacaatcctttagctagacacagagcgagattggtgtgcttttacagagtgctgattggtgcatttacaatcctttagctagacacaaaagttctccaagtcctcactccacccaggatgtccagctggctccagctctcactataagatctgcttctgtcatatgtctgtatgtttatacgcttgtatgtatgtacatttcactacccaaatatatg

SEQ ID NO: 813 - DNA, 16244 bp, Homo sapiens
  source 1..16244: mol_type = other DNA
agaagaaggcagcgcccaaggcgcatgcgcagcggtcactcccgctgtatattaaggcgccggcgatcgcggcctgaggctgctcccggacaagggcaacgagcgtttcgtttggacttctcgacttgagtgcccgcctccttcgccgccgcctctgcagtcctcagcgcaggtgagggcccgcgcggtaggtgcggcgccggccgaggaagccccggggtgtcctgccagccgtggcaccgctgccccgggtgctgggaccccatcccccactgtcccagtcacccgccgccttgaggtcagcgtttatcctccagatcttttgcctagacggccgcctcagtttccccctttcggccccttccggctattcccggttgaacccgccgctttagaattcccttctcatacccctcccgtcattctcgagacctcgaccgcgggtcacctctgacccccactgccggaggactgccttctttctccagactcaactccctcgactttataagcccctgcgcgtccccagtgaggcccaaggcgctggccctcatacccctaccctcatttgtgcccctcctttctcagttatgcccagttcttcccgctgtggggacacgaccacggaggaatccttgcttcagggactcgggaccctgctggaccccttcctcgggtttaggggatgtggggaccaggagaaagtcaggatccctaagagtcttccctgcctggatggatgagtggcttcttctccacctagatgtaagccaagatgtcttatctgcactgtgcatctccctaagaaacctctggcctcccaaacctgttcttgacctttccctcatccttccgcccccttgattatgtactgtcagtattcatttggtgaagttgctttgcaggtgcctttgtgtagcgctggagaatgaagaagttggtgacccgggtaaagtgtggtcaccattccttagctcacatcagtgctgtccttaggcatttttgagggagaagtgttagtattccagggtaccctttatataaactgcggttgacacctgaatccagtgagcttgcagtgatatttgcctgattattaacaactgttgatgtcactcttcatcagtctttccacaggagccagcatacttcctgaacatggagagtgttgttcgccgctgcccattcttatcccgagtcccccaggcctttctgcagaaagcaggcaaatctctgttgttctatgcccaaaactgccccaagatgatggaagttggggccaagccagcccctcgggcattgtccactgcagcagtacactaccaacagatcaaagaaacccctccggccagtgagagtaagtgtcattgacaatgaaggagcaggtatgggtgtttgtgctcattggtagactagaagcagtccccacagtggtggtgagggtcacactcactcacagagggctgctatgtgcaggctgggctctgagcacagattatctcatatgattgtccccccaagggtaggcacttttagcttttccatctttaaaggtgaaacagtggccagtgttgcacattacaggtttttggattgcacgttagtgtctataggggttttagtgtttcctcagtgcctcgttcacataaatattaaattggaatgttctaatttccctcattaaacatttagccttctaatttccctcattaaacatttggccttcggctttttatttatttaatttttcttttttgagactgagtcttgctctgtcgcccaggttggagtgcagtgatgcagtctcggcttactgcaacctccacctcccaggttcaagtgattctcctgcctcagccttccaagtatctggaattacaggcatgcaccaccacgcccagataatttttgtacttttagtagggtttcaccttgttggtccggctggtctcaaactcctgacctcaaatgatccacctgcctcagcctcccagagtgctgggattgcaggcgtgagccaccgtgcccggcccctttggctttttaaagtagtgattttttttttcttaaaagtttttgttctgttgtggtaaaatgcccaagaaaaattaccattttaagcacttaaaaatgtgcagttcagtggtacattcatattgttgtgtcaccaccaccatccatctccagaacttttttcatcttcccaaactgaaattctatacccatcaaacagtaactctccattcctctctccccaacccctgacaaccaccattctgctttctgtctctatgaatttgactattctaggtacctcatataagtgaaattgtacagtatttattagtgatttttaaaaacaaatttatcttggctgtgtgcagtggctcactcctgtaatcccagcgctttgggaggccgaggtggtttgatcacctgaggccaggagttcgagaccagcctggccacatggtgaaaccccactgttacaaaaaatacaaaattagctggatgtggtggtgtacgcctgtaatcccagctatttgggaggctgaggcatgagaattgcttgaacccgggaggtagaggttgcagtgagctgagatcatgccatgtatctttatttgtatatacatttgttgttgttgtttttaacaaagagactagagttgaatttagtttgctctgcttctgataggagagaacaaagcttttcaggttccacttaatcccagagaatattttacaggtttttcttaggcgtgttctctgggtgtgggcttgtaagaaaataagttttttttttctttaagcagaaaggatttaatcctttgtagggtttattttcaagagttagttacgtcttttttaccaaaatgcttgcaatggctatgttttaaatgataggatttttttctttttctagactttaatgaatatgtattacttttataataaatgaaattaacttcaaaataatttttttggccttccgttatagaagattttaatgaaaactgtattgagacactttacccaagttataggaaaggctagccagtgactcacaggagtgttccagaatgatgaagaaagacttttctagaaagaaggtgaatgaatttgctcaaggggagagggaagtcactgtagctagaaggataattaccagccaacggtgtttagtcagcagactttgatgaatttagatgagaaagtagatgaggtatgtgaatgtgatatacccctattttttcttactttattagcaatctaaagacctaagtcttagtctaatttctgttgtttagatgaaaaccaatagcttttatgttaagcaacagcaagcctctttgtcaagaatctgtttagaaaatgtcagcagagacaggatgtggtggctcatgcctgtaattccagcactttgggaggctgaggcgggaggactgcttgagcctaggagtttgatagaagctagggccacataacaagactccgtctctacaaaaaataaaaaataaaaagaattagctgggcgcagtagaacacctgcagtccaagctacttggagagctaaggtgagaggatcacttgagcctggaggtcaaagctgcagttagctatgattgcaccatgcactctagcctggttgacagagtgagatcctgtttcaaaaaaaaaggaaaggaaaatgttagcagagaaaaaaatgtgtgtgaatatttcccgttaccttacagagtgtgtcctctcataaaataagctgagtgtagttggggtagaaattactggaaatgatccaactcaaggattccgggttgtctaaaactagaaaatggtactttttttggatttatgacgagaaatactgtgggtttaagaggcaactggaatgtgccagttaactcttcatagacgcattgtttcctgtgaagcagatgaaaaactagagagattagcagaacctaataaaaataagcttgtggctgagtgcagtggttcacgcctataatcccagcactttgggaggccaaggcaggtggataacctgaggtcaggagttcaagaccagcctggacaacatggtgaaaccccatctctactaaaaatacacaaattagccaggcatggtggcacacacctgtaaccccagctacttgggaggctgaggcatgagaatcacttgaacccaggaggtggaggttgtagtgagccaagattgtgccactgtactccaacctggggtacagagcaagactccatcttaaaaacaaaacaaaacaaaaaaaacacttgtgtctggatggtggggtacagtaagtattaagtttatctttgaggcaataaaagaaagaaataagtggttttcttacatactgtgcaaccagatctgatgcttcactttttccatttcctccctcagaagacaaaactgctaaggccaaggtccaacagactcctgatggatcccagcagagtccagatggcacacagcttccgtctggacaccccttgcctgccacaagccagggcactgcaagcaaatgccctttcctggcagcacagatgaatcagagaggcagcagtgtcttctgcaaagccagtcttgagcttcaggaggatgtgcaggaaatgaatgccgtgaggaaaggtaagagatgagttgtgaaccattagtggtagtgaaggggtccttttagttcttttgggccctcagatttgtgtatgagctattattagggcagtatttatggaaacaccttcctcttttagggccagagaggaaggtcttcaagatagacagtcaagggactgtattgcgaaagtgggactttctttctggtgcgtgtgtgggatgtgaccagcttttatagttactacttaatttctgaaaataacctgcagtcttgagctgccaccagctgccttttgtccctttggtctttcccatcatctgctaggataaagatagaaaataatggttttactgcagtaagtgctggtcctagggctcccaagccgtgtgtcttactgatggtcattgaattgcaaccttaactccacaatatataggtgtggctatatctgcagagaactcaaggctccccaaaagcctaaccagcagaaattatgcatatggccaaaattgttttctatgaagaaaattgagattaggaccaggcccagtggctcacacctataatcccagcactttgggaggccgaggcaggtggatcacttgaggccaggagtttaagaccagccaggccaacatggggaaaccccatccctaccaaaaatacaaagattagctgggcatgatggcgcatgcctatagtcccatcttctcaggaggttgaggagggaggatcgcttgaacccaggaggcagaggttgcaatgagtcgagatcgtgccactgctctccagcctgggtgacagaatgggactctgtctcaaaaaaaaaaaaacagaaaattgagattaggattggggtggggatgtagtggagtgaataagacatgccaaccagcaagaaagctttggactttattgttcattaaagctggccagtagctctgaaaacaacaccaagagtctgccattacagtaactaaaatagaagagatgctttgtacactcagttataactaactttggttatgcttggccttttttgtgaactaggccataagccatttttgacaatatgtttggaagatattgtgaactcagaatagaaagttggtcccatttgtttcttgttacttttgttccagaggttgctgaaacctcagcaggccccagtgtggttagtgtgaaaaccgatggaggggatcccagtggactgctgaagaacttccaggacatcatgcaaaagcaaagaccagaaagagtgtctcatcttcttcaagataacttgccaaaatgtaagtctcattgttatttgcctgatgtagaaaagaatttataattcaaatgtacattagattaaatataaaattgcatggtgaggctgggcacagtagctcatacctgtaatcccagcactttgggaggctgaagcgggagaagatcacttgaggccaggagtttgaggccagccttggcaacatagcaagacactatctctaccaaaacagtttttttaattagccaggcatgatggcttgcatctatagtcccagctactcaggaggctaaggtaggaagattgcttaagcccaagacttcaaggttcagtgagctatgatcacgctattgcactccagcctgaatgacagacagagactcagtttctaggaaaaacaaaaaaatgtatggtgagttgaggcttgaaagccatatcccttgcttgcgtgagcaggtgcttttggttgtggtgactacaggtgctgttggtagcctgccttctgtcctttaatacttaccgtctacacatggcactgagccaaacacgacatacagtcttatttacttacaagatgaggacatcaaataacctgcccaggatctccctcagttgccaagctgagacttgttgtatttcaccaaaatgcagctgtgtttcacaaccaccattctgtactgtcttttgttcaatttttagctgtttccacttttcagtatgatcgtttctttgagaaaaaaattgatgagaaaaagaatgaccacacctatcgagtttttaaaactgtgaaccggcgagcacacatcttccccatggcagatgactattcagactccctcatcaccaaaaagcaagtgtcagtctggtgcagtaatgactacctaggaatgagtcgccacccacgggtgtgtggggcagttatgtaagtagcccttggctttcaaatattactgttgttatttggcaagccaatgatgatgtataggggttggatcttttatggagggaacattcagtagctgaaagtgtgccatagcaaaatactattcttagcttctgaaaaatatctacagattacttttaaaggaactctaatatgcaggtagctgctggagccccttaacttgtgagggttcaagcttataggctcaatgaccacacacgtcagtccactttctatcactctgcaagtgagtgtgcctttaacaccaggcagtctttcacagagacatccttggttgtggctgtgagtggagaaatacgaatctagcagcgctagagaaaaagctactccaaaagacatgttaaaaaggatggtagatcccatcactcgtccttcaggaggctcaccatcctagggatgctggagagagttgctggccagattctccaaaggcttgctaaagagggtcccggtttgaggtttaatgatagtgatatatccaaacattacatgactggcttgcagagggtaaccaccatccaggatgtccctctagagtttgctttttcttaagctaacatgttattggaaagaataatgtttctcagaaaataaaccttagtttcttagaaaagaaactcagctaataccaagcacttactgactgttaaatgaacacttgttcttgatgattcctggaggtatcatcaccctagcattgacaccttctcccacctagtctgaagatgaaatcagttgaaatttctgaccccaggtttcacagtgagagagttgctacatcaacatgtttcagtctcctggatcctagaaaggggaaaaaattcacatggtgttgagaaccatgagctttattttctggttttgtttgtatttttaaacagggacactttgaaacaacatggtgctggggcaggtggtactagaaatatttctggaactagtaaattccatgtggacttagagcgggagctggcagacctccatgggaaagatgccgcactcttgttttcctcgtgctttgtggccaatgactcaaccctcttcaccctggctaagatgatgccaggtaaggaagcctggcatgagtgccttcgagttttttgggtttcttagtaataacaagaatattggcaacaaagaagccttaccagaacctctcaattgaaaatcataatcctatctgggcatttgttctggggtcaagcatgaaatgctgactgtacattatgggttccaggagaacgtgataccagtgaaaattcaaacttgaaacgtctcatccttgagctaattgcctcaaatatgttttgtattctaagatgatcctttggagaagtctcttaatcatttagttagctcttgattgagtttggagtgaggcagtcagatttaagagcagattaatggcctgccacaaggttattctacacctttgggccttctcacaagggaagcactaactagttattttgccaggaagaaactggcacacagtgtctttttcctactaggcattttcaaagcatcatttccaaggaaaagtctgttgtctttctctaggaaataatttgtcttcgatgcacatggcaataaatagcatttttgttgtcttaggctgtgagatttactctgattctgggaaccatgcctccatgatccaagggattcgaaacagccgagtgccaaagtacatcttccgccacaatgatgtcagccacctcagagaactgctgcaaagatctgacccctcagtccccaagattgtggcatttgaaactgtccattcaatggatggtaagtgtggatagaggttcctctgaaacctaagatgaaaaactatgcctgaactctttaaaagtatggtgttttgttgtgttttttaattttttttttttgtgaccgatcctcgctctgttgcccaggcaggagtgcagtggtgcgatctcgactcactgcaagctccgcctcccgggttcacgtcattctcctgcctcagcctcccgagtagctgggactacagacacctgccaccacgcctggctaattttttttttttttttttttgagacggagtctccctctgtcacccaggctggagtgcagtggcgtgatctcggctcactgcaagctccacttcctgggttcacgccattctcctgcctcagcctcctgagtagctgggactacaggcgcctgccaccacgcccagctaattttttgtatttttagtagagacagggtttcaccatgttagctaggatggtctcgatctactgaccttgtgatctgcccgcctcagcctcccaaagagctggaattacaggtgtgagccaccgcacctggcctaactttttgtatttttagtagacggggtttcactgtgttagtcaggatggtctcaatctcctgaccttgtgatccgcccaccttggcgtcccaaagtgctgggattacaggcgtgagccaccgcgcctggcctgttgtgttttttaattttcttttcctttctgccaggatttttttttttcttcttccaacttttaggttcagtgggtacatgtgcgggtttattatatgggtaaattatgtgtcacagggtgttggtgtaccaattatttcatcacctaggtagtaagcatagtacccaatggtagtttttgatctcaccctcctcccaccctccaccctcaagtcggtccctggtgtctgttgttcccttctttgtgtccatgtgttctcagtgtttagctcccacttataagtgagagcgatatttggtttttccgttcctgtattaattcacttaggatggcctctagctccatccgtattgctgtaaaggacatggtctcattctttttttattgctgtgtagtattgcattctgccaagatttgtaattggtggacttttttctaatagatttgggtgaaagtggattttctattctggcttttactaggctctgggaccccaggtaacctagaaattagaggaagttcattttctttccaatattgaaaatgataccttagaatagaagtttacgttgttctgactctaaccaaaacagaaatttctgaagcggcaaaagctcttcagagcagtctctggtctttcctcaggggcggtgtgcccactggaagagctgtgtgatgtggcccatgagtttggagcaatcaccttcgtggatgaggtccacgcagtggggctttatggggctcgaggcggagggattggggatcgggatggagtcatgccaaaaatggacatcatttctggaacacttggtatgtatacattgtattacatacactaaaattccattatcctaacaaggccaaggactaactagtctaactgggatcaggtgaggagacagcctgacagcatatgaagcctgggccactctttcttttggcccagcttagtggaatcccttgggtcatggaggcatggctcttagaatcaaagtaaatcccacagcctaacacactgatagaccatttattgctatctgagctcatttcagacatagttgtgggtctagccccatgccatggcaagagcctgtactctctgtgcctcaggctgttcttaattaaaaagaaaaaggaattctagtacttttctcctggagcacttgttaggttcaggtgttgtgaagtgctgaactccgtgcctgccacgtgggaacattctaattcatcctggttttcctctgctcttcctcatacagaggctatgtctcgtggtagatgggagctagactttggagccctgccacctcactagttgtgtgaccttgagttggtagttaacctttctatacctcagtttcatcatcaatataatggagaaaacaataggacctaaatcaaaatatatgtggagaaggtaaataagttgtatgcaaacagttattataaacattccctctgagaacctatgagaaccctaaagagacgaaaattacataaatttgaagaatttttgtaattttgaagaatttttttaagccttcagaagtgggtaaggcagttggaaacccatctagcagttagctaaaatgccagtttatagcctatgcttggtaaaggaagggcaggctttttaaaaagcgtccttcagcactgtcaaggggtatgagaacctagtgcagacccagaaagcctgggagttctaagggtggaaccactaccaggagaaaaacacctgatcatgtgtcttaattcaagaagctcttttcttttttttcttttttttccgagatggagtgtcactctgttgcccaggctggagtgcagtggcgcgatctcagctcactgcaagctccacctcccaggttcatgccattctactgcctcagcctcccaagtagctgggactacaggcacccgccaccatgcctggctaattttttgtatttgtagtagagacggggtttcaccgtgttagccagaatgttctcaatctcctgaccacgtgatctgcccgcctcagcctcccaaagtgctgggattacaggcgtgagccaccacacccggccagaagctcttttcttttaaggatgtctcctgatgtgggctctttgaaggtatggtcattgtgagatggaaaaggctggagagagaaactttataccataggagattgaaccaacccagctttgcatgtggttttagcaaaaacattaattatagaatgttatgttaagatctatgaagactcttctggagttctttttgttttttgagacaggctctcactctgtgcccaggtgtgatcacagctcatctgcagcctccacctcctgggctcaagtgatcctcccacctcaacctcctgaataactgagactacaggtgtgcgctagcatgcctggctaatttttgtatttttagtagaaacggggtttcaccatgttggccaggctggtctctaactcctgagctcaagtgatttgcccccctcggcctcccaaagttctgggactataggtgtgagccactgcacctggcctcttctggagtttttaatcctgaaacttgagatgtagatcacacaaaaggactcaatgagaattgaaaaccaagtctggccctaaatcaatcctaatgcattaattgtcaagagttttgttcttaagtaggaaataacaccagtcataccaaaacagttaatgccttagctgggtaaaattccagcctctgggataatgttccctgtgggaggatggtacaagcactgcagagccagtcttgttccaaagagcacatgcagtgcagacatggggagtggagctgtgctggctgtcagagcagcaagcctgggtgagaaagggaaaggagaataagatggtgggaagggaggcagcagcagggtatttgggcacactgggaccagtcactgaggtgtcaggtctgattggaagacctgcattttgatcctggttagacaccagcttggccatatgactttgggcaagacccttttgtaactttccttagcttttttacccttttaaaagtgagtagccaggcacgatagctcacacctgaatcccagcactttgggaggctgagacaggaggatcacttgaacccaggagtttgagaccagccctgggcaacgaagcatggcctcctctctacacaaaataaaaatttaaaaaatcagccaggcatggtggtgtacacctgtcctagctacttgggaggctgaggcggaaggaatacttgagcccaggaggttgaggctgcagagagctatgatcatgccactgcactccagcctgggtgacagagcaagaccctgtctctaaaaaaaaaaggaagattagatatccttttatagtcatgcattgcttaacgatgggggatgtgttctgagaattgcatcactaggcgatttcatcattgtgcaaacaccatagagtgtacttacataaacctagattatatagcctaccgcacacctaggctttgtggtatggcgtgttgctcctaggctgcaaacctgtacaacatgttactgtattggatactgttggcaacaccatggtatttgtgtatctaaacatacctaaacatagaaaaggtacagtaaaaatacagtattataatcttatgggaccaccatcatatatgtggtcgtcattgactgagacatcattaatgtggtgcatgactactccaatcagtccaggaacaaattaaaaagataaggagaaaagtcagtgctttgaggctccacaacaccttgctgtgtccatttagagcaatttacagctgttgctgtaattaatgaagctatctcctcccaggcaaagcctttggttgtgttggagggtacatcgccagcacgagttctctgattgacaccgtacggtcctatgctgctggcttcatcttcaccacctctctgccacccatgctgctggctggagccctggagtctgtgcggatcctgaagagcgctgagggacgggtgcttcgccgccagcaccagcgcaacgtcaaactcatgagacagatgctaatggatgccggcctccctgttgtccactgccccagccacatcatccctgtgcgggtaatggcctgtctctgattggacttgccgtggggtgtgcctctacacatgatgtacggatgttctgcttcataccttcctgaagttgggcttgagcggggtgactgccagggcaggggttgtagccagccaccctctgtcatgtttccgccattggctgacttcaccaagagaagaaagcctttgaacccagcaggctggggcagaagttccctctccggagcactgaccttaacagggtaaacacagagcttgtatctagaaagctccagaagcctgagcttggccagctttgaagtatggctttctacttagtaaatttcaaaataggttttgcccttcccactacaaatggtagcactgttgatgtcacagttgaattagtgtaatgaatacagctagtataactgaatctagattatacatcgtgggtatgagagtctgctggtacgaacagaaccagtgttttctgattaaaaatgtatttctttttaataaggttttggttccctggtgttcacgaaacaacactggcttcttttaaatgacaggtgtttgggcagcgctttccctctgccccaagcttgcatgtgttgctacagtctggtcttgagcctgagcgttgtggggactgcgttcgttaggatctctgctaagaggtagtccttcctgttgtgaccttaccttctgctctcattgaacttaggttgcagatgctgctaaaaacacagaagtctgtgatgaactaatgagcagacataacatctacgtgcaagcaatcaattaccctacggtgccccggggagaagagctcctacggattgcccccacccctcaccacacaccccagatgatgaactacttccttggtgagtacctggggagctgctggtgcctcactgaggagttgcataaagctgtctttgcagtgtttataattgaagcccttcagaggcattcagatttgtttcttcttctttttttagttttttttttgagacaagagtttcgctcttgttgcccaggctggagtacaatggcacaatctcggctcaccgcaacccctgcctcccaggttcaagcgattctcctgcctcagcttcctgagtagctgggattacagccatgcgccaccacgcctggctgattttgtatttttagtagagatggggtttctccatgttggtcaggctggtctcgaactcccgacctcaggtgatccacccacctcagccttccaaagtgctgggattacaggtgtgagccctggtgcccggcctgtttcttctttttccaagtaactaagcatgccctcaaatggttcaaaaccctaaaaggtatttattgtctgattcacatcaagagggtggagagtcattttgggagctctgagggagcctgggaatccgctcagtgtttccagtgcccccttgtctacgtggctgaaggatgcacagtaatgacttgcagggagaagaggcctctgaaggcttgagtccccgctgtccctccggagtccacctcacatttgtcttcaccactgccctctactccatgatgttgtataatccttgaataaccccacacctaatcgcctctgataagaggaattgctcaatattttcaactgccccgtggttctatactgctccacccatgtccaacctaaaggcagagatggaagggggctattagccacaggtcacctctgcctcgaaggtacattgccttcccaagcccgcccagcgtggctcagcttcctcacaggctctctgttctgttggaaatgctgggtttaaactgtcacgtggcagtgttggagcagcttcttccctacaggcctgtgaaatcaagcccaactctgggttttatttttctctttatttatttttataaaagccttaaaatttttataaaagccttatctcagtagagatatagctcacttaccataaaattcacccttttaaagtatccaagtctatgatttttaagtacactcccagtgttatgcaaccatcacttctatctgattctagaacattttcatcacctcagaagcccctacccattaggagtcactcctcttttccccatccccagcccctgtcaaccacggctctttctgtctctatggatttgccttttctggaccttgtgtctaagtggaatcataccgcctgtgctcctttgtgtctgccttcttccagcatcatgtctgcaaggctcatccatgctgtagcattcatcagcacttcatttctttctgttaccaaataaccttccattgtacagatttaccacattttgtttatccgtctattggtggacatttggttgtttctcttgttaactattatgaataatgctgctatgaacatttgtgtacaagtttttgtgtggacatatgttttcatttctcttgtgtatattactccctttaatatttaaaaactgtttctcctcagagaatctgctagtcacatggaagcaagtggggctggaactgaagcctcattcctcagctgagtgcaacttctgcaggaggccactgcattttgaagtgatgagtgaaagagagaagtcctatttctcaggcttgagcaagttggtatctgctcaggcctgagcatgacctcaattatttcacttaaccccaggccattatcatatccagatggtcttcagagttgtctttatatgtgaattaagttatattaaattttaatctatagtaaaaacatagtcctggaaataaattcttgcttaaatggtg

SEQ ID NO: 814 - DNA, 32742 bp, Homo sapiens; identical to SEQ ID NO: 676
  source 1..32742: mol_type = other DNA

SEQ ID NO: 815 - DNA, 20127 bp, Homo sapiens
  source 1..20127: mol_type = other DNA
gctccggacgcgaggggcggggcgagcgcgggacaaagggaagcgaagccggagctgcgggcgctttttctgcccgcgggtgagtgtttccaagtgggacggaccgggtcggtgggtgcaagtcgtggtgtccccgcttggctagaccccgagttcccgggggttgctggggttcagccttggccgtggggccagagccaggagccggttgaggcctccttgaggcctagcagagcgagggttgggagggagtcccatctggggccccctccttggaggcaaggccagtcccccgaaattggtcaaagcacctgtgaataccccgttttaggggagttgctagtaaagtacattctccaagacaaagagagcgacctcaggaagccgtgggcaaggcaggtccgtggttcaccccccacccgggcagaaggttcccccattggttcaggcagcgacttgaggacgagcagagctctgaaatagtttggcctgggtttgaaacccaactttggcacttcctggctgcatatggcttcagacaagttgtttaaactttccgagactcccttgtttcatctgtaaaatggggatagctgtacatataaagtacttgtgagtgttaagcgaaatagtgtcataagcgtaccccgtataaagtatttcttgaacaaatatttatcgggtatttatttttatgccaggcaccaaagatggatccaacggtggacaaatgtacaagcccactcttaaattttgtattctagcaaaagagagcaataattttaaagtattaacaatgaagtataacgtacagggagcttatgttagttgtcagggtcccctgcagcgaggcctgctggatgttgacagctcccttaatgtgagcagaaaggaaatctacaccagagtcaaaggtttctggctgttctttaagagggaaagactcaggttggaccattgagaaaatgagctgtttctttccacaccaggactcattccttatgctccagggaatttccttaaaattaataatagaagcgaaaaatcagatctattccacatgtttggttgcaaatacctccaatagtcatagaagtttatttgccttctttccaaagatgaatttttgtctttttgtacctcactatttgtgatgtatgttgatgtaaagaacaagctcacatgtgcctggttatgttgtgagctggtaatactaggaaaaaatttcctaagaattgagctaggtcctgacatggtccctctttccaagtagcatacaatctagccatattgataagttaaaaaaaagttataataatatagatctgtgtaaactgtataggaatacagatgggggagcagttaattctgcccaggtaatgtatcaagaaagttcccttgaggagaaaaattttgaaatgggctgtgaatgatgaataaaagtttttcaggtagactctcaaaatttattcccagcatttatgaagctatttaccattataagagaatgtgaagttcattgtcataccaattaccttttgcactgcttccaggaataaaatgctgcctaattttaataaaaattgttatcccaaaagcatgatacagttgctgatcagggagctgtcagtatctggtaggccttgttgcgttggaccctgataatacatcactttctattctcatccttgtatcagtctgatgaaatgtttacatggcgtcagcaaaatgttttccatacaagaggtagcttagtatcacaagaaaaaacctgaaagtacatttctaaatatccccagtactttattttagtcatttaattctaatcaaccaaatgacctataagaactagttaaaatacacaaaaggcttaattactaggaattaaggtgaagtaattttactcagaaataccaattaaattaccctattcattaggaaaacattctcgtatgcttgctgagttttgattctcttttttttttccttttttttttattttagtgtctcagattcattcttaaggaactgagaacttaatcttccaaaatgtcaagtaagtttcaatttttatatttatcaatctatgttaataagagactaatgccctagcaagtgggaattccaaaatactctcatttttttttcttcaaaacaggaccattggtagttttgttgcatagtattatatctcagttgtttacaagaagttatttattttctttcaaacagaaagaccatcttatgccccacctcccaccccagctcctgcaacagtaagttttaattttcttgttaatgtaatagccaactctggccttgatacaaaaacccagatgtcttccagtgacagtcactcaatcatcacagcaacaggatgaaattcagcttaaaagaaaaaaaaaaaagcacttcctactaaataaaataattatttgcatctttccttgaaccaaccccaacatttaaagaaacagtactgtaaaactccaacctcctgtgctcagtttgttttgttttttctttgtaaatgggaaataagtgaaagttttaccatttctttcttattaatcttcactattaagagtctttaagttgttactgagtgaatgctcattctggctattttgttaaacctaaccttcaactggttatgtttttctctcctttcttgtctctctctaaaattttcatattaaacaataaagcttctgaaactactcattgtaaatattttcaagctgttcaagtaaagatttcattatctatggggcagatcttgctattgaatcttattccactccataaattatattttattggtttggaagtatatatgttttaagtagttgtgaacgtgttttttcacccaggaagctctggcccagcttggtcagcatgtaaaataattttccaacccacaaaacagatttagcagtaactgttcaggtcttgctgaaatggcttccttgttggttttttgggagggggggttttgtttgtttttaaaaaaacactgttagcatgaccaaattctacaaaattagttctttaatattaatccttccttccatacccccaccacctaaatttcaggctagtctacttttcactactaattaggtccttgtgtaacttagttttctccgctaaaaaactactcatatttactaaccctcagatacatattttagttacatttatcaacaatttgtttttctttagtgagatactttagaaaagagataccgtaccatatgttctcatttcaatttatgtcatatacaggctctaaagttaattccagtagactataaagtcctatgcttgctttgttttctttcttaaatcgaagaacatttgttatgaccatctccatggcattctgctagtggctatacaggtggagctgaacaattgagattctgacctcaaagagctaaccatgtacttcagctttggaaatggtataattataatgttttgctttccatttttttttttttagttcccttatttttataacattattgcctcataatgttgaacagtgattcttattatttatgctacctttgaaggtgtcattttgacaaaaatactgcctctgacaatgcatcatcttgacaaacttgattttttgagattaaaatatttcaaaaaccaagtgtccccttataatttattatgcataaaaaggaattttttttgcctttctttagttatatttttgtgtcattatagtttcacattaacacacaaaatatagaagactagggattaaaacatccaacagaatggatactaaatgaattattcttcttccttttttctttccattacttctaccaccaccaccaccatcaccaccactaccaacactatcaccactatcacctctgccacccaaatgtaccgctgcaagtaatatacacttctttcatgcctttgatacttcaactgtgttttgcctacttaaatatgctttatttgcgtcttttctaactgtatagactagaaattgatcagccgttctcttttctcctaaagagtatcaaatgtaatatctgcttaaatgtctttcttttgggtactaaggatatgtgcagcggcatgttttaggaaattgtgtttattttgtaacagctacagcttagttggaatgtgttaagtgtattttacattatacaattaaggaccgatattgttaattgcatgtaaaaatgaaattgtcacatattttgattgaattttacaaggtaaaataccctaattttggtctctctctactatattctttctatgcattatgccttggttctcatgaacattgagtgtcattgtattagccccaaggctactgctatataagagcccatttgtgattacatcaacacataattcacaaaaaccaagggttctgttgctgaaatgagcagttgtattttgaaagggtgagagctatcaggaaactagatgaaaaaagaagtctataaactagaaaagtagttcacattgagacaaaatgcagaaatgttttcatgattgaccagtggaagatggatcaaagaagaaatggaagagaaatcctataaaagaatgactgggttaaaaagatcagatagtaccccagaatgaaatccatgcatttcttacaagtctttgttttaaatcatgtatgtgacatccatcaaatccaacatatgttcttttcaattgacaaatcctggcttcccgatttgagtctctactcatttctcacattatataaaatgatttaaaactgtcgttgaaatcagatccatttcttttttttgtttttagtagataaatacattggtggcatccacatgtcaaataaattgtattttgttttgcatgtagtgttttcagagttctagttgatcacacttcaagccttcctatttcagtcttcatatattgctaagttgttttatcctattgttgaccataaagtaatcctgaatgttttaaacacttcagtgtgttgcttacctcaaaaaacaaaacacacattcacagtcacacaaacacccccagcccctgcaaaaaagaaagagaaaaacaaccaaaagacactgcagacaggtttctcaatgaaagaaaaatatttaatttcctcagtggaaaaaaagaacaattacaacacatcattgcttgtttaaattcaggttgcttttgcatgccatatgcagatcatttttcatttctgtgttttcctcgtttgagctcatttctcattcgtgtttttgtctcatttgtttccatcagcaaatgcccagcacaccagggtttgtgggatacaatccatacagtcatctcgcctacaacaactacaggctgggagggaacccgggcaccaacagccgggtcacggtaggagaatcaactattacagcatccggcaaacaactggaattgaccagaaatgccttcagaattaggtctttttgaatcataagcacagccatttaaaaaaaattttttaacctagctttttgagtattttcaacattcgttgtagcatctcacactgaaaaaataaatagtgagatctggaatgtatatagaagaaaagaaaaatccattctgtttggtggttggtagggttaaagccttgagcacttgatgcttatactgtatgtaaacaaacagaatttcttaaggtaaaaatatcctttttgacataaagagtatttttcatttttataaggtgattggcattagtctcaaggattgagtttctagtagaggctggtctttcagacctggctttttcagggctggaaagcttttggctggtacaccagtttgaatcgctacccatagttatttgtcttttggatttagtagttgaccttctaactaagactcatttctctacagtgaaaaagagaaaaacgttttaatgtcacctcaaagaaatgcagagtgaaggttgaatgaaattaatttgaagtatcagactagatatgtacaacgagaagtgcatttctaatccttagtataagagataggatttctgaaacttagcatgtttcatttaagtgatcagcctaagatatcaaaattggatgatacacttcaaatcttttagtttagaatcatcttaaatttcattcaaaaaagtttaagcaccaaaaaatgccaataattataaaaatgacttactaaagataaaaaatccaaaagtcaaatactacattggaatgtagtgttggtgagaatttatacaacccagaatggctgtaaagtttttaatacctggtttttgtttgctgtattcataaataacaagtgccttctattaatgtaacttcaaaaaagccctctcaccctgtagtcaagctggaactgaaagcttgtagctatcaaatgaatgtctatcttgataagcatattgcttagcttgataggttttgtttgtctaaatttttcattgtttctgcataatatgtacttcataagcatatcaagttttatgtgccatgcatatttcatggtatctgaaaaagaattctgacaaagtgtgtgtatgtatgcatttcacaatgcatacaatttttatgtgcatcaatacatgtttttccctggcctaaacatgttgtttcacaagtgtaatggatggcaaggttttcaaatgataaagaacatttcagtttaaacaatgaacggaatcaatcatggatcttaatgttaatgcagcaattttttcacgggcagtaaacaagaatgattgcatttaatagctctatacagtcacctcttgattatctatgttaatggaatagaaatgataactataatattacagtaatttgtcttttggttttgtgtaagtattttgctcttaacttggatgtagctgtgggggattctcagttaaaaaagtgagattgttcgatggagactaggaagagaaagtgtactccctatctgaagtcactcatctgtttcttcccattccttcttggcgaatgttaagaactgaacatttggcgtggacactagctacatagtagattaattatagagagttgttggacatggaaaatttggtgttttggtcctttgtggacatttactttgtattattgtcctcttaacaccaaattgaagtataatcaaactgctatatgaagaagggcctagaaaatgtggaggttttacactacttgccctgctttctatatctagtttaagctgttaggactcaatggctctgattttgaccataataaaagcattttgattttactatgaccctagttatgcattacttttgggggtgaggggaagctcctgtatggtattgttgtgcgcagattgcattagtggttttcaaggaacgaatctgtgaagccctgtccagtagcttgtggtaggctgtagagaacattgggtttccctgatgactccagtatacttgggtagttctcagacagtaaatactttgtatagcatgtcgagaccttttggagtgcttatgatagctacaagatggaattcactcctagtcagttcttcattcagatgatgattaacattctcttaagtacaggtgtgaaaacacattgagacaaaaatgtctttaaaaacagcctatttctgtacattaatagaaattctgccccagaagaaagctcttaaataagttcttgctagagaaacagctgagaattgcaaaagaaacaacaacaaaaaactgagtaaccaagataaatttcacaaaaccatgaactttattcataggagatttcctaggaccttgctcttctgtaagcacagttctacccgcctccccattggaaattgaaagcagaaaattggaaagagagttgctgctagaggtgggtttcctgatagtagcaaggaaagaaacagttcaaaaatggaaacacattctccaaaagcatagcccctaggccgttgaaagagtcaacaacagattttgacatctgacagagggttacagcacagcaaaacagtggttgtttctaattgaatcttatccagaaagggtctaaagtatgttcagctttttttaaagaaatgtttaagacattgtagaaagatgtctgtctgagacgttaaataaattggaggtgtgtaatgatataaatctttactatcctgaaaaccatctggaatttaactttattattgttttggggtgtttttttagtttgggtttttgttgttgttgttgtaagttgactggtctcaatatacagatgatttgtgtacctttctttgggagaaaggaggggaaatagcaattccattaatataaaatgtgattctttgaaaaatatcaaagagcaaatactactgtgtttttaaagtgttttaattcatattaaagctcggaagcataggcattttagaattctttacctctttaatttcaaaaaattttgacagtggtcttaccacctcagttatgggcacaattccaactttatttgtaatccatttcatggaattctgaaggtttgtgttggatatgagttggaaatactttctagtaactttatgtgtgaagaagcagacttgtgtgtgtctgttcctctgaatccataaggttagtcttataggaattctctttccccttgaaagaactatagaccctgatacaggtttccctgtattggctgcccatcctaccacttttgacagtttccatgcccctggccatctcactctcttacccactgctggccaaaaacagtgtctgtctacctgggcactagcatgaggtgtgacaagaatgcatgggaggaatggaaagagaggaaatactgcttccaaggcgaaatgctttgaagaagtagagttatagggatggagagagacccttgtaggaagaggaaacatttcttgatcatagtggaaaaggacacaaacatgctaatccctgagccctcaaatgaaaaataaggttatgattggggtcccagcccagagtggaggagtatctctggggttttatcatagcaacaacagaaggggaagcgaacaaaatgttactttagttttcctataaggatttgccaatcctgtctttcgataattaaaataaagccaacacttcatttctccagcctagcagggagagtcaatatcagagatctcctgaaaatttgcaaattgtctgaaatagcaatgatttttcttattctgggtctttaatcaaatgcagtcatgtatattaacaggagactaaaaagttcagaaatagatacttttagatgggtgttatctgggtggtctaccagaggctgtctggaatctcacctagactttaagccacaggaaaaactgatcactttatctttctctttccttctttttttattttttctttcacctatttttgctttacctttttaaaaaatatttttcagtcttccctccgcctccttttcttctgtctctcttttcctgtacatcacatctttccttttcctctgtctttcccataaaactgaacatttttaatggaatggagcttcttgatataagacctcaaaaataacgtaatcaggcccgatatctgccacttctctgttcctgataaacttgtttgcttttacactgtgattaggactcaggacaaaacaatgtgtgacttttaattcacacttctcattcccctttacaagaaaaccactaggtaacagacagaaccttaagagaaataaaatctctagcctggcaaaggaggtaaggtggtttgttatttcactaattgtttttgtttttgaacctgggaagttgtttttgtggtggtgttgggagtacattcctagtgctaataggttaaggcccctgtagacagtgtgagaatggtaagtgttaagggttcagatcctgctgcagataatcaagtgttgactgtatgtgtaatggtaattgagcagaataagagggtaccaggtaatgtcctgaacttgagacggttgatatataaccatatattttcaatgtatgggttactgtgtaatattttatttgttcttgcagccaggttgtcaaagcattggcaataaactgctaagtaaaacatttaaaaattatgtgcttaaagtcattttcttttgaacatttctgaatttgcagtgatagctattttcagtgaagaaaatatttggacgaatagaagaaaggcgcattagaattttttaagggactctcttttcagtttgccagtgaactccttacagttgaataatgaatgtatttaactctttcgtaggcatcctctggtatcacgattccaaaacccccaaagccaccagataagccgctgatgccctacatgaggtacagcagaaaggtaggtgcttaggacctggtaaggagtgaggacactgtctttgctgcttctttgcttaacatccaactttagatcggcttagccagcttttctgtgcatattcagaggaaaggtccaaaaaaatacggtttttaaagcaattagttctgatttcaaaattccagaactaaaatccaacaagaggagcgtgattaaataaactgttaaaatccttaagatagaatgttctatagccattaaagtcatttcttttggagaatatttaatgacgtgaggaaaatgttaagtgaaggaggactgcaagactacatgaattaatatctcatttttataaaaataatagcaaccacatgttagtttgaagggggaaaacacagaagacaataattatctctaagcagtaagcttatggtagtttttattttcttttcctcaagttttcctttttttttttttttttttggtgatgagcctacattactcttaaaataaaaaaagtagccaatatctttattaaaaggcagagcattataaccactatctagaaatgttaaaccttttgatcttgactattatatttgtatttgataatatgatgtaccgtgttatgcaaattaagcacttttcttctaaattcacatgaacttttagagacgtagactatgttattgaagtaactcatcctaagtgtctgtagtgattggagatattcttgcttatcaaattgaagtatttataagtgagtgacgtgatgtctgagatctatcttaaagtaatccagtagggcaaagataacttgagattggccagttcttgataatttttgaagtaggctgatgagtacctagaaatttgatactgttttctctgctttgtatgttgaaaagtttccacattaaaaactatttttaaaggtctatacgtttagacatcagtattaacatttcatctgttttctttttaaggtctgggaccaagtaaaggcttccaaccctgacctaaagttgtgggagattggcaagattattggtggcatgtggcgagatctcactgatgaagaaaaacaagaatatttaaacgaatacgaagcagaaaaggtagggtaggggctcacagtgggatagataatgtgtaaagtacataaaacattggcttactatttataaaagtaacataagatttggtcagaacactgatgcagtactgaggctctgtctacctgagtcaagtcagtttctcaaggcctcagatttcttgcctgtaaaaaggagataattatcccaacaccctgtttacatcatatcttttgatattcaagtgagataacataggtctgcattataacctgcaaaatgttaattataaaaccaaaaaacatttgaatttcagatagagtacaatgaatctatgaaggcctatcataattcccccgcgtaccttgcttacataaatgcaaaaagtcgtgcagaagctgctttagaggaagaaagtcgacagagacaatctcgcatggagaaaggagaaccgtacatgagcattcagcctgctgaagatccagatggtaaaagaaaaaaagtggggttttgtttatgctttctctgtgagttaagatatgagaaatctcttaagtataagtttttatttcttatcctaaatggaaaagaaagtataatttaagtatcgtcttagtattttggttatattgagtaagatttgtatgtgaatttcccacaagaaaaagaaatatccttttcagtgcagaaaatagcaaaaattattgattgtttatcaaaatctttgtactcaaaatgcacgaaaggtttttaaatcacaatcaggattttgcctcatctgcttttaaaaagctaaatgcattctaattatatcttgttttcttattggttcactaaattcgctgaattaaaggctcttaagggagaagctaatgagtatgtggaaacatgaagtttcctttccatttaattcagaaatccaataagaatgtataaatatagctcatgctactatttgtatgggtgtacatgagggtatacccatacaaattgtatacatgcacacgaatggcagagcttcctaattgccattctgtatgagtagttagcaggtgttctgattgttctggtcttgtgcagccaggcagggtctgaagctgcgaggagacccagagatagccacctgcagtgtgaacacactcaaccacatatctagtgtgctgtataaacattaatagtttctctgtatactgctatgatgtgcaaaaggttagaagctttagctgcaagcgacaagaacatcaggaaaatgatttaagatcccatcttaaagtagcagtaacaaagaggaaggctataagaactttaaagacaatatcaatgagggaggaagcaataatagtacctgaagacaagaataagttgataaaagtggggaaaaacagaagtcatttttaaaaataatgtactggaatattgtcaaatgttctcataaatacagacagtggaatgtaatactatagagaatagaatatggaatagaaacagtattgaatgttaagcagaatcagcagtgctaaagacacactagcatcctcacactttaattactcaaatggggtgattaatgcaagagaaacatacagaactaaaaatcagaagacaatccagtctacagatattgggaggatggaggtcagtacaagaggaaacaaaggctagcaacgtaagtagaaaataactaaagctttcattaacaccatgaacactgagaaggactaaagagattcactcagaaacagtctgaaacttgggcctatgatgtttttaactttcagattgggtcttaaagttgctagtaaattcaggtagcaattaagatgccaatatgagaatgtctttagcataccagtacgaaaatgattagaaagaggaatacttgggaggtggaaatgtatgtcaaatgtacataacagaaaggtggcatctgcatgaagtacaacagctactgacttctttaacagaggactatcaaaagatagacattgccaggcgccatggctcacgcctgtaatcccaatactttgggaaactgaagcaggaggatcgtttgtggccaagagtttgagaccagcctgggcaacacagcaagaccttatctctacaggatacttaaaaattagctgggcatggcggcttgtgcctgtagtcccagctactccagctgaggctgaggtaggaggatcagttgagcccaggagttcaaggctgcagtgagctatgatcatgccactgtcctccatcctggatgacagggcaataaccagtctcaaaaaaaagaaaaaaaaaagagggcatgtgcaattatccacacaagacaatgaaggcttttattcagtgagagcctcttcatcataggataaatagctgttcaattagatcataaccagagaagccattcccccaaaaaaggaagcagacgactaacatgcaaagaagaacaagcccaaattgcttagaccttatgtccccatctgtggtcaacactggggccatataaatgaaagaagaaaacaaaagctaacaacaaaaacagataacttagacagatgtagcacagatgtaccatatataaccctaaaggtgaaaaactcttaaaaagtagaaaggttacagagttttaaaaaaactgtatcttacccagtagttttaatttcagaagtttatttcctaaagaaattactcaaaaggaaacaaaagtaatttttttaactttttacaaaaacaacagtttttagctgtagtatttataataatgagaattttaggaactacttaagtgccagacaataagggaggtgctaaactgacatagcagcgcaacataggcctctgtaacagggtttcccctgtaacaaggttttcttaagtgtggttcctccctgtctggtgggtcactgaggtgattaagtggttcagagaggagcgtttgttttaatatgtattactaaagagaaagctctttttttttttaagtgagttagtttaaagaaaaatattaagtaaacgatagtacaggctgttagtagatatatgaaaaactatgaaggtgatagagcaaagactgagattaaggaaacactagatagctattaaaaataagcctgtagtgtgtgtgcagtggctcacacctgtaatcccagcgctttgggaggccaggatgggcagatcacatggggtcaggagttcaagaccaccctagccaacatggtgaaatcccatctctactaaaaatacaaaaattggccgggcgtggtgtcatgcgcctgtaattcctgctacttgggaggccgaggcacaagaatcacttgaacctggcaggtggaggttgcagtgagctgagactgggccactgtactccagcctgggtaacaagagggagattctgtctcaaaacgaaacagaagcatataaaccagacccatactgtatgaacttgggtcataccattacacactgacaacagctggctaagtgtaaactgacaaaaattaaatttggaatcagacatttatttttcttctataaaattacttgagggcctgggaaactgaatattgttagaggtgatgtattctctgctgtcataattttacaaatgggcattttcattcatttttaaagtgctacaagtgacaaagtcactgcccagttcatatgttgttcattagttgttaaatgccttaagttactaccaagagagtgaaacattgggcagaatttcaattactgccatcacatacagccttcacattgattccgaagccagaagagacatgttgtatctcgtttatgttttagccaaatccttctcagacacaacattatcacttaaagactgtgagataaattactaccttggccaatgaacacattacgtcctctgtatggtttttatcaagtaactgccccagtgctcccatgacgctgggcaggtccacttgttaggccagtgagggccatagttcgttggtaattaagtgttaacattgttacactcctttttatggttactggtgacctgatttccagaacaatttgttcactccagattatgatgatggcttttcaatgaagcatacagccaccgcccgtttccagagaaaccaccgcctcatcagtgaaattcttagtgagagtgtggtgccagacgttcggtcagttgtcacaacagctagaatgcaggtcctcaaacggcaggtccagtccttaatggttcatcaggtaaagtcataaaacattcatttcaataagatgtgcctataccacaaatcccaggtgatatgattcctacaccatgcctaaatctacctgttaaatatgtcaatctaacctgttcctgatttggagaagaggtttaaggaagtggacctttcccagatgtttaataagtttgtcattaaaaactataatatagaaccttgtaatggaaagtatattcgttaagaaatacgtgtgaacttaagaattttgaggcatcctatcaatctttactgctatgctaaatattttttcccaaggaattgctcaggcctgaaacagtattctttaacatttacctattgatcataatcatttctttgtgctgcattttgtattttttaaatcttagctagactcatgtgataaatgatctaaagttcaaaacattatttggtacactgtttgaaagtatggaccattaaaaaatgagacacaattatgaagcctgatcctgtcttgcagcgaaaactagaagctgaacttcttcaaatagaggaacgacaccaggagaagaagaggaaattcctggaaagcacagattcatttaacaatgaacttaaaagggtatctgtttaatatgttaactatacttttatcactatacctgttactttatttttcctcattcttttttccaaaatagtgtttttattgaatgttgttcactttgaaacagggctaactttattataaacctgtaggatcctttttttataagattgttcccattctctggcaaaattgcaataaatttgaaatatcatagagtatacacatatcttctaggcctgtaaatgctagagccctctgatatgttaaactcccatacagtcattaattactttcattttattgtgatttattcatcaaatgtcgtcattaaatgtaatttataatttgcactttgcattcagacaaggaaatctagttggtagcccaaaatgtaaaacggaagccttatgtataccccagaactttcactattttgcctcaccagctgctctggaatatcctatattatacaactgctagagctgctgttttttcttgtagacccaagagtttcagagaagacctagaaccacatttttttggcacacacacacacacatacaggtgtatagatatatatatatagtttataggcaagaaaaccaacttttgaaagaatatatctggctcaaaaattataaggaaaaaacattacggagttctgtttttttctgattagttgtgcggtctgaaagtagaagtggatatggagaaaattgcagctgagattgcacaggcagaggaacaggcccgcaaaaggcaggaggaaagggagaaggaggccgcagagcaagctgagcgcagtcagagcagcatcgttcctgaggaagaacaagcagctaacaaaggcgaggagaagaaagacgacgagaacattccgatggagacaggtaacccactagcaacaaacgcagaggcagtgccaagactttgtacggctgtctttaatttaggtttttctttctaagtgcaagtattctggtacctgccactgagggtgattcccagtactaaatttgacatgatattgacattcagtattttaacctttaaatgcttacattatttatcaagatgtggttattaccgttaagattaattgtctttggtgtcctaggacagcattctgcaaagtaatacctgtaagccaatcctgcccaccacttgtttttgtaaataaaactggaacacagccacacttgtttgtttacatactgtctgtggctgctttggggataaaacagtatagttgagtagttgcaacaacaactgcctggcctgcgaagtctaaaatattttctatctggctctttacagaaaaaaattgccagctctgtcctagaaaaacccttacttctaggtatactgattttcctgattaaaagcatccctcaaggtaaaaaataataataataacttgtataaataaaacttacataaagtactgattacattgatcgtcacttgtaattttgagatcaccttacctcatggcactgttttaacactgcctagtacactgtgtaaacaggactaagctaaaagtagttatggaaaacaaaaccaaaggcttcctggagcatcgttgcaagaagtgggagggacagtagtcatacttggtactcagatgacaaccatctggaaaacatgtaatggaatatagatatctttaccaggtatttctgcaaaatttaatccagcagattaacatttgaaatggtcatattttaagtttcagtatctgagtctctttctgttttgtatgaatgtgttttttattgtaatgaatttggagcatgagcacatttttgtggttaaaacgagcttgaaaattaaaataactgatttttgctaattttgcaactagacaaacactcagtcctttgcctctgttttggcatctatgaatggggcatgtcttatgcttaaggtttgcaggtctttactcagattctgtcctagttcaaggaaaaaacctgaagaaaatcgtttgagactattagagctaaaacctcatgcttttaatttcttacaggaaacagcccagcatgactttaaacaaagtgtctaaaagaccaaccttatattatttctacaactgctttctcctcgtttaatccatagcactacagactaactctcattcactgtccaacagaaataaaatgcaagtcacgtgaaattttatattttctactagtgacatatttttaaaagttaagcaaaacaagtgttttaacaatatgttttatttaattcaacatatcctaaataaaattatttcaacacagaaggaacatttttaaaatcagctttcctttttttaaacagtctttatacacatctcaattcagaagctaaattttcatcggaagtatttgatctgcatttatttaataaatttcattcatttacagctaaaaagtagattttcatacccaaattgttccaacattcttaaaagttctttagtcacactggttcatttcaggggtttaataaccacatgtggctagtggcttctatattggacagcacagctgtatactgtcagcataactagagtaaaatttcatcttggaactgacagtgacaaatgtgtgattacagaggagacacaccttgaagaaacaacagagagccaacagaatggtgaagaaggcacgtctactcctgaggacaaggagagtgggcaggagggggtcgacagtatggcagaggaaggaaccagtgatagtaacactggctcggagagcaacagtgcaacagtggaggagccaccaacagatcccataccagaagatgagaaaaaagaataagtgttgccttgttttgtgtgttctaaatactttttttaatgaaaaaatgttttttggttttaatggtgttacgtggtttgtgtattaattttttttcttgtccatatcacaccaccaaaggcttttggaccatttagcatcatgagcctaatggctcagtcagtcacctttcttaagtgttgtgaagatggctcttttctttggatcttgtttctagccctcaactgctgaaagcctcagaatttagattaattgagaaaacacccacctcttttagagaattatcctttgatgctgcagaatctactcttacaatgccttcctacagctcactggggtgcttaccaaagccatagctttaaaccttcccagtccccatcagtagcttcctgaaagtctcctctcttgtttacttctgcaaagggtagcttcttaaaaacgtgatcatgtatgagtatgtatttgttcacttacccttttttacttttaatcaatgtcagataccaagagttgtgttaagctgagtgtagtgtgtaactaactacacttggatcttactgatccagaaatagtccccatagttagagtagttacttatgaagtggttattaaagtgaacacagcacatatacattatctatactgctttttgttatgattaatactgggtatgttctggtaaatccatccttattgtatagaaaaaaaattacttttttaccaggttttccaaagacagaatagatcacaaagctcaaggaatttaatattcttgtaatggactagataattcaaactgattagcccattccagaagaaaaacagctgggaattaagttaatccacttgaaattgttttacaataatcagaacatccaaacctcaaggctcaggatcccatagaccagagcccacctttttgataaacttagtaaagtcttggagactagaagcaagatagtttgtgacacataagcttcccaaaaactagaatagatttttactgaatagtggtatatctgatggtatatgtttcttaaaggtccaaatgtaataaaaa

SEQ ID NO: 816 - DNA, 32744 bp, Homo sapiens; identical to SEQ ID NO: 6
  source 1..32744: mol_type = other DNA

SEQ ID NO: 817 - DNA, 32744 bp, Homo sapiens
  source 1..32744: mol_type = other DNA
gcgccgcgggggaggcggcggccgcagcagaagcagctgagtgtctcctgatacccggatgtgaggcgatccgctggcgctagtctgaccctccgccaggcaaaaggaaggtacgcgagcgtccctgacggtccccgccgcctgtgtcttcacctctcttttgccagccccttcagggagcggacagttctccctcttcctgttccaccctcggtggcgtgttgcctcgcacgccccttcctactgctccggtcccagctcttcgcgcccctgggagggaggtgggaggctctaggctccaagacgccgtcgcttgaggtaggcagctaacgtgctcgcgtgtccgcgcaccacctgccgctgtttgctgggcggtcgaagttcataaggggtcgtgaccgccgacggggcagggccggagttcccagcactgccgcgagggctccgggagccccgaggtggcgcgcagccattgctagcaccggggcagcgccagtgctggtcccgcaggtagctccgggccccgtctccgccccctgcgttttctcttcccggcgcttcaccggagccagtccctcgccgcctcctggcgcaacccgctgacccggcctgagcctggaggcctctgcagtttgcggggcgcgatgtggggtcttggttttacagccttcagtttgggaggggagcgggcccaaggtcatagagtaactcatgctgcaaatgggggtctcggcacaggtagggcggctctggagtagaaatgagtgcattgagggccgcagtgaagtttatagcgatggagagaggcgaaccaaagagaattgggtcctcgatttttatcacgggttaagattattttactatgggggtttattttgcacaggcagaatgggatagcaagtccaacaattcgaagactacctcctctccctccgcctctcaatgatgcgtccgaaaatccggcgtgtgctttattttccggggcgatggggacgcagcggggaccaggggagggaggaagaggaggaggaaggagctcaagctttgcgatttgagaagtactatgaaccatgttttctgtagtcttagctgcaatgagattcctttaaacaggaatcgcagcacacagtatctagatagtattacaaaacgatatctcaataaataagcttcgcaggaaacaaaagcgctacttggtggcataaggtgtggttagtccccccaccagcattggcttttttaaaaaagtggataaaacatagatttcagttgaaaacatccaggttgcagtgaactatgctatattcactttgtcttctggtcaagtacttagtttctgctttacacaggacaccaacacgaataaagttttaagttattattttattttgagacggggtctcgctctgtcgcccagactggattgcagtggtgtaatcactgttcactgcagccttgacctccctccccggccccaagcaatcctcccacctccgcctccctgagtggctgagactacaggcgtccgctaccatgttaggctaagttttctatttgttgttgagacggcgtttcgccatgttgcccaggctggtctcgaactcctgggatcaagtgatcacctgggcctccaaaagtgctgggattacaggcctgagccactgtgcctggtgaatttttttttttttttgaaaagcaaaaaatctaatcaatggaattagacatgggagtaggatgagaagtgctttaaaacgtgcttaatttggaagtcgcaaattcaggcctagagcatgtgaggaaatgaggaaactaggactgtaatagagccactttttcccttttaggcagaatgcagagtatcactgttgggtcagatatgtgactttggaagcacaattccaaaatttgtcctggcttacgagctagaactcctttatcattgctaactgaggaaaatatgctattgtctcacctttctcaatcaatattataatcctgtagtgaacaagtaattgtttgttttttttttttgagatggagtctcactctgtcgtccgggctggagggcagtggcgagatctcggctcactgcaatctccgcctcctgggttcaagtgattctcctgcctcggcctcccgagtagctgggattacagacaagtgccaccatgcccggctaatttttttgtatttttagtagagatagggtttcaccgtgttggccaggctggtcttgaactcctgacctcaggtgatccgcctgcctcggcctcccaaagtgctgggattacaggcgtgagccaccatgcccggccaagtaatttttttaatgtccgtcccatacaaggtgctggcatttaaattgataaattatgcttcacagaataactaaaaaagtaccctaattaatgaatgccattaacttcttttgccagatagtcctttttagcttggtaatttattatgcagagctgattgtatttattctgttaatgaacgtgaccagcgctgcacagttcgaataatggatttttttgtaatagttaaatattttttcatgacttttattggcagatttttgtaccacatagagttcttggaataccttctattgaaggtgattaaaatttaggtactagaaaccaactccagtaaaattgttactgtagataattaaggactatattaccccttttgtaaccctgactttcatatttttctgtggatcattcaatgaaaatcctttggttctgtttttcctgtataagttctgtattatagctgtattataatactgtagttacttttggcaaataagagcattctgttaacccagccatcatgtcttgtcttttcctgaggggaaggggcatatacatcttatgcttgattgcattacaatgcttaaaggaagatttatatcctctgctctgttcagcttcctttagacatttatggcagcacgtgtaagattcacacaaaaactcagagggtaaattaaaaggtggtattaagtattactttaatgtagtggttctcaaactttttggtcttaggatccccttacactcttaaaaattatgtaggactccaagtagcttttgtttatataggtttatatctattgatagttactgtattaggaattaatttcatatatattaattcatttgaaataattaaactacagcttaatataaataacattttaattttaattaaatttttttttttttttagtaacagtggctcactgtgttgcccaggctggccttgagctcttgggctgaagtgatcctcttgcctcagcctcccaaataggtgggactacaggtgtgcatacccagcttaatatatttaataaataacattttaatgaaaaactatattccaaaataagttagtgaaggaatggtgatggtattacatttttgtaaatctccttaatgtttggccttgatagaagacagctggattttcctatcaatctgttgctatatatgtttctggttgaagtttatgaccagtatgttgggtggggtattttagctttttcagatagttgtaatactctgattctgcaacaaaacttaacaagtggtaatttcttaaaggttagttgtgatgtagaatctgaaaccatgtctacatgtgttttgcattctgttgcattagaattcattggtctgttttgtacttttaatcttttgctctcgtatgattttgatctcaggaatcctgagagtccccatatcacattttgagcactactgctttaaggtaaataattgaatgtttagaattaatgtagttgttgaaactgaaggggataatgataatatggaaattgagttggcaagtagttaagcgaagccaggagtaactaagtaaatttttttttatttttttgagacggagtcttgctctgttgcccaggctgtgctatctcggctcactgcaacctctgcctccaggcttcaagcgattctcctgcctcagcctcccgagtagctgggattacaggcacctgccatcatgcctagctagttttttttatatttttgtggagacggggttttaccatgttggccaggctagtcttgaactcctgacctcaggtgatccccctacctcggcctcccaaagtgctgggattacaggcgtgagacaccatgcctggccaatattttctatcttttcataaaaacattttccctgtaatattattatagctaattattaatattattatagctaacacttaagcactggtgatatatcaggagcttttctaagaactttaaacatttatggcagcatacgtaagattctcacagataaaaactcagagggtaaattaaaaggaggcattaagtattactttaatgcagtgtttctcaaactttttggtcttaggatccccttatactcttaaaaattatgtaggactccaagtagctttatattaggaaaggtttctttctgtttttttttgttttgtttttttgaagagacgggatttcactatgttgcccaggctggtctcaaattcctgggcccaagttatctgcccaccttggcctcccaaagtgctggtattatgggtctgagccaccacccctggcccaggaaaggtttctattatggcatcgttggagaggattaaatttaacttacttttatcccccataaatagtatagtctttgtgacaagtattattctttttatttatttatttttattttatttatttatttatttattttttgagatggagtctcgctctgtcgcccagggtggagtgcagtggcgtgatctccgctcactgcaagctccgcctcctgggttcatgccattgtcctgcctcagcctcccgagtagctgggagtacaggcgcccgccaccatgcccggctaattttttgtattttttagtagagacgaggtttcactgtgttagccaggatggtctcgatctcctgacctcgtgatcccccctccttggcctcccaaagtgctgggattacaggcgtgagccaccgcaccccgcctatttttttttttggagtcggagtctcgctctgttgcccctgctagagtgcagcggcgcaatcttggctcactgcaagctctgcctcccgggttcagccattctcatgcctcagcctcccgagtagctggaactacaggcacctgccaccatgcctggctaattttttgtatttttagtagagacggggtttcactgtgttagccaggatggtctcgacctcctgacctcgtgatccacccgcctcggcctcccaaagtgctgggattacaggcgtgaaccacagcgccggccccttttttttttttttttttttttgagacggagttttgctcttacagcccaggctggagtgcagtggcgtgatctcggctcaccatgcccggccaagtattattctttgtaacacagatactgttcagttttagaagatatacgccacttagataatttctccataagctatttgagggtgggaatatgcctatacccagcatctatcataatatatgtttaaaatatataccataggctaggcatggtggttcacattcaagcctgtgatcctagcaccttgggaggccgaggcaggtggatcgcttgaacccaggagttcgagaccagcctgggcaacatggcgaaaccccgtctctacaaaaaaaacactagccagacatggtggtgctctcctgtagtttttcatatataaaaaagatacacacacacacacacacacacacacacacacacacacacagtagttgtagactattttagcccatcagaaaatcgagttgttaaattaaacaaatacttgttgcttttaagaagttaaagttgctcccatggaaatttgaaatttactgttgtgttttgttcaactagtgtttgaaagtttgttgttatcacaagacactggattaaatttttcttcaaaaatagataattttcagaagataaatttagtctttttttttttgagatggagtctcgctcagttgcacaggctggagttcagtggtgcgatctcagctcactgcaagctccgcctcctgggttcacaccattctcctgcctcagcctcccgagtagctgggactacaggcgcccaccaccacgcctggctaatttttgtatttttagtagagatggggtttcgccatgttggccaggctggtctcgaactcctgacctcaagtgatctattaggcattttagaatgtgagaaatacttgggttaccttaaataatagtagttcattgggaggatatgtagaaataagagaagactgtttacagagctacatcttgtagaagaaaacaggaatcaccaaacactaggctttgctgaagaacaattcaccagctcttacagaaacctgaatatatttcaggactcagaaggtggctgagaatagtacagctctagcagtaggcttgccttgttttaattcctcaagcagcaggtatcctgtaattcctaatttagttctttgctgttatagtagtaggtctcaacccagggtgattttgcctctgaggagacattttgtagtgtctagagatattttgattgtgaggactaggggaagggttgctactggcatctagtggatggaggtcggggctgctgctgctcttgctaaacaggctgctgctcctccatgcacgggacagcccacccataacaaagactctatgtggttcaaaatgttaatagtggtgagttggaaaaccctgctttatagtgactagatattggcacctcttgggtcacaaacccacacttgatctagttagctatgggaagcgtagcagggtcaggactttcaggatataactgaattgtctaaggttttttttttttttttaaaggaggtgcctgtggccatggcaggtttttcagaaaggagttatgaatttgacaagccactagactcagatttgtagtcagtacttctctcttgttcctttgatgtggttaaaaggttgtatagttgaaatgcattaagaattggtaaataattaaggagattaagaatctgtggtggccctctccctctccctctccctctccctctccctacggtctccctctctttccacggtctccctctgatgccgagccgaagctggactgtactgctgccatctcggctcactgcaacctccctgcctgattctcctgcctcagcctgccgagtgcctgcgattgcaggcgcgcgccgccacgcctgactggttttcgtatttttttggtggagacggggtttcgctgtgttggctgggctggtctccagctcctaaccgcgagtgatccaccagcctcgcctccagaggtgccgggattgcagacggtgtctggttcactcagtgctcaatggtgcccaggctggagtgcagtggcgtgatctcggctcgctacaacctccacctcccagccgcctgccttggcctcccaaagtgcccagagtgcagcctctgcccggctgccaccccgtctaggaagtgaggagcgtctctgcctggccacccatcgtctgggatgtgaggagcccctctgcctggctgcccagtctggaaagtgaggagcgtctctgcccggccgccatcccatctaggaagtgaggagcgcctcttcccggccgccatcccatctaggaagtgaggagcgtctctgcccggccgcccatcgtctgagatgtggggagcgcctctgccctgccgccccgtctgggatgtgaggagcgcctcttcccagccgcgaccccgtctgggaggtgaggagcgtctctgcccagccgccccatctgagaagggaggagaccctctgcccggcaaccgccccgtctgagaagtgaggagcccctccgcccggcagccgccccgtctgagaagtgaggagcccctccgcccggcagccgccccgtctgagaagtgaggagcccctccgcccggcagccaccccgtctgggaagtgaggagcgtctccgcccggcagctgccccgtccgggagggaggtgggggtcagcccgcgccaggccagccgccccgtccgggagggaggtgggggggtcagcctcccgccccaccagccgccccgtccgggagggaggtggggggtcagccccccgcccggccagccgccctgtccaggaggtgaggggcgcctctgcccggccgcccctactgggaagtgaggagcctctctgcccggccagccgccccatccgggagggaggtgggggggtcagccccccgcccggccagccgccccatctgggagggaggtggggggggtcagtcccccgcccggccagccgcctcgtccgggaggtgaggggcgcctctgcccggccgcccctactgggaagtgaggagcccctctgcccggccagctgccccgtccaggaggtgaggggcgcctctgcccggccgcccctactgggaagtgaggagcccctctgcccggccaccaccccgtctgggaggtgtgcccaacagcttattgagaacgggccatgatgacaatggtggttttgtggaatagaaagccgggaaaggtggggaaaagattgagaaatcggatggttgccatgtctgtgtggaaagaagtagacatgggagacttttcattttgttctttactaagaaaaattcttctgccttgggatcctgttgatctgtgaccttaccccccaaccctgtgctctctgaaacatgtgctgtgtccactcagggttaaatggattaagggcagtgcaagatgtgctttgttaaacagatgcttgaaggcagcatgctcgttaagagtcatcaccactccctaatctcaagtacccagggacacaaacactgcggaaggccgcagggccctctgcctaggaaaaccagagacctttgttcacttgtttatctgctgaccttccctccactattgtcctatgaccctgccaaatccccctctgtgagaaacacccaagaatgatcaataaaaataaaaattaaaaaaaaaaaaaaagcatctgtggtgatccatgtgaactttggagttgatgataacagtgtgattggagaagaaaattatgattgaagaatttctggtgatcagtaggaatacaacaatgaagaaagaaagtttgatagcagaatggcataaaccttaaaagagatgtgtaaagaattttgtgtaagataaaaaatggttgtgctgggaaaactgtaggcttcttgatgtgatatatatagcctgcttaggagagaccagtttcctatgtctgctttaataaattatcagaaacctgatggcttaaaacaatagaaatttattatcttaaatttgttccttgcctcatctagcttctgttggttgccctggcattcctgggcctatgaccacattactccaatctctgccatcattttcatattattttctcttgtctgtgtctgtctccttctcttacaaggatatctgtgccactctcttacaaggatatttgttattggatttagggcctacctggataatccaggatgatcacatctcaagatccttaatttgattatgtctgcaaagaccttttttccccaaataagatacattcacaatccctaattcagggattaggacacaggtgtattttttggggggcccaccatttagccactactggagagttttagagaaaagggtataatttcaagagagtggatttttttcttttttttttttcttttgagacagtctcgctctgtcgtgaggctggagtgcagtaatgagatcttggctcactgcaacctctgcctcctgggttcaagcagttctgcctcagcctcctgagtagctgggactataggcacgtgccaccacgcccagctaacttttttgtatttttagtagagatggtttcttcacattggccaggatggtctcgatctgttgacctcgtgatctgcccacctcggcctcccaaagtgctgggattacaggtatgagcctcttgcctggccgagagtgaattttcaattaagggtaattaaattaaatttaaattaaatacaaattcaattaaaattgaaatacaaattcaattaaagtaaaatttgtattgtgaagagattgaatataggaagctgcttttcatagaaaaagggttcatgactgggtgcggtggctcatgcctgtattcccagcactttgggaggctgaggcgggcggatcacgaggtcaggagttcatgatcagcctggccaatatggtgaaaccccatctctactaaaaatacaataattagctgggtgtggtggcgcgtgcctgtagtcccagctactgaggaggctgaggcaagagaattgcttgaaccggggaggcggaggttgcagtgagctgagatcatgccactgcactccagcctgggcgacagagtgagaggcagtctcaaaaaaaaaaaaagaaaaagggttcatgtgggtgagtttaagaaaggaagtgatcagcagtataaggagagttggaaggtagtaagggaaaataactgacatgatggacttgcggccggacgcagtggctcatgcctgtaatcccagcactttgggaggccgacacgggtggatcacgaggtcaggagatcgagacgatcctggctaacatggtgaaaccccgtctctactaaaaatacaaaaaattagcccggtgtggtggcgggtgcctgtagtcccagctactcgggaggctaaggcaggagaatggcatgaacccgggaggcggagcttgcagtgagccgagatggcaccactgcactccagcctgggtgacagagcgagaaaaaaaaagagaggaaaaaaaagacggacttgcatttgactggtgggaatggatctgtgcaaattgaaggccttaagtgtgagaggtctgatgttctcggtagactttgccgtctttgctttgtgccatcttcgagctaagtattgctgagaacttactctctactctgttgtcccagaagagaaatctttcccagctgtttagatggctttctgaatttgcaccagtgttttatggaactgaagaggctttcatagcagcttggggaaaaagtccttcagtaaattatgttgggattgagaggtatacggggtttgattctgcagtaaatctgatggaattactgtaccttgagatagctagaagtttccagtggtgtgttgaaatacaagacgattggataggagactatttaagggcaataaataaataaataacaaagaaaaaagtaaaaaaaaccatcaagatgaggttgggcaaaatagtcctagggttgtgtaggaaaaaggctgattaattttaagaagtgacttggagggggaaagtggctacattgaagtaatagggtaattgtttttatttgacttgttgatgttatctatttttttttttttttgagacggagtcttgctctgttgcccaggctggagtgcagtggtgcaatcttggctcactgtatcctctacctcccaggttcaaatgattctcctgccccagcctcctgagtagctgggattacagatgcgcaccatgcctgggtaatttttgtatttttagtagagatgtggtttcaccatgttggccaggctggtctcaaactcctgacctcaggtgacctgcccacctcggcctcccaaagcgctgggcttacaggcgtgagccaccgcgcccagccgatgttatctattattaacatttctaaaattaaatcatctctgtatcctatttatttatttatttatttgacacagagtctcactctgttgcccagcttggagtggagtggtgcgatcaaggctcactgcagtctcccgcctcagcctcccaagtagatgggactataggtgaacgccaccatgcccggctatttttgtattttttgtagagatagggttttgccatgttgtccaggctagtctcaaactcctgtgctcaagagatttgcacgcctcagcctcccatagtgttagtattacaggcgtgagccaccatacctggcccatttttctctttggttggctgttttattaatttgtaggatatcttatacatattgtataatctgtgcataccaatcctttgtaagttactattttcacctttcacattttaggtctgtagtcagtccatttggcattgactttagtattgtatgaggtagggatacaatttctttttcttttttttttttagagtaaagtaaaagcaagtttattaacaaagtaaaggaataaaaaatggctactccttaggcagagcagcctaaggatccaatttcatttttcccccatgtgatatccagttatcccagtactatttctttaaggtgacagtgctgtctcttaaaaaccaaatgatcatatatgttaaatacttggtttgattctggtctattttgtgtcattgatcttttccattggtctgtttgtttatccttgaaacaatatcacacattaacgtggttttatagtaaatcttgatatctgataggacaaatccacccaccttgtgggttttgcttttttttttttttttgagatggatccttgctgggttgcccgggctggagtgcagtggctgttcgtaggcaggatcatagcacagtctaggctcaaacttctggactcaagtgatcctctcacatgagcctcctgagtagctgggactatcggcatgtgtcaccagacccaggggcaccttgtgttttattttgttgttgtttgtttgttttttgttttgacgttttgctgtgttgcccaggctggagtagaactcctggcctcaagtgatcctcccgcctcagcctccaaagttgctgagatcataggtgtgtgccaccacacctggctaatttattttttgtagagatagggtcttgctgtgttgcccaaactggtcttgaacacctgggctcaggcaattctcccaccttggcctcccaaagtgctgggttaataggcatgagctactacacctggctacttttatcttttttaaaaaagtttttaatgagagaggactcaaattaccaaaataaggaatgagagaaattactaaaataaggaatgagagatattactaaaataaaaagggttaaaagggaatatgaacaatggtatgctaaccatttcgataacctagataaaatagacaagttcttataaactgactcaagaagaaatagaaaatctgaatagacctataacaaagagattgaataaaaatacctccaaaaatgaaaagcccaggctcagatggcttcactgatgcaatctaccaaacatttaaagaagaattaacaccaatccttcatagacttttcaaaaaatagaaaaggagggatctcttagttcattttatgaggctggtattgccttagtactaaaaagacatcacagtgctaaaaagaccttagtactaggcaaagacatcacaagaaaactacagattaatatttcttatgaatatgtccacacaaatcctcaactaaatatttgcagactgagtccagcaacttataaaaatgataacacacaatgaccaagttgcatttatccctgcagtgcacagttggttcagcatataaaaatcagtatgacacaccatgttgatagaataaaggaaagaaacggacatgattacctcaatagatgcagaaaaaaaatctgacaaaatgaaatatcctttcatgataaaactgctcaacaaactagaaatagaagggcatctgtgaaaaatccacatctaacatcatacctaacagtatgcaagactgagagctttccccctaaacttaggaataagatgaagatacctgctcttaccacttctttcaacagtggaaaggaggaggtttccactggaggttctagccaaggtagactggcaaaagggaaagaaataaaaggcgtccagattggaaaggaagcagtaaaactctctctctttgcagatgacatgatcttacctgtaggaaatcctaagaaattcacacaaaaaaacctattagaactcattaaatttaacaacgttacaggacacaagatcaatgtacaaaaattagttttgtgtacactgtgatgaatcatccaaaaaggaaattaagaaaataattgctttaataaatcagtatatggaagagatacctgcattcccatgttcattgtggcactgttcacaataggcaagacatggaatcaatctaagtaagtgttcatcagcagatgaatggataaaatgtggtatggaatggaatattattcagccataaaaatatgaaatcttgtctgcagcaacatggataaaactggaagacattatgttcagtgaaatagctaggcatggaaagatttactgcatattctcgttcttatgtgggagccacaaaaaagttgatcccatggaggtagagagtagcatagtggttaccagaggctaagaagggtgtggggaggagaggatagagagaaagtgattaatggttataaaaatacagttagaaggaataagttctagtgtttggtagctcactagggtgactgtatttaataatttgttgcgtatttcaaaataactagaagagatatgaaatgttcctgatacaagtaataagtgtttgaggtgatgaattatcccagttatcatgatttgattattacgtggttgtatgtctgtatcaaaatgtcacatgtaccccagaaatatgtgtaatcattatgtatcaataaaaaaattcttttaggctgggctcagtggctcaaacacctgtaatcctagcattttgggaggccgaggtgggagaatggcttgagcccgggggtttgagaccagcttgggcaacacagggagaccccatctctacaaaaaataaaaaaattagccaggtaaggtggcatgtacctgtggtctcagctactcaggaggctgagatgggatgatcacttggggccaggagtttgagacttgcctgggcaacatagagagacatagtctctaaaaaaaagaaaaagagtagcaaagttttgggctcacacttcatcttttaaaaactgactagaaagctacagtaatcaagattgtgtagtcctggtataagatcataaagaccaatgggatagaattgagagtccagaaataaaaccatacatttacggcaatggatcttataaaaggggccaggacaattcaatgggtaaagaatactattttttaacaaatgatactggtacaacttgataactataggctggcatctggttggccaaagtaagtcaggtggccaagacgatcaggtcagggaagtatagatactctgtccccaccgaggccaaaataaggcatgtgaccaagcctggtatcttttcagaaggaaagtataattctctcatggaggtgggataagaagtagtgattatattttaagaaaaactgtattatatggtataagattgagatggtgaccatgcagttgtgtaagttttttttttttttttttgagatggagtcctgctctgtagcctaggttggaatgcagtggctcgatctcggctcactgcaccctctgcctcccgggttcaagcagttctctgcctcagcctcacgagtagctgggattacaggcacccgccaccacacctggctaatttttgtatttttttagtagagacggggcttcaccatcttggccatgctggtcttgaactgacctcgttatccacccgcctcggcctcccaaagttctgggattacagcagttgtgtaatgttttgcatataattgtgaaaaatcatcacaggctttttgttgttgttgttgagatgggggtgtcactgtgtcacccaggctggaatgcagtggcatgatcacagcccactgccagcctctatctccttgggctcaggtgatacgcccacctcagcctccgaagtagctgggacttacagacgtgccagcaccccaggctaatttttgtattttcgaagagacagagtttcatcatgttgcccagtctggtctcaaactcctgggctcaagcgatccttgatccttgatccttccacctctgcctcccaaagtgctacaattacagggatgagccactgcacctgactgggccattttttagtctaggtttgtctaagttgttttaatgtatcagttaatagtgatatttttgtatttttttttttcaatagattgtctttggctatagagtttttttttttaaagattactaaacatacaggaagtgataagaagtatcattcatcagaagcatcattcatcaatcaacttgaagaaaaaggtgatatattatttctttaaggtaagtggcatataattttatgatttagtatcttccaagatgattaatcagtgtaccaaatatattttatattttcagagaattttaacttacatttttatttttcaacaaggttatatgtctacatgataaaacatttcagtgggtatatagtgaaaagtaagcttttctcctactcctggtacttggtctagtagttctcttgtttagaaatcatcactattattagttagtgtctccttccagatatattttatgcataaaaggcatatgattctgtatattctcttccttccaccatctcctttttctctctttacacaaagggagacatgctacattctctcttctgcactttgcttttttggtttaataatgtttcttcgtcatggttccatataacttacatctctatttgttggacagctttattaaagcataatttatgtataataaactgtactctcttaaaattacaatttggtagcttttgacagatttaaatattcatggaatcaccactacagtcaagataaagaacatttctgtcacctccaaaagttaatctccctctctccactcttcatcccaggcaatgactgagctgctttttgtcactgtagattagtttgctttctctagaatgtcttttctttttttttttttgagacagtctctcactctgttgcccagcctggagtgcagtggcatgatctcggctcaccatgacctctgcctcctgggttcaagcggttctcctgcctcagcctcctgaatagctgggactacaggcacatgccaccacacctggctaatttttgtatttttagtagagatggggtttcaccgtgttgcccaggctggtgtcaggcccctgacctcacgtgatctgcccgccttggcccctcaaagtgctgggattacaggtgtgagccaccctgcctggcctagaattttttttttcttttttttattagtgcctttgtaaaagacagaatttcttgaaaagtggaatcatacagtatgtactcttttgtgtctagcttttttattcagaatgattgcaaggttcatccatattgtttactattagtagtttgtttctgttgatttttttgttttgtttttgagacagagtctcgctctgtcacccaggctggagtacagtggcacgatttcggctcactgcaacctctgcctcttgggttctagcagttctcctgcctcagcctcctgagtagctgggattacaggtgcctgcccgctaatttttgtatatttgtagagacggggttttgccgtgttggccagcctggtctcgaactcctgacctcaggtgattcgcacaccttggcccccccaaagtgctgggattacaggtgtgagccatcacgccaggcgtgaaattaaactgtttgaaaattagcacttaaaattttgataggtggattgtcctgcatagacattgaatcatttgtagtaatgtaaggtacctgacacaaacatttaccaagagtgtattgttaaacttcttgatctttggccagtttgataggtgaaaaatgatattttgtgttggttttaatttgtattattatcttgttatctattataccagccatttgtagttgtttccctgtaaatatattttggttattagcttttgctatttcttgccagtatttttccccagttttgcccttcaaacttggcttctcaattttgtgacaaggcttaaaagttaagcctttctcacgtgaaaacaaatatttaaggatttcctggctggacatggtaatgcctgtaatgtcagcactttcagaggccgaggcgggcatatcacctgaggccaggagttcaagaccagcctggctaacatggtgaaaccccatttctattaaaaatacaaaaaattacctgtgcatggtggtgtgcacctgtaatcctagctactcgggaggctgaggcgggagactcgcttgaacccaggaggcggaggatgcagtgagccaagattgcaccattgcactccagcttggacaacaggagcgaaactccatctcaaaaaaaaaaaaaagatttcccatactttaatctgtgttttaatgtttttattttaatgattaacatttttcttgaacattttcttactcataaactagaataggttacctagatggttacccagtttttctaacaccaattaattaactaattaatttattggagatggggtctctgtcgcccaggctggtgtgtagtggcataatcacggctcactgaagccttgatctcccaggctcaagtgatccacccacctcagcttcctgaatagctgggactataggtatgcaccacacctggctgattttttttttctttttttttttttagtatagatgagatttcactgtgttgcccagtctggtctcaaactctgattaataaatttttctttgagatggaatcttgctatgttgaccaggctggtgtcaaactcctgggctcaagcaatcctcctgcttcatctctgaagtagctgttattacaggtgtgtgtgcccagctagcagcaattgttgagtaatctattttcattaatttgaaatgaatgaaatcaataccacctttatatgtactaaattccctgatggattagggcctatttttatttttattttatttatttatttgttttttgagatggagtcttgctctgtcgtccaggctggagtgcaatggcgccatctcacctcattgcaacctctgcctcccgggttccaacgattctcctgcctcagcctcacaagtatctggcattacaggtgcccatgaccatgcccagctaattttgtatttcaggcctattttagagtctattttgttctgttaatctctacaaattcatatgttggaactaaactgttaaatattacagctaagtgtattttaatattagtgtaaatctaccctgtttttttttttcttttgagatggattctcgctgtgttgcccaggctggagtgcagtggtgcagtctcggctcactgcaagctctgcctcctgagttcacgccattctcctgcctcactgcctcagcctcctgagcagctgggactacaggcacccgccaccacgcccagataatttttttgtatttttagtagataccgggtttcaccatgttagccaggatggtctcttatctcctgacctcgtgatgagcccgcctcggcctcccaaagtgctgggattacaggtgtgagcctccgcacccggcctaccctgttattttttaagtgacagaatgagactccgtttcgatggagttttgctcttgttgcccaggctggagtgcaatggcgcgatctcagcttaccgcaacctccgcctcctgggttcaagagatttttctgcctcagcttcccaagtagctgggattacagacatgcaccaccatgcctggctaattttgtatttttagtagagacgggggttcctccttgttggtcaggctggtctcgaactcctgacctcaggagatccgcctgccttggcctcccaagttgctgggattacaggtatgagccaccgtgcctggccaatagtaattctttttaaaaaattcctttaaactaacttatttatacttatatttattcatataaacttcagtaagcacacacatgtgcagtctcatttttttgtttggtttctaaactccctcctcttttcttcattttaacatgcttattttttggtgcacattctcttgtagaccctagaggaagatgtttgggagttaaattttttgacaccctgcacatctgaaaaatattctagactccacacttaattgggcattgaattctacttgggacataatttttcttcagcattttgaataattttcccattatcttgcttccagtgttgctatggaaggtttgttgtaattctgatcttaatcatctgtatgtagtcaggatttttcccccctctagaagtttgagagtcatctttttatccttatgataggttttttaaaaattaaaaagtttttttcctcattgccagcagaaacatagaaaggctgaaaaaaaatttttgggggctgggcgcggtgattcatgcctgtaatcccagcactttgggaagccgaggcggttggattacctaaagtcaggagttcgagaccagcctgaccaatacaccgaaaacccgtctctactaaaaatacaaaaaacattggctgggtgtggtggtgcgtgcctgtaatcccagctactcaggaggctgaggcaggagaattgcttgaacccgggagacggaggttgcagtgagccaagattgcgccactgcactccagcctgagcaatagagggagactccatctcaaaaaaaaaaaattaaaaatagataatttttttcatccattattctagatactcttaggtcccctccctgctgtgtgtgtgtgtgtgtgtgtgtgtgtgtgtgtgtgtgtgtgtgtgtgcgcgcgcgcgtgtgtgtgtgtgtcagaatctcgctctgttgcccaggctggagtacagtgagtggcgtgatgtcggctcactgcaacctccacctccttggttcaagcaattctcctgcctcagcctcccgagtagctgggattacaggtgcctgcctccatgcccagctaatttttttgtatttttagtagagacagggtttcaccatgttggccaggctggtcttgaattcctgacctcgtgattcacctgccttggcctcccaaagtgctgggattacaggcgtgagccactgtgcctggccccatttttttgtttttttgttttttaaagagatggggtcttgctttgtcactcagtctggagtgcagtggtatgatcgtagttcactgcagcctcagactcctgagctcatgtcatcctcctgcctcagcctcccgagtagctgggcctgtctacaggcgcgtgccaccatgctcagcttattagaaaatttttttggccaggtgcagtggctcatgcctataatcctagcactttgggaggccaaagtgggtggatcacttgaggccaggagtttgggaccagcttggccaacatggtgaaactctgtctctactaaaagtacaaaaaaggccaggcgcagtggctcatgcctgtaattgcagcactttgggaggccgaggcaggcagttcatgaggtcaggagttcgggacccgcctggccaacatggtgaaacctgatctctactaaaaatacaaaaaaattagccggtgtagtggtgcgtgcctgtaatcccagctactcaggaggttgagggaggagaatcacttgaacccaggaggtggaggttgcagtgagccgagatggtgccactgcactccagcctgggcaacagagtgagactacatcttgggggaagaaaaaaatagccaggcgtggtggtgcatgcctgtagttccagctacttgggaggctaaggcacgagaatcgcttgaacttgggaggtggaggttgcagtgagctgaaattgtgccactgcattctagcctggacaacaaagcgagactttgtctcaaaaaaaattttttttttcttttttttcgtggtagatcttgctctgttactcagtctggtctggaactcttggcttcaagtgatcctcctgcctcagcttcccagagtagctgggattatagacatgccactgtacctggcagtcttggcccttttaatcaggaaactcatgtcattcaggtctaggaaaatttcttgaattcttgattttttttcccccagtgctttttttctattctctgaaaggtccagttaatggccagttggacctcatggctcgtcctctaattttcttacttttttttctcccatgtgccatcttagtcattttgatctactttataggagagctccttgtctttaccttctgatggcatctgttgactttttcacttttttctgtagtgtttttaattttcaggagttcttttttgtatgctgttcttgtatatctgtttcatgacaaattagcttatttttagtttttgtctctaattttgtcttcaaagctacttttttcctgttttttcttcatattaaggcttttcttgtatttgtggtgattcttgtttaactgcttatggttaaaagtgattggaaattgtatgtatttggatggtggagtggctggtagactcccgattatagggtgtgtgtttgtgtgtgtgtcttagcgattataggtagaccttatcagtatttttaggtattttctctagggcttgccaaattcagtagtactcatcttcagaacgatcagtagaacacaatctttccacttccttagtagaaggtataggcttggctgctatcctctaggaacctttgagtaggcaaagagggttttgaatgaacagagtgggtttcagcaatcagtgtgtatattcctatttattccttctgttgtcagtatgatacttccatcctcaactgtgcctgttaagcctgtagacctcctgtttcactccttctagagatttatacctctagtcttctgagtgctagtaatgggaatggcaatctgggagaatatctgctttttttttttttttttttgagacggagtctcgctctgtcggccaggctagagtgcagtggtgcaatcttggctcactgcaagctccgcctcctggattcaagcaattctcctgcctcagcctccccagtagctggtactacaggcacctgccaccacacccagctaattttttgtatttttagtagagacggggtttcaccatgttagccaggatggtctcgacctcctgacctcgtgaatctgcccgcctcggcctcccaaagtgctgggattacaggtgtgagcccagccttttttttttttttttttttttttaaaaaagatggagtctcactcttgttgcccagggtggagtgcaatggcatgatctcagttcactgcaacctccgcctcccaggttcaagtgattctcctgcctcagcctcctgagcagctgggattacaggcatgcaccaccatgcccagctaatttttttgtatttttagtagagatagggtttcaccatgttggccaggctagtcttgagctcctggccacaagtgattcgcctgcctcgacctcccaaagtgttgggattacaggcctgagccattgtgcccggccctatctgcttttttgagtcccattttcttttttttttttgagacaagagtctcgctctgtcgcctaggctggagtgcagtggcacaatctcagctcactgcaacctccacctcctgagttcaagcgattctcctgcttcagcctcccgagtagctgggattacaggcgcctgccaccacgcctggttaatttttgtgtttttagtagagacggggtttcatcatcttggccaggctggtcttgaactcctgacttcgtgatccacctgctttggcctcccaaagtgctgggattacaggtgtgagccaccgcacccggccttttgagtcctattttcatccgcatctctatggagtctgatactgccaattcctgagtctcgggtataaatagatcttctcagctttccacatttctacctgaagattcagattttcttgagcctactaagtcaattatttgtccttctctgtagcatctgtacttctaaatttttatcttctactgtcttgttctttatcctttgggtttatggcattgtcttggttttttatttacttacttatttttagatatgggtctcactcttttgtccaggttggagtgtactggcatgattatagcttactgcaaccttcaactcctaggctcaaacaatcctcctgtctcagtctcccaagtaacctggactgtgggtgcatgccacaatgcctggctaatttttaatttttgtagagacagaatcttgctatattctccaggctggtcacaaactcttggctttaaccttctgcctcagcctctggagtttctagaattacaggtgtgagccaccacaactgggtcttgttttgttttagtccctctattgctttttttttccagtagggtttgaatcggaatagaggtaaatgtgtttgcttaaatcttccttctttaactgtatttcagtctttttctatgtatatagttatctatgtgctttgttttttccccaaaataggattttactttattggtttaaccaattttatgcttatattatgaattgtttttcatattttaaaactttttttcacaacatgaatgaatgcctactagtccattggctgcatatagttgagtgcaaattagaaatactaaaatactgtacgtgtaatatgagctttgaggaaataatgactaatggtaggacaggatgaaattatggagcgttatatttgatgagagccgaatggatgattacatctttcctttgtccttttgaacattaaaaaaaaccctttttctttcaggtgctgtgtgatgtgttaagagcatattagaaggaatggttttgtctaattttcttcatgagttatggtggctgagacatcgagtctatattttggggcaaaaactgtaagtaaacctcaaggaatacactgattttcaactattctatgcttatgtaagacaagttattgattattcataggaatatacttgggatacttcgttctgttagccttaagtgtactgattagatacttcaaaaggaggagttagattttccttaaatcaaggttatttctgtgtagtattagcattgacatatttcatggattgtacaaaactttatttttgttttttaatttttcagaaacggcagcacaaaaggaaatctatattaatagaatattttgttgaacaaaggaggttagataagaactgcaaaccaacagactcagcaaacaaggaaagaaacgtgttagccataagacatgtttcaagtgaatcgaagtccaataactgtagacttcagaagaaaaaagttttcaaaaattttatcaaaacaggtcactgataaataactcctccagtaatagagctaggcctgaaaccaaaattaattaaaaaattaacaaaacagattgaacctgaattaaatttcttttgataaaaaaacttattaaaaataatcaaaattttcctcaaatttttattaccttgtccaaagtaaagcaagtgtcttttagcattcatgccagcttttctcatgttctaggaatgacagaaaccttacttgaagcaaactagtatttttgttgaaaatgtatatcagcatcagttaaagttgatttttcagacctgctcctcagtaataatactagctagtcagcattcacgcctaccaggacacaaaaatcctcttcaaaactactcagaaaagaaagtcattactcaggaatgatgtccattcaggagaaatcaaaagagaattcctccaaagttactaaaaaaagtgacgataagaattcagaaacagaaattcaggattctcaaaagaatctagcaaaaaaatcaggtccaaaggagactataaaatcacaggctaaatcttccagtgaaagtaaaataaatcagccagaattggaaacacgcatgagtacaaggtcatcaaaggcagcatctaatgataaagctactaaatccattaataaaaatacggtgactgtgaggggatattcacaagaatctacaaaaaagaaattatctcagaaaaaattagtacatgaaaaccctaaagcaaatgaacagcttaaccggagatcacaaaggctacaacaattaacagaggtttcaagaaggtcgttacgcagtagagaaattcagggtcaagttcaagcagttaaacagagtttgccaccaactaaaaaagagcagtgtagcagtactcagagtaaatctaataaaacaagtcaaaaacatgtgaagagaaaagtactggaagtaaagtctgactctaaagaagatgaaaatctagtaattaatgaagtaataaattctcccaaagggaaaaaacgcaaggtagaacatcagacagcttgtgcttgtagttctcaatgcacgcaaggatctgaaaagtgtcctcagaagactactagaagagacgaaacgaaacctgtgcctgtaacttctgaggtgaaaagatcaaaaatggctacttcagtggtcccgaaaaagaatgagatgaagaagtcggttcatacacaagtgaatactaacacaacactcccaaaaagtccacagccatcagtgcctgaacaaagtgataatgagctggagcaagcaggaaagagcaaacgaggtagtattctccagctctgtgaagaaattgctggtgaaattgagtcagataatgtagaggtaaaaaaggaatcttcacaaatggaaagtgtaaaggaagaaaagcccacagaaataaaattggaagagaccagtgttgaaagacaaatacttcatcagaaggaaacaaatcaggatgtgcaatgtaatcgttttttcccaagtagaaaaacaaagcctgtgaaatgtatactaaatggaataaacagctcagccaagaagaactccaactggactaaaattaaactctcaaaatttaactctgtgcagcacaataagttggactctcaagtttcccctaaattaggcttattacgaaccagtttttcaccaccagctttagaaatgcatcatccagtgactcaaagtacgtttttagggacaaagctacatgatagaaatataacttgccagcaggaaaaaatgaaagaaattaattctgaagaagtgaaaattaatgatattacagtagaaattaataaaaccacagaaagggctcctgaaaattgtcatttggccaatgagataaaaccttctgacccaccattggataatcagatgaaacattcttttgattcagcatcaaataaggtaatctgtttttattatgcacaatagaggtgccgaaatattttctgtaagaaatgtctttataacattttagcataagaatgaagtcataaaagattgaagagttgtttaagttctcctgttaagttgttagcgagagttttattaacccagtcttgtgatagaacttcagatgtctcacatttacttggggtgcttctcattgtttcctcatttttactcttcatttttattttatgtaagcataagccggttgaattccagcttttcttttaaatttaacacactgattttctgttaattataaccatagaaagtacgtttcttagggactactttttttttttttgagatggagtttcgcccttgttccccaagctggcatgcaatggcacaatctcagctcactgcatcctccgcctcccaggttcaagccattctctagcctcagcctcccgagtagctgggattacaggcatgcatcaccatgcctggctgattttgtatttttagtagagacggggtttctccatgttgatcaggctggtctcgaactcccgacctcaggtaatccatccacctcggcctcccaaagtgctgggattacaggcgtgagccactgcacctggcctttagggactacttttgacctaaatattaaaattaatttcaactaggactaatcagccttttttcctactggatataatttaaaagttaaacatttttaaggagatgacctttgtggccattttgaatagttggcaagtagaatgtctgtctgagaggtataaataattcagtcttcagcctaagaataaaattgtagtggccaagactctgaaatggaaaagtaaactgaaaaccagaatcttgtatctggaataaattttgattacctaagaaagtagttttaaattttatgaaagcagctgagcccttttctttctaaagtaaattatatgtagactactaatatataaaaccaataagcagaaattttatatgcatagaaccctggaactctaacatagatcaaactgatttatttgtactgtttaattttataataagaaaacttggagtggaatgtgatttaggcaacacgtttggtggcacaaatagaattagaatccaggtgttctaattcttagcccagcattctttctaaaacaacatactctgaacattagaaatcatttgagcaaaaaaagtaatcatgaatagagaaaaaagtcaagtcatttcaaagttttgcaagtgatttaaagttctcttttgagacattttgtctaggagcaaatgtgagtgcattaggagtctgggctttattccagaagccatgaaaatagatcagtgtctattatttttcttaaagggagaagacaccatattgtactctcagattttattttctatatagacaggaatgcaagcatcaattaaaagatgattgttcagagagattttaccagtcagtgatagtaattagaaataagtagtgagttgtagtatgagtaataagttgtggctttgtgcagagatgtagtggctttttattcaggattgtgtctccagatgtagttggagagtgtgtcttctaattgcttgctgcataaatgcctgtcaaaactcagaaggcagtttatggagagtatattgatggatatgaaatctaattcattcctttgtactaaactgtacttgaatgaagatgtttatgtagaccacattattttgacctttgataacattgcttttactgaaagatactttgaatttatgcagcccctctgtttggaggaacattataagaaaccatcctgccaggcgtggtggctcatgcctttaatcccaggacttttgggaggctgaggcagttggatcacctgaggtcaggagttcgagaccagcttggacagcatggtgaaaccccatctcttctaaaaatacaagaaattagctgggtgtggtggtgcacacctgtaatcccagctactcaggaggctgaggtggaagaatcatttgaacctgggaggcggaggctgcagtgagccaagatcacgccactgtactccagcctgggtgacagagtgaaagtctgtcttcaaaaaaaaaatatcctaagaaacttgttgctatgttaaaaatcttacggtttgaaattctggaatattgcaaacatttagaatatagcagagatgaacattactctcatatgtctaccacccagatttgacaaaagttaacatttaaaaaaaattactgaaaatcctttaaagttacaaaaggtacattacaggtgtagatgaagactgcaactcttttttttttttttgagatgaagtctcactctgtcaccccggctggagtgcagtggtgcatctcggctcactgcaggctccgcctcctgggttcacgccattctcctgcctcagcctcctgagtagctgagactacaggcgcctgccaccacgcccggctaattttttgtgtttttagtagagacggggtttcacccgttggccaggatggtctcgatctcctgacctcctgatcctcccaactcggcctcccaaagtgctgggattacaggtgtgagccaccacgcctggccgaagactgcaactctttattccatttacccatctccctatagttaaaatgtgctcctaaagtggatgtggatcttttcagtttttatttctgtgattttatgtgtatataaattcataaagaatacttagctttgtttgtgtttcagtgttttacaaaaatactagcacatatatttttgtaacttggctttgtgtaatcaacattatatttgatacttattgatacctgagtatttttaaaactatgggaatatacaacaagtttatcttttcttctatgaaaagactttcaccttgggccaggcacagtggctcatgcctgtaatcccagcattttgtgaggttgaggtgggaggatctcttgagcccaggagttttagacaagtttgagcaacatagtgagactccctctctacaaaataatttaaaaattagctaggagtggtaatgtgtgcctgtggtcccagctacttgggaggctgaggcgggaggacctcttgagcccaggaggttgaggctgcagtgagctgtgatcatttcactgcattccagcctgggtgacagagtgagactctatctcaaaagaaaaagaagactttcacctttcagattgtttccaattatttttcactaatctcaacattttgaccactgtcacagagtgatcaggaaatgtggtggtgaccatattggttcaggacatatttgagtgcctgctgtattcaaggtgctgtgctgtgctaggaccatagaacatggataggtttcctgcccttaagaagtttccatttccatttccctgagatagccactgttgatggagtttggagtatttttttcttttttgagacggagtcttgctctgtcgccaggctggagtgcagtggtgtgatcttggctcactgcaacctccgcctcccgggttcaagtgatttctcctgccttagcctcgtgagtaactgggaccgccaccacacccagctaagtgcaatggcatgatctcgatcactgcaacctctgcctcttgggttcaagtgattctcttgcctctgcctcccaagtagctgggattacaggtgcctgccaccacacccagctaatttttgttttttagtagagacggggtttcaccatcttggtgaggctggcctggaactcctgacctcaggtgatcggcctgcttgggcctcccaaagtgctgggattacaggcgtgagccaccatgcccggcctcacgcccagctaatttttttgtatttttggtagagacagggtttcactgtgttggccaggatggtcttgatcccttgacctcatgatccacccgcctcagcctcccaaaagttctgggattacaggcgtgagccaccacgccccgcctgaagtattttcttttgttatttactaattgagtatctgctttggcaaggttctgaattagaggctattaggaataaaaaggtaaatataatatggttgttgcttttaagctttataggtaagtcagacacaaataactgattgaaaataaaaagtgataagcacacgaaagagatttagacaaagtagatgaagaacagctagagaagattgggaaaggctttatggaagaggagcaatgagtggaatttatatagggggaaaggtattctggatcagcactatccagtaggaatataagtgagccacatatgtgatttaaaattacctggtagccacattaatggagtaaagagaaatagataaaattaattttaatatcttttatttaacctgtctttttttttttttttgagatggagtctagctttgtcacctaggctggagtgcagtggcactatcctggctcactgcaacctccgcctcccaggtttaagtgattctcctgcctcagcctcccgagtagctgggattacaggtgcttgccatcacgcccagctaatttttgtatttttagtagagacgaggtttcactgtgttggtcaggctggtcttgaactcctgacctcaagtgatccgcccgtctcggcctcccaaagtgctgggattacaggcattagccactgtgcccggctgggtgcttaagttcaaaatctggtgtgatttatgctttcaacacatttcaagtgataccacattttaagtgcactcactagttagatgtgggagtgatgaccatattggacattatagtctagacagacgaaacttggaaaaaaggtatagagccaggaaactattgaatatatctgtggaagagatatttccttttttttgagatagggtgtcactatgttgtccaggctggcttcaaacccctgggcttaagtgatcctccccttttagtgaggcttctgagtagctgagacaacaggcatgcactgctgtaccctgcttgtttttaaatttagcatgaagggtaataatgggccctgatggtgagagggtagcttgtagcaagatcatggggagacttcatgtctgtattaattgctccaaataaaaagtatgttaaatttttttagtatgctaaaatttactgaaagtttatttagataaaacccaaagttgatgtaaaaattttgaattatatgtgttcagaatttcagccaatgtttggaatccaagctagaaaacagtccagtggaaaatgttactgctgcttcgactctgctcagtcaagcaaaaattgatacaggagagaata

SEQ ID NO: 818 - DNA, 32742 bp, Homo sapiens; identical to SEQ ID NO: 692
  source 1..32742: mol_type = other DNA

SEQ ID NO: 819 - DNA, 32744 bp, Homo sapiens
  source 1..32744: mol_type = other DNA
aggaaggtcccttctcgctcgccatctctgcgactttaatgcgcttgcgcacgtgctgtctaccagttcctgagagggacgcgtgccgcggagccaggcttactacgtgacccggacaccaggcatacgctaggggcagtcagctgtgccttctctttcggagttgttccgtgctcccacgtgcttccccttctccactggctgggatcccccgggctcggggcgcaggtacccaacgcgggagggccgggtatggatgccaagatcggtgtctgtgttcttcctgggtcgagaggggaccggcctcaggatgaaggctctgcatccggacggatacctggcctacgccgtttgtcctccacccctcttttggggcgctccaagataacagaatcacctctccaatacgcagccgctctcggcgcgtgcttctcgagcgtcctcggggatttgcgtggctcgataaccacctctaagtagtgcctgtaactggggagtcggggtgaatgggtgggtgacaacagttgttttccgtggagcttgcccgcagtgcctggctgcaggtctgggcattatacttagggtaatctgattccagatccttccacgttcttaaatccttcactgtgcacattcctttatactctttattcagcagtcacattcaggacttggttttgtttgccagtgcacctaaaatggtgcctgccacatagatgttatgtgtagatagacgaatgagtgagcgaaaaataatcatctccttcaaggccttccccatccaggccttccatgacagcttcagcccatagtaatctcagcccttccttcatctgaccggtccctcagtatagctattttttttttttttacatctaattttacctgtgttcttgttcctcatctcattctcttaaataccttcttcaagaagaatgcaagcttgaagtcaagggccttgtggtactacttctggggctcccacagtagctagagcaaaaggcagcccccattaattagttgttgattgatttttgcgggatctttatgtggccggcaacacaaggtttacaagttgggaagattggcgaactgggaagagctcaggctttggagtcaggaagacttgagtgtgaattctgtctgtcgtttttctgcctcgggatatttgaattctttatactttctcctttacgtataaattggggtccttgacagtgacttagtgttttatagtaagacatatgctaaaatctgtttggattggaaggttagaagggacagttaaggtatggtaagtttcagtaaatgagctttatgtttataatgcagtaggtaccagagtttctaagtagcatgtcacttttacatctaagtagcatgttacttttacagtgatatttctgatggtttttttgatgtatttattgggatgatgcagtattttactgtaggtaatcacagaacttttttttttttttttttgagacggagtctcactctgtcgcctaggctggagtgcaatggcacaccatctcggctcactgcaacttccgcctaccggattcaagtgattctcttgcctcagcctctcctgcagctccactaccactcccggctaagttttgtatttttagtagagacggggtttcgccatactcttgaattcctgacctcaggtgatccacccgcctcggcctcccaaagtgctgggcttacaggcatgaaccaccactcccggcgagaacttttgaggtctgtctgtacaaaggcttcaatatcgttttccctaaaatgaggaaacagttggacacattacatcatggaattattcattgatggttattgatttccctgactttattagtaacacgtgaattttttaagattccacaaaaacaaaagaacaaaataaaagtcccaccatccagaagtagctactttatactttggtatttccttccagtcttttttatttttccctctgttatgtgtatgcataagaaatgttatcatactttattctgtcatgatcttgtcataagcatctatatccatatccttagttgttaaaaatgcttggcccagcatggtggctcacacctgtaatcccagccctttgggaggctgaggtgggcagattgcgaggtcaagagatcgagaccatcctggccaacatatgcgcctgtagtcccagctacctgggaggttgaggcaggaggattgcttgaacccaggaagcagaggttgcagtgagccgagatcatgccattgcactccagcctggcgacagagtgagactccgtctcaaaaacaaacaatgctttggatatttggatatctccttatgtattttagtcattcttctacttttttgaatatacaagtttctggcttttaaaaaatatttaatagaggtgaattacaggctttccaggctgagggaaggttttctcacctcccaagcctaaggtttcctgagtttaaaactagaggctgatgtcttcctgtggagctcgtagagggttaagtaagacaatacttatagatatgcctagcacagtcccaggccccacaaaaggcagccagctaatgttccttagacaatctagtgcgcatggccagttgtatttctttctcttttagtaataatttttcaccatgcatcggaaaaaggtggataaccgaatccggattctcattgagaatggagtagctgagcggcaaagatctctctttgttgtagttggggatcgaggaaaagatcaggtatggcctggtaaatgcttcctgaattactttttatcttgtccaaagaatcagcatgtttaagcactctgctgtttcaggacataatggcattaagatctctttggctggtaagatgcctagtgggaacctttctttatttcctggaagtggtgaattctctgtatttagattgattcgcagacaagctaataccttttgaagcctggggtggtgggttgaccacaaagtgaactgtatgtgacctggcttctagtccaaacctggtcattgctcgccttagaaccttgggcacttcccttccctggccctcagtttagtttccacatccgtcaaatgaggtcttaagcctggcggtctctaaagtctcttttgtgcctgaaattctgtgacttttttgtttggcaggtggtaatacttcatcacatgttatccaaagcaactgtgaaggctcggccttcagtgctgtggtgttataagaaagagctggggtttagcaggtaagctgggctcttcatgtgttttatccaacttacaattcctgctcattagttaaatgccaggaaatgattccttcacatattttttaagggtctttagtggaggtgctatctctgaggacaaatggagctgatatcctttcttcattcctgaaaataagtttcaaatcattttcatgctttttaagtcaccaatccaatgccttgccttctgcatatggttttccttcctgcttttctaggctgattaagcccatctcattgcaagttccttcaaactgtctttcctacctcaaatttattccacttttcactctctctctttttctccccttctttcatggagggggtatatgcctcatcccatgtccaaggaaaacccctttatgtaccctgtgtctcctccctcacctctttcaggacctgtattgtctttcctctgctggccacccaataccctttggaaactttctccttcctgtaaacatgctcagatttttctattatcaaaagctgattacttacatacccagatttctctctcaggttagcatttcccccgatttttattgccatataccttaaaacagaaatcttttgcacttagtagccacttttgcagtctggtttctgcttctataattgtgatcaaattgtgcagttagacatccccagcagcttgatgcctaatgcgtcaacttttctctctctttctcctccttttcagagctctgcctcttcttctaccagttcactgctgtatttgacagttggctatttgaagctgtggtagtcaagacttttagtcatagataacatactttcaacacaaatacaatttggcacaaagggatttcattgaggtatatgggatatttcctggaatccaaggggataagatttcagctctgctcacgggtgatctagagtcacagtactaatgctcccagctcagtttgtcatctcagtgtatctgctctatgcagaccaactttctcactgcagaccagctttctgttttctgttgtccccctagcagaaacaacacttgcgttttccttgtttcaggcccagccatgtggaaatcagactttttcccaaaattctggtggaaaaatgcccacacctggccagaggagggtggggttggtcatagcataatacaaagttggaagttctacctacaactttgtgtttggagaagtttggatggggtgggtagtgctgttccttggcagataaccaccatggcatcacctaagaaatagtctccttttttggcttcagtgtctttactcagaccaccttccggagctcttctctttctctggatctcgtctccttactctaaacctagctggcttgtgcgattctgtccttgagcctcttctaatttccaaatgtgctcatctccgatctgactctgaaagcctgtctccagctctggttgctttatgctgtgactaacctccctccttttctttgctcatgctgtctcctctgcttggaatgccacttccacctccccggtatcacctattgaaatcctgtttctcagggcctgcctcctccgtgaaacttttcctgagccccccagtcatacctggtggttcctctaccttcctctgcacttgtccttctcctataatgtttgccaatggatgcttttgctttagggtaaagtcacttacatactgtgacttacgttcatttttttttctttccctttttttttttttttttttttttttactttcaggtgataagcttatttagttaggagccctcttctatttatctttgtattttcatacttttaactgatttagcatgtttatcataggtactcagtatacattgagttggatgtgttgttaacaggctctaaaattattttaatttaaattagtaccagaggctaaacttgcccctgtcctgtggtcttaaagtgaagggattctgcctaaaggaaaccagacaatcataagagccttactgatgaaatgtgaaaagtgcagaaaacccaaagatgaaaataaaaaacatctcactgtctaggcattgtcagcatctaggtgtatcttacagggatgtagttttgaaccataattggtattctgttgtatatactctcatatttagagaggtaggcatttttaatacagattgagaataaggcctgttgtctatcccagaattttaagtttttagggcttctggttttcactatttttcatttggcaaatatgagatgggtgtggaattaggcagttcaaagtcttctgggcagatttgccttttgaatttaaaccacctggcttcacttctaaaaatctacttttgtacctcttatagctcttctgccccacccctgtcttagtctggcagagcattgtgttcaagctaatgcctgtttgtaagtcacgggcttaaggcctgagccagaagggacagtggagacaaactcacccactgccttggttcatagatgaggaagtggaggcccacaggaggaaaggcctttgttctagctattaagttagagaactatggtaaaattttgatcagctgtaatcctccattctagaacattctaattctctcttttggtaaaggaaaggtaagtagcaactggatatgcagggtttttaagaccaaaaaaattcaggaattccttagagatgtccagattccattctgatccctgtgtcctgtatcattattgtcttatgtaagacctgcccttgaagacataatcccacattctcggggaggaagtcctctaggaaggatgaataaagtaacgtgccatcaccttgtctttcctaggatctctggggaacagcacagtgtagttgaagcattggcttatgactgagataatgaggccactcaggtttggtttcaagctctggctttggccaaatgtgagggttagctaccctattacccatcttttaaagcaaagtatttgctcaaggtcacagggcaaaatagcagagttcacacatagacttatcacttactccaagcccttaagcactctaatgcctctcatgcctctccactgccctccacctgaagtgggcctcacactttcaagttccctactagctctgaaagtctaagtgggtgatcactgagcctttcccctggttccagctctttagctgctctggttaactggctctcatgggattgggggtgtgtgattgcagtcaccggaagaaaagaatgcgacagctgcagaagaaaataaagaatggaacactgaacataaagcaggacgacccctttgaactcttcatagcagccacaaacattcgctactgctactacaacgagacccacaagatcctgggcaataccttcggcatgtgtgtgctgcaggtgggtggcttcctctaacctgtgattgaagtcagagtcttgagggttgcttgggctgcctggctttccactgggaacagatgtacagtaaggagaggagagtcccatgttccctatgcccaagcattattagtggaagtcctggccactttccaaagtacactcggtcacctaccccatataaaaagagaattttaaatcagcacttgtctagagacaccagaactgaagtgatgagttattataacgggttctaactagctaaagctgataaagcaaatgccagagactttgagtgcctctaggaccctaggtccttattggcattcaccaaagactttttttgtccagtgagcaatgggacttgttttccaaccggatatagaccaatgcacttaaatgtcctgtccagagtgcctgagtggcatacccaccatgaaggcccctctccccttttctagcccttaaaaacccctcactttacctctcagagactacttggtgaatttctgcactggtgtgtattctcttgcctggcaagttaatagactaagtttcactttgtgtgtgtgtgtgtgcatgtgtgtgtaagcactggtggtctttgttttattctttgtttctttgattcctgtgccacctcccttccccattctcccaaaaaagacaagacaaaattaagcacaaatcctcacatttttgtgtgtttatcatatacacttacaactgtgcccattattatgtcaagttacataccttgcaaaatatgggttgtctcctatactgctggcttgcatctcaccttggaggccaagaaagagggcattatgcctcattttcacctttactcagggaaatgccctgggttatcactgattggtagggagtggtcttctacttgctgccatgatcaattgcctgaataatgactcctgtgagcagtagctcccccatgtagtatagttttgtcaaacaggtttgagctataaatgtcagaaaatgtaagatgtttctgaaattcaagtatgaatcagtgaaggttggaaaatttgtttccaaataggattttatcagagacatttttgacatataaaactaacaacgtctctaataagagacccgtttttggcatataaaaccaggtattcgtatattcgagggtttggccctcttctgtggtacccctgtgtgtgtatcctgggaagtcaaggtgggaacaggtatggtcttggctttgtgctctgaagtcttctttttgccttatcacctggcttttggttaagagtcccttgggttgggccaggcgcggtggctcatgcctgtaatcccagcactttgggaggctcaggtgggtggtgagccaagattgcgccactgcactccagcctgggcgacagagcaagactccatctcaaaaaaaaaaaaaaaaaaaaaaaagtcctttgggttgctatttgcatgaccagccctttctaacgcccccttcttccaggattttgaagccttaactccaaacttgctggccaggactgtagaaacagtggaaggtggtgggctagtggtcatcctcctacggaccatgaactcactcaagcaattgtacacagtgactatggtaagcatctgttttttaacttaattgtgagggttcaagtaaatctgtttttgctgtgttctgctttctttaaagaattcctgttgggcagctccagtgagtagtcagcacagcctctgggctaagagctctttgattttaactaatgaaaaagtcactacagttaaatctcagggtccatgagtatgcctaggaatctctgaatttcacctttgttttcaggcacttgcaaattctacaccagtgagattcagatatgatacagcttttatgtagttaaattttctggaatgatattgtacaaggagcaatgccagtgcctaaatttgtgtattgcaaaaaaaggaccatgtgcagactgctcactggcccttatcctaatggatgacgaaggaacatttgccagttgtactccagtttggcaagaatttcaactccagcagagattgtgttctcccaaagcaaaagacactgactgaggacatggtgaggaattagggatatgtctcacctgatgcagagctggtctcctcactttatcagcgttgccaagtcagtgttcagaggcaagttttaagtcatgcccatgtccagcagctcagtaatggtggtcggattggacttagggtttcctgagctgcatttatctgatgaaatggactttcctcaaatcttaggggctgtttcctgtcattacttctcccttcatcacttgcactacagcccttttggcctcctcaaatgtcctcagacatgcccagcacacactcctgcgagggcctcggcacttgctgttcccactggaatgtgcttcctctggacctctgcctggctcgcttcctcattgcattcaagcccctgctcagatatcacctcatccatgtggtctttcctcacaccctgtttacagtaggcagctccgcctgtcactccttaaccggctttatttttcttcaaagcacttgacaatgacctaaagttattattattatttgtctgtcctcctgtactagtctctaaatttcactggagggccgatcacagtggctcacgcctgtaatcctagcactttgggagcctgaggtgggcggatcacctgaggtcaggagtttgagaccagcctggccaacatggtgaaacctcgtctctaccaaaaatacaaaaaaaattaaccaggtgtggtggtgcacacctgtaattccagctactagggaggctgaggcaggagaattgcttgaactcaggaggcggaggttgcggtgagctgaggtcacgccactgcactccagcctgggcaacagagcaagactccgtctcaaaataaataaataagtaaataaatttgatgggaacagagagttagttttctttgctgttgcatttccagatcttagaagagttcctggcatttagtaagcattccttagatagttgagagtgaatgaatgactttgtgctcacatcagtttgttcttcctctccctctgacatagctacctacttacccttcaggcctcagcttatctcagagaggccctccctcactaccctacataagtgacccccacttgctatccgtgcagtctatatttcatatgtagcatttgtcaaaatttgtatttatctactaatttttcttcctccatccattatactccaagtgccatgagaacagaggtcatgctttgttcattagtgtatgcacagcatatctggcacacagcatgccaattttatgaaataaatgaatataacttaggatgctaggaaaaatgtggaaaagtgaaagattttaataagcaacgttgcattcagtgtctgatcccagtttcagcaaataccatttggcacagcagtgtgtgtgggagtgattttgtttccagcaagattgcccatgtctccttggatagagctttgtatttggaccctggtcctcagcactgtttgcatgcctttgttaatggatgttgtctttctttgttaggatgtgcattccaggtacagaactgaggcccatcaggatgtggtgggaagatttaatgaaaggtaattctatagttccccccaattgtggggcagccacattgggagggacatttttatcttggactcaactgaaaactttgcttttatattggggaaagtagtacaatattccaaaaatgatgagattcttgacagcagcagcagttgtgagactaactggaagcagtgaaacgtggtggaaagttggagccaggaaacctcaattttgtcttgctgctggccttgacagctcagttaaaccaggttactctctctggttcttagcttactcatcttttaaatgagtgatttttctggatcactgcttcccagaagatatttcatagagcagtagtctttccaaactttttattatgaatatgacgtactggcatagtaaaaatgattaagagaaatatgggaggtggggtgagatgtaattagaggcagaaaaaggcgacaaagtgtttcttctgagcaaaggaacacccataatttcaaatatggtgtacggtttgttatctgaaattaaatttgtatgtatttatttttattttatttatttatttttttgagatggagtcttgctgtgttgcccaggctggagtgtagtggtgcgattttggctcactgcaacctttgcctcccaggtcgagtgattctcctgtatcagcctcccgagtagctgggattacaggtgcccgccaccacactcggctaattttttgtattattattattatttttttgagacagagtctcgctctgttgcccaggctggagtacagagacacgatcttggctcactgcaacctctgcctcccgcattcaagcaattcttgtgcctcagcttcccaagtagccgggattacaggagcccaccaccatgcctggctaatttttgtatttttagtagagacaaggtttcaccatgttggccaggctggtcctgaactcctgacctcaagtgatctgccccactcagtctcccaaagtgctaggattgcatgtatgagccaccgtgcctggccattttttgtatttttagtagaggtggggttttcactgtgttggccaggctggtgtcgaactcctgacctcaagtgatctgctcactttggcctcccaaagtgctgggattacaggcgtgagccaccgtgcccgatcatagaacactagtcttttaagagggaacatatgaggagggtttggccatatatgtctgggaaacacctataccgttttttcctttatgaagatttgccccagcctgttgtaatctctgaaaagtcttgcagcagcagggacctgtttaactgattgtttcccaaatttattttaccaaaaaaatttatttttttgaggggtgtgggaacaccagttagcaccctgtgaaacaccttaggaaattttgacctaaatcagtggttctcatctggagccatttggccccctggggacatttggcaatgtctggaaatgttttgatcgtaatgactttgggagggtggtggtgggtgccgtgggcatccggtgggtagaggccagggatgctgctgaacaactggtggtgcacaggacagctccacaccaaagaattatctggtccaaaatgtcagtagtgctgaggtgtagaaatccgagccttgatgaaccctgggggcctttctcattttaaccatctgtgatgcactaagtcagtagaatgagcagatcaggaggagcagctgtgtgctactgaatacaacagaagcctatgaaatccttttcttgcagtgggaggatgtttgaattttatagtcaaacgcatttttttccctgcttgcaagaacgtttgtattgtatttctttggggagctttcctttcaccttcttccttttttttctttttcctagtgacaaaagatgaattcatttgtattttttccctgtgtgactggtgatcatatgggggttgggtttggaattccccatttaaggatggcctgaaacacctcagtgctaaagagcaagcctgggaggatgaggagagggccacgtggtgtagggaatagtggcagtcatgcacaacaggagggcttctaattgatctcctgggatgagtccttggttttctgatttgctgtataaagtatgttcaggtgccttgtggaggaggtgctgaatcatctcacactgctctccaactaggttttagctttttctggctttcttagagacacttggggccagttaatttttttgaagaaaagttatactctgtatagacattgcatgccctccccaacacttcattgcagcggttttgtatctcaggtttattctgtctctggcctcttgtaagaagtgtctcgtcattgatgaccagctcaacatcctgcccatctcctcccacgttgccaccatggaggccctgcctccccagactccggtgagtctgtgctggggtccaggaatctgggggaggctacgttttctgtgttgttcctcctgtgacagtgacagaccttccccttctcctctctctggtaggatgagagtcttggtccttctgatctggagctgagggagttgaaggagagcttgcaggacacccagcctgtgggtgtgttggtggactgctgtaagactctagaccaggtgagtgtggtgctcagcacttccaacacaaaggtagtaaaacatagcatacggagcgtaacagaagccaaggtacgttgactcaagacccagaccctccctggagaaggggacttttccccttgctcatactcgtgtgtgctcagcaacagtagggctatttcatgttgtgtgggttcccaaaagaagtctggggattacctccccctagtcaggctacagatagagcagatgaattattattattattattttttaaaagacggagtctcactctgtcacccaagctggagtgcagtggcatgatcacggctcactgtaacttcgaacccctggcctcaagcagttctcctgcctcaacctcctaaggtgctgagattacaggcatgatccactacatctggacagattacattgaaagaggaatcctctcaccactttttccaagagagggcaacatacctgtgttctgaaatttcagttaagttttgatgatataaaggcttttgcctatagcttattcagaagtgagaggagaacttgaggcccctagtctggtatttaccctggttccagtgcgaggcctgatgagggccctctggggtaatacgtacctggtctttgagtgcaaatagcaggctgggtgagagcttacaggttgcatttctgtgctcattgaggtggtctgcactggtaaacttggcttctctggtggttcctgggccatgatgggaactgactgggcacagcccagaggtctttgaactgtcaggtgtgttcagggttctaggtcaccctgagccaaatgagcagcatgggtcgctgcccttgagagggaagatagctgcagtgacacctcccgcttagggctgagtcccagcaggctggcttcccttttcattctggaaatatgatcagcagctacatagctctctatgcagctccagctgcaggccctaggcttttttgattcacttcctggtaccctctttatcacaaaagagaaggagtgagtgataggataaagcaggagaaactgattctagttaagtagtgttataagaaaacaaatggcctatgaccaaaaaaaaccaaaaagttaatagaaaaagagtacataaaaaaataagaagtggtgtttccacttggcagtttcactctgcagaaacaactgctattaacagtttattatgtatcctgctgcctcttttttcatgcacataaatgaattaaatgcgaaggggtcatactacagagtgtaagtggtcccctgttagacatttcgattgattccagcatttccactgttagaaacagtgctcttaggggattcttacagataagtctgtgggcactatatttaggatacgtttccagaagagaagttgctggatgagaggttgtgtgtattcaaatgggtgttgtaccagttgatggaactatccagtgtgtggaaatgcctttttctctacaccctcgcagccgtgattcctagtaaacttgtaagtctttactaatctgatatgagaacataggaccgttttaatttgtgttgctgctttaattaggagagaggagggtaccttcttcatataattattggtcatctgttgttttgttgttgttgttgttgctgttggttttttttttttttttttttggtgagccggtctgcttatttcctctgcccactttttacttggattttggccttttttgtattggttcttcattttaggatgcattttagtctagatttggtaccattctgttatgtcattggatttttcagagtttataacttctataatataaaacaaaatgataaaatacagccttcaggcaaggccaagttaaatacgacctggattccctttgagtattttcatctggagaaactctggcttcctgaagcctctccccttccatctaccttggcctgtgtctcttcagtgtcttcttagcatcattgcctaggcaagcatgacaacttctcaggaccatctggccttcttcccaccctcaaacacctattcccagcacagatccagctgaggagcaaagtttggcccctaagtagttagtggctcctgtccttcagtgtcactggcatcttgcttttacttctaggcgctcctgtaggcactgggggcccagcagtagacaagagggatgcacctgcttcatggagcttgcctcctagtgagatgagacagtcagtaaataaaagacatgagcagaccatatggtgaagcagaagatgctacgtacaatgggaagaaagaaaaagttgcaaagagggatagggcatgccagatgagggtggggcgctgtggttctacatacaggggcaggggtggcctcatgtaggaggtgattttggagccaagccatgaaggaggcgaggtgaggaaacaagccctgtggctcttggggagccactgcttcaggcagaggaagcagcatgtgcatgggcctgggggaggggtgtccctccggtgtcctaggcctggcagggaggctgaggggctgaagcagggtgagtaggggtggaggaggagatttttggaggatctttcaggccactggcagggctttcacacttactctataacagatgggagcagtggaggcttttatgcccatagtctcctttcagcacagctgccagaggcatccccaggcttctttttaagaggatcgtctggctgctgtgttgaatatagactggtggagtgagggtggcagcaggaagactgatcaggaggctgctgtcatgatggaagaaggatagggtggtggctttgagcagagcagtagaggaggatagtggtgtaagtaagaaatggtaggattttatatatgttttggaggtaacaggattcgctgacgaatcaagttatcagggaagaattgaggaggctttggcccaagcagttgaacagttagatggggaagactaggtggaggaggtttggggcaactttaggcgttcagtttaaagtttgagatctgtagtgtacaaatgggaatgtacaggaagcagttgcatgtgtataaaagtctggtgtgggccagccaggtgtggtggctcacgcctgtaatcccagcactttggaaggctgaggtgagcggatcacgaggtcaagagattgagatcatcctggccaacatggtgaaaccccgtctctactaaaaatacaaaaattagctgggcatggtggtgtgcgcctgtaatcctagctacttgggaggctgaggcaggagaatcacttgaacccaggaggtggaggttgaagtgagctgagatcatgccactgcactccagcctggtgacagagcgagactctgtctcaaaaaaaaaaaaaaaaaaaaaaaaggtctggtgtggaccaggtgccatggctcacccctgtaatcccagcactttgggaggctgaggcaggcggatcgcctgaggttaggagttcgagaccagcctgcccaacatggtgaaaccctgtctctactaaaaatataaaaactagctgggcgtggtggcaagcgcctgtaatctcagttactcaggaggctgaggcaggaaaatcgcttgaacctgggaggtggaggttgcagtgagccgagatcgcaccattgcactccagcctgggcaacaagagtgaaactccatctcagaaggaaaaaaaaagtctgatgtgcagggaagtggtccagactgaagctgtaaatttgagttatcagcatctattaaaaattggtaccaaaggccttgagactgaaatgagatgaccaagggagtgagaagtccaggtgctgagcagtgctttctggcctgcaagaactgccgccctcttatttagcctggcatcaacctcacttctccacagtgatggtgatgaatggtggaaacttgggtctttcttggagttcacctaatatgtttctgtttccacaggccaaagctgtcttgaaatttatcgagggcatctctgaaaagaccctgaggagtactgttgcactcacagctgctcgaggacggggaaaatctgcagccctgggattggcgattgctggggcggtggcatttgggtaaggggattcagtcccccatctttaggaactctgggctctgtgggggtagtgtgcagggttggggtcagaggactggtatctcacgttcctagttctgagttctgagtgggttcagtgtgtgatttctctaggtcttgatttcctgccaggaaacagcagcactgtttccccaacccaccctaaaggtgcatgtttacttgtgtgtacacacagacacatatataccagggcctttgtaatcactatttacagttgaacaaacatgcagaggcaaagaaatgggagtaagaaactttacaactcagggcatgagaatgtgtatgaccagccttgctgactgagaaaagtacaagtttgacattttaatgattttgattaaaagaagctttctttggcttctgaggagctggttttaggtgtgatgttagtttctgtttttttctactgggtttggaagatacatgcagctgccaatagagtatgttcttccaacttctcggccataataatgaacctagaacttactgtgtttgcctttgtgcattatcttccttggtgctctttagagctctgtgggcattttatagatgaatcaacctaggtttggggagttccagtgatttacccaagatcccccagcaagtcagtgctgatagagctggggcttgagcttagctcctgactccttgtccttcgttcttcctgctgctctagctgtaacagtcagcctcttagccattagcatctgctgttagcatcctttatactcagcaaggcaaagctaacttggaggttagctttggccttggcctgagcaccgattgagctccccagcttcaccatttgaaagcgtcagcacagctagtgatgagcatgaaactacttcttgtagcagtgcactggattgggaagcagtctgtctgttctgcacaccgagggcgttgtctccacagtgcttctaagcagcttgctttcacagatgttggtagctaaatgtctggagttgctttactttccttcccaaaaggtgtcctgactttttcccttgctgttacctctggttatcacctttgggacaggagcaaacaaaaatattttcttttttaaattgtttctttaagatgttcctaatttcttaaaaatccttcttttattttgttctgtaggtactccaatatctttgttacctccccaagccctgataacctccatactctgtttgaatttgtatttaaaggatttgatgctctgcaatatcaggtaggaaatttggattaagaatttttattttggacctggtgtggtggctcacgcctgtaatcccagcactttgggaggccgacgcgggcggatcacctgaggtcgggagttggagaccagcctgaccaacatagagaaaccccgtctctactaaaagtacaaaattagccgggtgtggtggcgcatgcctgtaatcccagctacttgggaggctgaggcaggagaatcgcttgaacccgggaggcggaggttgcagtgagctgagatcacgccactgcactccagcctgggctcgaaactccatctcaaaaaaaaaaaggatttttattttgatacagtgctgggtttaaatccaagtgaagtctttagaatacttgcttactttcataatatttagtttctgaaacttgtttctaaagtttgtcattggtttgactccccaccaggaacatctggattatgagattatccagtctctaaatcctgaatttaacaaagcagtgatcagagtgaatgtatttcgagaacacaggcagactattcaggtgaggcttgttctcagaccctgatgtgcagggccagtgtcttgctgtatttaactggctctaagatgtttcctgttatagacatgtatgtcttgtgtaattgcatgtcttttagacaatggtggtgttgtatgctaaacctgttccagattttcagactcttctaaagaaaaacattcagcaaactaacaaatatatgtagttagattgaaaagttgtgtttttgtcctttgaatatggaataagtggggtggaaagtacgctgattaactaaaagagaatctttcttctgacatcagctctaactttgcttagttattgcagtttttgaaatgttgcatctgtaactagaacaataaccttacagcttaaatgaaaaaaagaactttgcaaaatgtgctctgaatctttgtggtttagccagtggcctattttcttttttaaacagtgttttcccaaaagttctaaaaatctctagcactctgtaagcctgaatggtctgcacttgtccaaaggctgcagttttgctaaatctctaagagaggcatgaggtgatgggcttacagacggactgagactaatgggctcttactggaggaggttcattgattatttttggaattgggttgggaagtgagccaggtgaatttggcagtttataccctagcactttatgcctgtcaaagcatatgtatatgcatgtcaagaagttatacctttttatcagaggccagattataaacaatgttaagtgtttatgcctttcaccttaattttttcttactagcctctttctagaatctcttcattctgtacatttctgctcacttttgctcgattcccccagctgggaggaggaaaggctgctgttggtgagggtcaggctgcaggcaatgagaacacggagacctgttaaaactcaagaaaaatacacaaaccaaagaaggaaaacatttccctgaaataccctgcctcgggccttgctccttcttgaatttgtaatcaaatactctctcatattaccagagttcttttgtctccagtgtgagcacagaggaggtgaccttactttatgagactccatttgtgtacctttcaggcctctctttgggctcaagattgagaaaaagaagaatattagataaaagttggcttcacctcccctggggggctgctttctgctgcttttatgagatgcttgtttagtttttcccttgaagaagacaagatctggggccctgttgaggatgtacattctgctgctagaaatgagcagggttggccgggcatggtggctcatggctctaatcccagcgctttgggaggctgaggtgggcgaatcacttgaggtcaggagttggagaccatcctggccaacatggtgaaatcccatctctactaaaatttaaaaaagttagccaggcgtggtggcatgcgcctgcaatcccagctactcgggaggccgaggcaggagaattggttgaacccgagaattggttgaaccctggaggcagaggttgcaatgagccgagatcacaccactgcactccagcctgggcgacagagtgaggctttgtctcaaaaaatgaaaaaaagaaatgggtggggttgccgcctccctggcccatcagcttgtagcaaagcagaacatcttatttgtaatgaaatagttcaaatgtataggagcgtgcagagaccaatataacattcaggcacccaacactcaggtttaagtattgttgacattttgatgtttgctgtgtttgtttcatatttcaaatgtcatttagatttttgttttaaagaactaaaacatcacaaatacagttgaagtccctcaacccctttccatcctatttccttctgtccctccccatgggtgacttagttctgatactggtgtgtgtcctttcagttcatgtgtttctatgtttactacgtaattatctgtccataagtggaaacatactgtacttgtcctccttcagctttccttttttaacatttgttttcaagatctatgcagattaaagcttgtagatctggttgattgatctttaggtattatatgagtaaattatatttacatgtatgtttctcaaagtggagttgttgggttttaggattgtgtagttttccagcttgcttaaaatttgccaaattctccttcaaagtgtttataccagtttacccccatgccagcattcatttgagttttaatttctctaagacctcatcaactctggatgttttaacagctatttaagttttgtgaaatggtatctccctgctgtctttagcatttcactgattattgttgaggttgaatatctttgtttatgttaattggttattcaggtttcctataagatacctcttcattgcttttcaaaccactttaaaattagcaggaagccctgaagaaactgaagaggttgtttgtatgcataaagatatgtaagtgtttatgtattaagaaaataacaagttctagaaatgtccgtcagtgcagggagacttggcccttgtaatcatgccatcagagcagggagcacagtgcccggcatgagaaatccgacatcctcctctttagccaccactggggtcgagctatgcctcgagctcatcggctttccttatctgaggctgggggaaaacgtgaggagacaaaggagagaaaggaaagggagccaccatctatctctcagcactgtgagtcaggcactgggcagggcatctttatatacctgctttatttttccttcaagcagccataagataggtatttccttcattttacaggaggaggagtctgaggcactgtgggattaagtgacttgtccaaggtcatatgatcagtggccgaactctctgaacccaggtgtctgactccaagcccatcccatttttgccctgccaggaaaaagtagaaaggaggaatgagaggagagaaggaaacagggagagagaggaaagagaacatcctttatgatgagtcgccagtaatcacagctgtgacatgagttcactatgctaataatctaaattttccttccccatagtatatacatcctgcagatgctgtgaagctgggccaggctgaactagttgtgattgatgaagctgccgccatccccctccccttggtgaagagcctacttggcccctaccttgttttcatggcatccaccatcaatgggtaaggtactgtgggcaggagtccttactcccgtggcaggctcttgcagatttaggggcatgtagtggatgtggcctgggcctggacagccaagtctgattctcagagtctctgagtgtttgaggctgcttcattctctactgggcttctgcaaatggaaactggtctcttaatgaactgttacacgtctctggcccgacatgaaatgggcagtgtaagactgaagaattttagtctgatgtgctgagtgtctgcttctgtctgtaggtgtgataaaatgttgaaaaatacatggatggtgataccaatatcttatatcttagaaaatacagtattaaagtactataattatcataagaaagcaagctcataatgactttttttaaaatttgaaatatttaattttttaattagaaatatttagtgttggctattgaaaaattagaacaggtaagcaaaagaaaaatcacctgtagccaggtgcagtggctcacacctgtaatcccagcacattgggaggccgaggcaggcggatcacaaggtcaggagttcgagaccagcctgaccaacatggtaaaaccccatctttactaaaaatacaaaaattagctgggtctggtggcgcgtgcctgtaatcccagctactctggaggctgaggcaggaaaattgcttaaacccaggaggtggaggctgcagtgagccgagattgcaccactgctctccagtctgggcgacagagcgagactgtctcaaaaacaaaacaaaaaaaaaaaaaaaagaaaaatcacctgtaattcaaccatctggagatagattttgttagaattttgatgtacattttctctgcatttattttacttttttcatttgaacaagaaaaacatttttaatttgcattttgaatataacaatattgtgaaatcttttgaggtcagtaaatatgtatctccaatattgggaagatttctgtatagaaatcacatcttgaagagattattctgtatgcagatttattgtgactgctttgcttacactgaaaatactgaaataaaatggatttttacttttcaaacagctttattgagatataactcacatactgtactatctatccatttaaaatgtgtaatttaatggtttttagtatgttcacagagttgtgcaaccgtgctcaccacaaccaattttagaacatttttatcaccccataaagaaagcctgtgcatcctcctccagttcctccacaccccccaaccctagggagtcactaatctactttctgtacccatagatttgcctattttggacatttcatataaatggaattataaaatatgtggtcttccatgactgacttgtagcatgtatcagtatttcattcctttttatggttgaatagtattctattgtatagatataccacattttatttttccatttatctgttggtggacatttgggttatttctccctcttggatattattaataatcttgctttgaacattagcgtgcagatttttgcgtggacatgtttttcagttctcttagggatacacctaggagtgaaactattgggctaactctatgttagaccatgcgaggagctgccagactcttccaaagcaattgcacattctacgttcccaccagcagtatgagggttctgacttttctgtatcctctcacacacttattatgtatctttgtggttataaccattctaataggtgtgaagtgacctctcgttataattctcatttgcatttcctggtgactaatgatattagcatctttacatgtgcgtattggccactcacgtatgttctttggagaaatgtgtattcgtatcctctgttcatctctccaattgggttgtcttttttattaatgatttgtaagggttctttatatattcttgataccaggtcccttttcagatatgatttacaaaaattttctcacattctatgggttttttcactttcttcttcttcttcttttttttttttttttttttttttttgagacagactctgactctgtcgccaaggctggagtgcagtggtgtaatcttggctcactgcaaccttcacctcccaggttcaacccatttctcctgcctcagcctcttgagtagctgggattacaggtgtgtaccaccatgcctggctaacttttgtatttttagtggagacggggtttcaccatgtttgtcaggctggtctcaaactcctgacctcaggtgatctacccgcctcggcctcccaaagtgctgggattataggtatgagccaccatgcccggccactttctttataataatgtcttttaacgacaaaagttttgaagttttgttgcttgtgcttactcttttttcttaaataaataaataggatacttttgggagagctttgttatgtggtgtggagagtgggcataaaacatctagcttttatcattatttgagtaagaggaagtattttacagtctttgaatataataatgagtactatgaaatgatgtaatgaaaagtgctgtgtgtaccctgtggtgacatatgcctgtgactaaagacaaggagaagaaaactcaacaatgaaagctgattgagttatcagattataggtgatttaatttttttctcaacattttttagctattttatgtcaccttataagtgggcatagcaatgaaaagaattactgaggtggtggatttgttttattttccaaactggaaatgttctcagttcatttccttatgcaccgtacttctaaaagcagctccgttagttgaccatttaactttgttccagcttcactaaaactgcctaaagcctttatgctaaaggctttacttacatcctttttccagtccttattttttaagttcacatcacagtcctgtgaggtgtatagaataatcccctcttgaagatgaggcgaaaagagattcagctccttgcccaaagatactaagtagatgagccaggacgtgagcccaggcctgggtggccccaagctcagccaccgtgccaccctgcctcctttggacaggtgcctgctatgctggaagttcagagatgagcaaggctgtcctgggggaagcaggggtctggtgtttcagcaggtggaggaaagcagctctctgtcccctcctagacagtggatttgggaccttgtgcctgattccttttgcctttgtttctagctatgagggcactggccggtcactgtccctcaagctaattcagcagctccgtcaacagagcgcccagagccaggtcagcaccactgctgagaataagaccacgacgacagccagattggcatcaggtaccccagaacctgacccgggtcccgcggttcacagcaaggcccttcagtcttactgatcctcgcttcccctgtgacatcatgggaagcaccaaaccttcccaccatcaggctgagaggttgagtccccaagaggagaagtagcttttttcggaggaacagcagtccagtgaccagatgggagccagactagggccttctgatggtggggcccttgtgtgtccttgtctcagggcatggttgcattgagatccctttggggttggtatcgtggcaagttgaatatccaccaaaaacaattttaaaccacccagtttaaattcttaccacacgtctctggccaccatgggacaaatataaagtgaaacatttttccttgcttttttagacaatacatatttaatcattgtttcttcttttgtgtgtgtgattgtggggagcagcgcggacactgtatgaggtttccctccaggagtcaatccgatacgcccctggggatgcagtggagaagtggctgaatgacttgctgtgcctggattgcctcaacatcactcggatagtctcaggctgccccttgcctgaagcttgtgaactgtatcctcctctgggtttcactggccctgtgaaaaggagaggggcggtgaaagaattcaaaggacttgagtcctttgtttcataggatgctgctctagagaaaggggaaagttgaacattttcaatttcctttttctcttccttttttttttttctttcttttttttttttttgagatggagtctcgctctgtcaccaggctagagtgcagtggcacaatctcagctcactgcaacctctgcctcccgggttcaagtgattctcctgcctcagcctcttgagtagctgggattacaggtgccagccaccacgtctggctaatttttgtatttttagtagagacagggtttcaccatgttggtcaggctggtctcaaactcctgaccttgtgatctgcctgcctcagcctcccaaagtgctgggattaccggtgtgagccaacgcgcctggccctcttcttccttcttttatgtgtttctgcttaggacactgagctcctgttcccagctacggaaatttgttctgcctccagagagtagtatgacctgtcttcggctatttgttttgttttggtttcttaactccagacccaggtactatgttaatagagataccctcttttgctaccacaaggcctctgaagttttcctccaacggcttatggccctctacgtggcttctcactacaaggtaactgcagctagcccttgtgtgaatggtagcagggagcttcagcatttggcagtccccttttacttgatttgcatattttattacccaatggcttaggtgactgttccattgggacattgatgagttccactgatcttgctgtgtgtaggtatagagcatgtagctccatgcagtaacgggacagggtggaaagctgtgtccatttttaaaggagtgctttcatttcttgcctgcctactaaactgataggatgaggtgacattgcagttgtggcccggtggtgcagtttgacctgagaccagctttatagctctgggctacttttatggaacagtgaatttgagggtttagaatatctgagactcttaaaaacaaaagggttggttaaaaaggatactttttgaatgtctagatagtatttttatgaacagcttttaatggaaggcttgaagagttggtgttagaagtggtgacagtttttcctgaaatagcagcctcttatctgtaaaaagttcacttcctagctgtgaaataagtagtgctaaataaattctcttcttctgtccagcctcagtgctcggggtgagaggacagtaggcatttgaggctaagttccacttaacctgttatgaagagtctcaggcttgccaaaatactagaaaggtgctttgctggacttctgctcctcacttggctttggagaaggccatactgcagtcatcctgtggttctgaatcgaaccttttgcgtaaagggcaagaggaagagtgcttctcactgacccgtgtttggcttccacagaactctcccaatgatctccagatgctctccgatgcacctgctcaccatctcttctgccttctgcctcccgtgccccccacccagaatgcccttccagaagtgcttgctgttatccaggtataggagcagaggcgtccttgtggcagtgatttggggaaccactgaggcatcaggaattagtggcttaataactgcattgtgggagttttgaaactgtggagtcctggtctggaaccaaggggctgggtctgctgagacaggtgactagggtgcactggaagaggttagcgccactagacacccaaagctccactgttgacggacggggaaaagccagaaccgaccgctctcttattttgactcacagcttcttccacaaacagacttgtttgttttctccctttattacaaaagcaatacatggtgcattttgaattagaggctacagattggggaacaaatttttaatgcctagcatggatgtatttatgcatttctatatcacttttccttttcatatacatagtaatctgcttttatttttaggcagtgtataaaacactcataatctacataagttttaaagctgtgtagtatttcattatatacatgtaccatgatttgttcaaccattcacctgttagacattttagttattttgaacttgtgctgttctgtacagagcctcatgagcatcctgtgtcttgatggccttcacacacgcacagcatacatagagactctcttctaatgtggcttttactttttgggtcaggaggctgtcagtcttctgccctgtaacatggggcctggtaattaagctcctgttaagaatggatgtgtcaggccaggcgccatggctcacgcctgtaatcccagcactttgggaggccgaggcgggcggatcacaaggtcagaagatcaagaccatcctggctaacacggtgaaaccccttctctactaaaaaaaaaaaaaaaaatacaaaaaataagccgggtgtggtggtaggcacctgtagtcccagctactcgggaggctgaggcaggaaaatggcatgaacccaggaggcagagcttgcagtgagccgagatagcaccactgcactccagcctgggcgacagagtgagactccatctcaaaagagcggggggaatggatgtgtcagtgtcagggttaaacctgaacatgggggtggaaacaactggcctagttcgagaaacaagctatattctgtgagtgggctctgtatcagagttggcctttctgcctgcactgtcctgcttcccccacaggtgtgccttgaaggggagatttctcgccagtccatcttgaacagtctgtctcgaggcaagaaggcttcaggggacctgattccatggacagtgtcagaacaggtgacgggctttccctggtgtgtctgagggaagctggtggtgtccaaagatgtctgtgttgctaagttactggtttgtgtctcccacacagttccaagatccagactttggtggtctgtctggtggaagggtcgttcgcattgctgttcacccagattatcaaggggtaatgtgtcctcaggctcccctgaagccgtgttgctggcggtgctttagggtgggggtacttggtggctggaataagaagctggtcaagcagaagcaagtgaagtgtaggcacttccctgctctggagaattgagccagggttcggggtgggtgggtggacaggatgatggcatatgctcactcttcctttgtgagaacgaggacttgtgaaccagacctgcataacaaaattaccttcttagaacacctcactgagtaattggctgtagaaacttccttttcaggcaatggtacagaaactgcctctcatttgggcttgcccatctggagaccagaaagcacagccatccttaccctcaagtggctgttcttgatgagctagaccagtgttaagaactcgggtcacactactttcagtcttaagtgtctctgctttgacctcactcagggttttcattggttctcttgccccgtgctgtttgacagggagggaaggttctctagaagcaatgcaggggagtcactgtggcttagactgagagcagctctcttccctcggcctcttccccttcacgtttgctcctagatgggctatggcagccgtgctctgcagctgctgcagatgtactatgaaggcaggtttccttgtctggaggaaaaggtccttgagacaccacaggaaattcacaccgtaagcagcgaggtaagcatctttcgacagacctcctgtgtcctggttcttgggaggataattctctgggtttttaggggcatcaacaaaaaccagtccagagctttggacccctctctcattttcttctgctgctttctcctaccgaacactttagatcctcagatcagtatcattgggatcatctggcagcttgttaaaaatgtaaattcttgagccccactccagacctactgaatcagaaactctggggtagaccctgtaatctgtagtttaacaagattctcaggtgattctgatgctcattcaagtttgagaatcactgctctataatctctttcatcctacaccagactaagggaagttctgtcattccttgataagaatgactaatactagtaactgtgacagcctttcatgtgcattcattgattttcatagtatgtatatttgagagctagacaaggggcttttatttaagttgaggcagctgggcaacatggcgaaactccatctctacaaaaaatacaaaaattagccgagcatggtggtgcacgcctgtagtcccagctacttgggatgctgaggtgggaagattgcttgaaccccaaggttgaggctgcagtgagctgtgatctcgccactggactctggcctgggtgacagagccagaccctgtctcaagcaatgaaaaaaaaagttcaagctcagaggtttgtcacttcctaaggctgtcaggtgatagaacctggacttcatgctggatcacaggagcctgcctgtccctttgtaaatctgttgggcatttttttttttttttgagatggagtcttgctctgtctcccaggctggagtgtaatggcgtgatctcagctcactgcaacctctgcctcccaggttcaagcaattttcctgcctcagccacctgagtagctgggactacaagcacacaccaccgtgcctagctaatttttgtatttccagtagcgatggggttttgccatgttggctaggctggtctcaaactcctgacctcaggtgatccacccgcctcagtctcccaaagtgctgggattacaggcatgagccaccactcccggcctctgtcagtcgtttctaaactctttggctgtcttcctgcattctagaggtctgaagcagtgtgattctatgcatgttgaggtgttttgagaatgattgcttgactccggtgttctcatagtttgaaaaccacagcaataaaccaagaaacctctcccagtttttgttgtgctaagtccagagtgcgctgcggcagggtgcttgacgatgtctctctccctctgctgaatggactgtgttctctccttggcatcttcccaggctgtcagcttgttggaagaggtcatcactccccggaaggacctgcctcctttactcctcaaattgaatgagaggcctgccgaacgcctggattacctgggtgtttcctatggcttgacccccaggctcctcaagtaagtgcctgccctccttccacggcatcactccttggcattgagaaagaagagttctgtgggctgtgtgtctctgttggtagctggtatcggtgctagcctgctatttgtggcgtgctcttcctggctcttgcccttgtgtgtctatcagccactccccagaggccacacacagtgacctactgtctttgtatctttgcaggttctggaaacgagctggatttgttcctgtttatctgagacagaccccggtgagtgaggcatccagcagaggagaagtttaggtttaccgttatggtaggtgacaggcctgtccttgcaaagagccctagtgcctccctgctgcatcgctctgagcaggtggctgtgcctctgaagaggtttattctgatggacatggaaacagccatcctcagtgacaggccacatcatcacacatttcttctccgactacacggtgcatgcgttgagcttagtcataaaatggcagaggtacacgtggacttgttcatcagattctgggaaaggagagtggacaggaggatcaagggtaattcctagagttttggcttgagaaactgggtgttggaggtgctgtcggagatgggactcactgcaggaggagcagatttggagggaagagtgggagttcttttttgatgttaatatgagatgcctattggacatccaagtggaaatgtggactaggcattcatttgactacaggaatttggaggtagggaagtttggggctagagatggagctttgggagccatcagcatattcataatagaatgcactgcaggagggcacggagctcttgtctgttgtgttcattgctgtattcctcgcacttagagtagcaattgctgtgtagtttgtgttcagtaaatacttttgttgagtgaatgaaaaatatctggagccaatgaaaggatgtgagagtgactccttggaccctaacgtttagaggaatgaagaggaggacacagcacatacaagactgagaaggaacagccctgatgcgcaagagaaagtcgggtgtggtgtcacacgtcaaggtgaaaaagtgggaatgggagtcagccctgttgagaggatgaggaggatgaggacagctggccattggatttgtcagcagcggtgagctgcattgaagcagctgcagtggagtggaggctttggcctggccagagggaagaggaggtgaagaactagaaggggaacaggcgactctttcaggaagcgaaagggagcagagaaacaaggtcgctggagggagatgggcgctaaagaaggattgtccgatgggagattctagagaatgttttttgctgctgggttcgatcctgcaattagtggtatgggtgaggggggctgactgccagagtgcaggccttgaggaggtggtgggtgggactcgagattcaggaagagaggtgaccacctacttcatccttcggaacagggaaggcagagagcgtgggaatggaaggcatcagttggctggctgatctggggttgggaggatg

SEQ ID NO: 820 - DNA, 32742 bp, Homo sapiens; identical to SEQ ID NO: 689
  source 1..32742: mol_type = other DNA

SEQ ID NO: 821 - DNA, 9968 bp, Homo sapiens
  source 1..9968: mol_type = other DNA
gagatcacttcccttgcagactttggaagggagagcactttattacagaccttggaagcaagaggattgcattcagcctagttcctggttgctggccaaagtaagtagaactttgtaagtaatttgcagtgtactttgaaagtggggtataaattaaaaataaaatcaagtccccctactgactgaatggatcccctcttgtcctaggcgaccccagagaaacctggaaaactaaattccaggccataatggaaagggaggtcagacacgcctcattatacacactcccttttggagttcaggcacaactgaccagcattaacattgaaacagtgatcataagactgtcaaaatggactgtttgtgggaataagataccaaattccaatctgactctggtttagcatcacatgacaatagcagaccctgaaggaaatcaatatatttaatccccaaaatatatttctttgacacatattgaaatggtcttgcaaaaccatcttttatggggaaatttgctggtttctggctctgctctgattgaggagagaataaatgagagtctgacaccttaaaaatctgaaaagagatatttaccatctgttttctctaaggctgctagctggaggtttcatctacatgacataaaccatggttcccataagcccttttaactcaagcatttaattgtactgaccgcaagtctttagacaaaacttaactcttcaacaaattgccaatcacaaaatctttgaatccacctttgtcctgtaagctctcctacttcaatatgtctgattttcaggcagagccaatgtataccttatgtgggggccataggctgttggccccctaaagcttcactaaaagtcactgtcatgtgacaggttgattaataggggaaagggagtacaaatttatttaatgtatatacatggtctattagccaggaccctttagagggccagaactaataggatagatgtatacataaaggggagtttattaaggagtagtgagtcacatgatcacaaggtgacgtcccacagtaggccgtctgcaagctgaggagcaaggaagccagtccgagtcccaaaacctcaaaagtagggaagccgacagtgcagccttcagtctgtggtcaaaggtccaggagtccaaaggctgaagaacttggagtttgatgtttgagggcaggaagcatccagcacaggagaaagatgtaggctgggagactaagccagtctagtctttccacattcttctgcctactttcattctggctgtgctggcagctgattagatggtgcccacccggattgagggtgggcctccctttctcagtccactgattcaaatgttaatttcctttggcaacaccctcacagacacacccaggaacaatactttgaatccttcaatccaatcaagttgacactcaatattaaccaccacacttgggaaacttgagaatgaagacccaacttcccagtaagttacagaaactcatgtattattccgaggccacagtaaagagtggagactcaaagcatggccagaaacaggtaaattagttttagtggcaacacaggttaagagagagaggaaggaagaagctcggctagcaaaggtggccttgttatgtagacgaaccttttctcagaagcaaaagatggtaaatgtttctatccagatctttaaaggtgtcagactctcaatcgctctggatcctgggaaaggcttagaaacaggagagggtatggctgcattaatggacattgtccacagacgcaaattttcctcagttaagacagttttgcaatgccacttctgcttgttggccagtggaaaccatttttaaatatgtcaaagaaatatatttgagggtaaaatattttgattttcttcagtccccactttgaaatttaaaacaagtttcacatactaaaagccaaggtaatagctttggggagatttaagttagaggtgtttagatagagacagtcatagcagtggaaaaacacatttgggataaatataaatgagcaaatttaaatatatcattccatattttctttaggcagtcccttggttttgaggtgagatcagttcagttaaatatctacgtcccattccaggaggtgggactgcaaatggtttaggcctttagacgtaatgtaggcaatcagatttctagtaggaggcatttctgtagaaacagaaaaaaataaataaataaatgttactatctggagtagtctatatatctagaaaagctagtctatagctttttctctgaggcgtcttcatattgcagtggcaatgtcccagatttccctggaagttcaaaccaggtgttccactgaactttctgagaaggcctcacatcagcagatatgcatgaaggttgtttataagttactgttattttctcctgataccttcagtttgcaagactttaagaaaaccccagttttaatttctagtgaattcaagtaagaaaaatgggagaaaacgttgaaaatgttactttgcagacttgtagccagaaaaaaattcaggatttggtctaacttgtaaaaaataataaaaactgaaaaaacaatgggcaaggctagaagatactaacagatacactatagtttttgaaacatagtatttctgcttccagttcttcaattttatgaaagacatagtttcatgcacatccgtgtgaagagaccaccaaacagactctgtgtgagcaacatggctgtttatttcacctgggtgcaggcgggctgagtcctaaaagagagtcagtgaagggagataagggtggggccattttataggatttggatagataaaagaaaagtacagtcaaaggggggttgttctctggcaggcagagtgggggtcacaaggtgctcagtaggggagctattgagccaggatgagccaggagaaggaatttcacaagacagtgtcatcagttaaggcaggaacaggccattttcccatcttttgtggtggaatgtcatcagtaaggcaggaaccggccatctggatgtgtacatgcaggtcacgggatatgatggcttagcttaggctcagaggcctgacacacagtagaactgatttatttgcaaaataagttttgttactatacttggtctgattttttgcataaagggcagcaagaataattatttactatataggctcctttttaaaaaatggctttgctggaacattcttttttgtaaagaatctcatattagacctcttaaaagcatcctgagcccaaccaaggatttatctgtttctacgagatacctgtatgaattaagtgaattctctctcaaggtcccaaaataagttggggttcctgggcctgtcagaatgtgaccttcttttacccattacaggccagaaacctgtaaaggaacctgtaaaggaactgcatagacaagctgtgaggccagttttatccacagggctattatcagctttataaagtcccaatatcaatttcttaaaaatagggcattccagtcaaatccttgatttttgtctccacttgtggcctgttacaaaacaaaacagattctaactgaatttatgcaaataattatattcccataaattagcaataatcactaagagtttccaaatttcagagaaatcaggcagatagagggaaatatgcttcaaattttgctcacaagagtatactttacacaaatattaaaagctgtaaatgtctaaaaagaaaaaaattttgactctgaaaaacaaaagtggcaatgtttcaacaaaacccataaaaagattatttcagtcttctattatttcagtccatgcaattaactcctattctgttagatattgggtgagcaatcttcatgaacatattagttctccatgagagtcctgggagttttttttctctataccagtggcacaatctccaaagttatcataaagcttcattcaaaagcaccccttagagtcctatagctaattgcaaaccacctttttaaaagcaccaaagtagaacaactgtcaatgacagaagtcttaggacagccatggtcaaggacacacttaacaaggaaatttggttatttctgtggcatataacaatttaacataataattataaatactaataacatatataaagacatcagaatgataggaatatcacgcaatgttgaaaaacatactagtaacaggtttaatataaatgtagaacaaataaagttgaacaccatttcatatttgacaatgtttcctatatgattttaacatgccaaatacaccgaatatgtctgtttttggcttcaggggacttaatatcaaaaaagataatgaggtcaacaagactgaatttagaatttgattttggaaagtttgattttcttcagtccccactttgaaacttaaaacaagtttcatatattaaaagccaaggtaatagctttggagagatttgggttacgggtatttagatagagacagatattgtggtggaaaaacaaattacaatcaccaaacaggtcattgtaaataagtcattcatttaggcaaagtgataactcaaagatttcaaaaagtaaaaaccttcactctttgagagagaggactcactttcacaaacaataagacctaataaagacagcatgaggccaactaaatttgtctctcttccccaacccatctttttttttttttttttgcagttttctcaaaaggtaagcaaaaatctttcactatctcttaatattaaaagaaaatcttattcaaaggaaatctaaattttaccattgcatagcttattattaatgctaaagttagcattaataaaatcttacaaacaaatctatttaattagttgtaacacaaggtagagatttttataaatcttttacaacattttataattttccataaaagagcagattagtattctaataaaaccctgatattttgacataagggcctagattctggccctgaattagtatgctttttattttaaggtttaatttatgcaaaaactaaataatccctttcaaattttagccagctggcttatatatagaattccttttacaagatcaatgatcaatctttcataaacctttagttttgtccacatttttaacttaaaacaatctttaaaatctaaaaaatttttttttgttcttttgagaccgaatctcactctgtcagccaggctggagtgcctgcctccagggttcaagtgattctcctgcctcagcctcctgagtagctgggattacagctgtgcatgaccacacccgcctaatttttgtatttttagtagagacggggtttcaccacgttggtcaggatggtctcgaacccctgacctcgtgatctgcccaccttggcttcccaaagtgctgggatgacaggcatgaaccaatgcacccagcctgtaattttttaaataaataagactagcttaatattcgtttcataaaaacagctaaatcctgagctatctgtaaaaaaatacgtttaacattaaggtttatacttgggtgaacacctgatattcacaggctataaaatagttagcaaggaaataactttaaatgtgactagttttgtctaatgtctcagttctcaaagcaatctaggtaaactgctaacaatgaataaattgaacaaatataagtgggatggataaatgcttgttggttaacttttatgtaatttaaaatcttaaacttattttggattaaagaacagctactcattaatagtttggctcatttccaattaagtagagatatggagaaacatgcctaaaaattatagagtgatttcatctataaagtactgatacctgatatgcagtttaggatttcatgtttcctaggtttaaggtcactaaaaataaaaattccacttaatatataattctgtttataaagtctgtcaaagacatgtttttgatgaaaaaagaaaataatataagacaaatagaaaaatgtattctcattaaaaagaaaatcacttttgtctaattcaaaggttatttatgaaacaaagtaaaaaggaaccagtaaataggggaaagagatgtaaagaaagttatagatataaagatgtatttgtgataagagagattaaaaagaaaagagaattattttgtatgataaataattttatatttttttctgaagtaagatgactggtaatctaagaaagagggaaatttaggatacaatggaaagtccaatcatgttggaagtggcatgtgtataatcaaattcataaaagaaattttgtttgtggttatgttggctttaattaaaattgaattatttatagtcgtctttctggaaactgagctttgaccaaaaaaaccacaatacaaaaccaaaacattggttagagcaataagggtttcttaaagtattgatttgctcttcattaaattccaagaagttttaatgtttaatgctatttttttctttttgaaacttctcagatatctcagaagttcaacttctggtgtatcctgctgcttttagccttttcttcatttgagaatagctgagatcttaactctctctttcaactttttgttggctctggcaaattttttttttcttcaggtctaaatctgttgctatagcctgatgctgaagtgtttcgtcttaaagcttcaaaaaaagcaatgttttcttccattatcacttaattctgtgctgttggcttttcctcctatgagtaagggccagaaaccctctgaaggattactgaaaaatcaactcacaaaagatagatcagttgaagagaaggcatgcagatttgtttggagtgtgtatgctggagtcttcagaataaagaccccaacacacaggggaaattgtcctttttatgcttaggtgcgacaaggtatgggcacatataaaaatatgattgaggcaaaaggcataacctaatgccaatggactggggaaacccagcaagacctgtctgtctagattcctcttgacctctctgagcatgtactccttccttctgggtatagggatcttatgacctacaatccaacaaggtaagttggataatttctttatggctaattcatacacagaaagggagagggcaaattagagtaatatttttagactttgtggctggttttgagaaaaaggagttctgatttctaggttctgccttggggaaagagattctagtttgtttggccagctttgagggatattgggactgagagataggaggccaggagaaggccaaagaaaaactgacttctgaagcttttaccttggggcactgtcttctgagctacaacgtgtatttaaagtcttcgacgaaaccatgaaacttcctatgctggtactaagagtcacgtattcccctgctcaagttactagtaaattctttgttagtattgttcttcagtgggttctccccagtagctttgggttgatatcctcccagcttctagccttgcagcataatacatgtgcttagatttcagcaaaaatgcctcaatagagtttcaatgatctacttaggtcacatgccacccatcagccaagctttggtcctagagctgttgtgtttgaagtggtcctacatagtttatgtgacagcccatagagctcaatatgggcagcctattgtccacacagtagctagacagatcactttgattaggcgaacactgttccgcttataacccttctctcatcctgtctcactttgatttctcatctcgtttagaatagaagccaaaatataagcattggctccaaggccactgttagttgtcagatatcatctcaatccattccccttctcactgactgtgctccagtcaccctggcttcctggatgtttcctcaacacttgggacaggttccagctaaggatcctggtactttctgttccactgcatggaacaatcctcctcacacatatccacagaacttattctctagcatccttaaagtcttagtgagcctttctttaaccaccttgtttgaattcagtgctctccctgtgcacccactaacccctctttttgttttcaccaggcacttaccacaatctaacagactgcatgttttatccatttattcagtttcctatttgtgtcccttcaactcccattaaaatataatatttttgagggcaagcaagtactagaacaataggaaacacatcaagagtattctgtaaactatttcttgaatcaatcagtgaatgaatgaattaatcaatatattttttgagtgaggagctttgtgttaggtacagctaaatgggaaatcaagtgggtcatgtaccatgaataccatatactctactgtataattctcctgcttatatcagaaactgtttataagcctattataattgataccaattggaatctcttttttactcatcaccaagaacaccacaaacaagttgtttaccatttggctccttatttaatctggatttccaactcctcatgcttaaaagacggaagatacaataatactttccttacagggttctgagactactaagagaacttatgcatgtaaaagggattcatgcagtagaaatactaacaaaagaattactatgacagatacttataaccattgtgtttttacgtatttaaaatacgttatacctataattagtcacacgaggaaatcaaatgctaaagtatgatatgtttttatgttttgtttttcttgcttaggggatcatggacattgaagcatattttgaaagaattggctataagaactctaggaacaaattggacttggaaacattaactgacattcttgagcaccagatccgggctgttccctttgagaaccttaacatgcattgtgggcaagccatggagttgggcttagaggctatttttgatcacattgtaagaagaaaccggggtgggtggtgtctccaggtcaatcaacttctgtactgggctctgaccacaatcggttttcagaccacaatgttaggagggtatttttacatccctccagttaacaaatacagcactggcatggttcaccttctcctgcaggtgaccattgacggcaggaattacattgtcgatgctgggtctggaagctcctcccagatgtggcagcctctagaattaatttctgggaaggatcagcctcaggtgccttgcattttctgcttgacagaagagagaggaatctggtacctggaccaaatcaggagagagcagtatattacaaacaaagaatttcttaattctcatctcctgccaaagaagaaacaccaaaaaatatacttatttacgcttgaacctcgaacaattgaagattttgagtctatgaatacatacctgcagacgtctccaacatcttcatttataaccacatcattttgttccttgcagaccccagaaggggtttactgtttggtgggcttcatcctcacctatagaaaattcaattataaagacaatacagatctggtcgagtttaaaactctcactgaggaagaggttgaagaagtgctgagaaatatatttaagatttccttggggagaaatctcgtgcccaaacctggtgatggatcccttactatttagaataaggaacaaaataaacccttgtgtatgtatcacccaactcactaattatcaacttatgtgctatcagatatcctctctaccctcacgttattttgaagaaaatcctaaacatcaaatactttcatccataaaaatgtcagcatttattaaaaaacaataactttttaaagaaacataaggacacattttcaaattaataaaaataaaggcattttaaggatggcctgtgattatcttgggaagcagagtgattcatgctagaaaacatttaatattgatttattgttgaattcatagtaaatttttactggtaaatgaataaagaatattgtgg

SEQ ID NO: 822 - DNA, 3065 bp, Homo sapiens
  source 1..3065: mol_type = other DNA
gccaatgttcaaatgcgcagctcttagtcgcgggccgactggtgtttatccgtcactcgccgaggttccttgggtcatggtgccagcctgactgagaagaggacgctcccgggagacgaatgaggaaccacctcctcctactgttcaagtacaggggcctggtccgcaaagggaagaaaagcaaaagacgaaaatggctaaattcgtgatccgcccagccactgccgccgactgcagtgacatactgcggctgatcaaggtagcggagagccagagctcctcccggggcgtggggtggaggtggctccgtttcccagagtggggtgattcacgtcttgaggtctcggccggtgtgagagcccagcctgttcccctttctgcgcccatccccggctcggccgccaccccgcccgcccgccccattccgttcccctgagctggccgggccggagcctcattttgttttctacttttttctctcctatgtgcatccccccaggagctggctaaatatgaatacatggaagaacaagtaatcttaactgaaaaaggtaattcaacagtggcgggacgggggacaagcgttcggtgcctgtcaccttcgccaaggccattaccgcccctgctcccccttcttgcagatctgctagaagatggttttggagagcaccccttttaccactgcctggttgcagaagtgccgaaagagcactggactccggaaggtaacccctcgccctttccagaagccagagagaccaagtgttatgtaagaagtagtgtcggctgtgtagaaccactgactacacaggccgaagttactgagaacttggacagaaaaaatagccagcaagtgttcaaactactgaggaaaaaaaaaaattagatatgctgcacttaagaatactagggcaggttaaaagagctgtttaagtaagtatcagagtgctgtggagactcggaagtgtttaagctgcttaagtaagtataagtgctgtggagacccggaagagttagatataatgtcatttgttgtaattcagtttcataaaatggttcttgtttgaccctaacgtaacagtttttgtaattgtgttaaatcacatttttttctttaatttgtcccaatcttcaggttacagtctctagcttcgccatgtacatggcccttccgtgtacatggatgggcggggaggtaactaaaagatcctttacacaataaagtagatgatcatgataaatgaggtaaggtcctattatcacacacttcaaacacggtagatcagaaacccactatgatactcgcttcctgtctgtttgctaaggaatataaaatggctagaaagtttaatttgaaacctttgcctccatttggaatagtagacaccagttaagagggtgtcagatgccttttttttttttttttttttggctggtccctgttgattggtcagaagacagctcagctaaaaggggaagttgtctgggtggttgctttttttctgacgtctgttcctcaggctggaagaaatgagcagaaaacaagggatgagtactttttagagtatgtgcatgttacgtaatacctgtttctgggcaatgctgcttcttctgactcaacaaatggggagagcaaattgaaaatgcgtaaattggaaggcaagttctgaaattaaacgttgtactttggcctgatgttctgacctttaaggaagcaagagtttgtaaacttccaaatatttactattctgaactgccgtgtaaacctgacgtattcccaagtcaacataccagtataccaataggatgtgaataatgtgtgtgttgagtttaaaaccatagcagttttgctctggcaagtaatgaaagcgttctcgcttcctgagtgtgagctccagcagactgcagagtggccagtccacagttgtagcctgacttcagtgagttctgatgtgtgctttttgcaaatacatgttctcagaacagtgagatcatccagcagtggcctggactgcactcacataaaaatcatgagacagccatggctacttgtttctgtaatacatgcatgtgtgttttttaaaacctatgataggcctctgattctgcagctgcaacttttatggaatgttttccttctccacatctcatgtgatgctcttattacaggacacagcattgttggttttgccatgtactattttacctatgacccgtggattggcaagttattgtatcttgaggacttcttcgtgatgagtgattatagaggtacgattgagttcggagcagagggtctgaagagagttcagagttataaatgcttacaatgactttttaaattgtactctttctttttaggctttggcataggatcagaaattctgaagaatctaagccaggtatgtcttagtttttggtttccaaatttgtaagtttactggattattttaatgatggaataaaaattgggtcttgagagcaggctgaaatgtcactgagtgtgtgttttactctctcataataggttgcaatgaggtgtcgctgcagcagcatgcacttcttggtagcagaatggaatgaaccatccatcaacttctataaaagaagaggtgcttctgatctgtccagtgaagagggttggagactgttcaagatcgacaaggagtacttgctaaaaatggcaacagaggagtgaggagtgctgctgtagatgacaacctccattctattttagaataaattcccaacttctcttgctttctatgctgtttgtagtgaaataatagaatgagcacccattccaaagctttattaccagtggcgttgttgcatgtttgaaatgaggtctgtttaaagtggcaatctcagatgcagtttggagagtcagatctttctccttgaatatctttcgataaacaacaaggtggtgtgatcttaatatatttgaaaaaaacttcattctcgtgagtcatttaaatgtgtacaatgtacacactggtacttagagtttctgtttgattcttttttaataaactactctttgatttaattgtttggtgtaa

SEQ ID NO: 823 - DNA, 6438 bp, Homo sapiens
  source 1..6438: mol_type = other DNA
cccccatccgcatcctcctcctcctgtcccctcttcctctctgtccctcaccaagccatcccctctttgcctctccccatccctcgctggcctgctcctgctccccttctcccatcctcccctcccccgtctctgcccagccagccccctcccgactccccagtttcatcggactccctggccccatcccgtccccgccctggcccctttgtgccccttctcatcgttttctccctccttcccgggcttggcgtcccttctccacccctaactccttccactcggcctccctgccccttcacggcccgcctgcctccctgcccaagtcctgagccaccatgctgaccccgatggtggccgggggggtggtgttccccggactcttcctcctctccaagaacacgctccagcggctgccccagctacgctgggaggaggccgacgcagtcattgtctcagccaggtaaaccactttctttcccctcagcccctgtctgcttcttgggcttctcagggaatggaagggacctggcacttctctggaccctcagcggtgggggactgggagctcctgtgggggtccggggctttacccccaggcttcctctctcctcactgcctgccttgctcactgttctgggagacctcatccagcccggccatctggtctactagtgttcagcccgcctctctcttcttccccgtacaccctcccaccctccaaaacagggccagcatgcggcgaagacattcctataagacattagggactgaggccagggccagacagctaggtgtcattcagggtgagtgtttgggggccagggatggaggagtggatggtacaactctacacccctagaacagggccagagtgcagagtggaggctggtggcagtcaggagacagtgggaaagtgactggggaactcggggtcacaaagggtccagagtgaggcctgcgtcatgactggacagctaagcggggcaagaaccggcccaggctcccctcgtggggagaggtccaggccagcagttcactctcagtctcacctcaggacagacaccctgcgggcttgagaagagggagactcagtttccacaaatggggaaggaagaaggtggcaaggagtggggtggactgaggaacagcagccgagcgggccggagagccgtgaggtacctgtggtggggcacacctcaggcagcccagccttgggcgaaggcaggcaaggactggcccgagaagtggctgaacgcaaagcgcagtcgttagactagcaacgaggagaaatcaaggcacacgcctcttcccttctgcctttctagcacgcctccctctctcccccaggctggtgtcctctgtccaggccatcatggcctccactgccggctacatcgtctccacctcctgcaagcacatcattgatgaccagtaagtgctgcgagacacccccctgcccaggtgccagtggttggcgtgtacgggtaatcccggaagaccccacatcttggagggaactctgtctgtggtccccaagcccttaacttgggcctgagcaagttaactgcaataaccgcaactcaacacccagggataaatttatcctgtcctgtccttaaaggtcagaaccagggggagaaggagcggggatcagagaggatcctcaaagcgctttctagtcggcttccaggtctcccgtgttgtcgtggttccccacctcctccctgccttccaccccaggaggcagaccccatttccagccagcacccagatggggtgccccctcctcatgccaggctcacccctcagcccttcccataatccaggcatccggcatccactccatgcctgagggagaggacaagggagagatgacacgcacaaggccacacacggccaggcagtgcgggaggggatgagggtgaagaggccaaaatgtggccaggcagctgctgcagtgtctggtggttgccaaaaaggcccagaggtgtgcaggcaggaggcggggggacggggaggagaggggccctgtccgtggtgctgacggccgccctaggtgacccacgggtggcccgttgcaagttgccttagaggtgcccacaacgccccctttgtagctttcagcaccgcttcccttctgtggcagccactgagtcccagggaacatttggacgcccctgatggggggtgccctgtttctgtttgcctcctcttttcccgaagatgagttgcctcttctgtggtgaggcagcggcccttcctggaagggcttcagcgagaggaattgagttaagtggcagctgcagaggacagttcttggcttaactctttcttcagaccccgcccagggacttggctgcttcttggcctctgcccaccccttccctcccctgctccaagctgagcctgggatccagcacttcctccccagccttcacatgcagaggtcaccgtttagcttctgtaccccctgctccccaggcccccctgtgtctgttcctgtccgtcttccctgctttaatcctcaggtaggtggggaggatccgggttaatccagggcagcagctgttcctacttctgagcacctaattgccaagagggtggggatgggatctaacacctcacatgacagcccagggcctggtggcccctcctggtctcctgcaccagcccagctgtcccatctcccatcacctctgctgggcctgcattctgggcagcttcctgccctgactcctccaggccacttgggacctctctccctgtgttcccgcttcgcgttctctacagctgcccctcccctctcatctttccctgcctctgggccgcagctccacaccactgcaccagtctcaggttcccttttccctggtaccgtccctgctggagaatgggttggctccactcacaggccgcctgcctcaggctccccatcctcagaggcctcagccccaacttctccacagcctcctccacgtgcctcatgtttggtgatggcttctggctgactctgctttcatccctccaccccttgtggggcgagcaccccaggtcctgcctctctgacctcctgcccccaccccaggccagtcttgggactacaggatttaagagaaactgccaatgtgctgactccagaagaaaaatgctgtcttgtctattcatccatttctcgtttttgtttactctccaagtacatggaactttctttgtccttggctccttttgctctgcattttccccttaacgcttggctgtccctgaaaaacaacacaaaatagacaagagattgggtgactttggggcagggcgaacagcgctgacaagacctctcacttgccaacagggtctgtctctgatgcctctcggatcttctggggatggtggggatgacagtgagggctgtggagccacaccgcccatgtcccttccttggccaggttacctagcccctctgtgactcacttcttcacctgtacagtggggatgatggccacacctaccttttacagggttttgggaggggtaaataaggctatgcatgggaagtttggaagatcgcctgtcccaggaggcaggaatgggcgtccacccctgtgacctctctctccagcactctcgccccttcagctgttgctggtcctaacctcatggtaaggttaggacaaataaccatggcaaggtcccacctgcctgtcctgggcttattttggcactgtatctgtgccttttggtctgtgggcatcttctggtcttttcttttcccccgactatactgcagagagagaggaacatgggtgagttctgagaccacaggtttgaatcccagcaccatctcttactagctgcatgactgtgtgaccttgggcaagtttctcaccctctaccctctggatccctcatctgtacccaagactccgctcctgtccagggctgctgtgctgacccctgagatctgaccccaatcactggtgtcccctttcctccttgctcccccaccccgtctctctgcccaacagacactggctgtcctctgcctacacgcaatttgctgtgccctacttcatctacgacatctacgccatgttcctctgtcactggcacaagcaccaggtcaaagggcatggaggggacgacggagcggccagagccccgggcagcacgtgggccatagcgcgtggctacctgcacaaggagttcctcatggtgctccaccatgccgccatggtgctggtgtgcttcccactctcagtggtgagtcccggggagctgggcgggcggggtgcgggtggcctgctccttggtcctgctggtgctggcaggagcctgggaagccccgggtctgcgtactgacaaccaagcagacccagcgtattcccagggaaagctgtggacaggcagggttcactgagcaccagcccagggcaccagggtgtgggggcagcctggccctgggctggacgatgcccggctgtggctctttggatttgtggttgcacgtctctgagcctcagtttcctcacctgttacataagggacacagtctttctgcaggaccgtgagagggatgcagccaagtcatgcacctgctcctgcacccaggtgttctttctcttttttttctttccaagacggagtctctctctgtcactcaggctggagtgcagtggtgtgatctcggctcactgaaacctccgcctcctgagttcaagtgattctcccatctcagcctccccagtagctgggattacaggtgcccaccaacacgcctggctaatttttttggtatttttagtacagacggggtttcaccatgttggccaggctggtctcaaactcctgacctcgtgatccacctgcctcagcctcccaaagtgctgggattaccggcgtgagccactgcacccagccctgcacccaggtgttctgatgttcagagtcaagcatctcccaaagtgacagaggggaaagaggaagggcgggggctgcccaagaacccagggagagccccagctcctcaccttcctgcctctgtgcccaggtgtggcgacagggtaagggagacttctttctgggttgcatgttgatggcagaggtcagcacgcccttcgtctgccttggcaagatcctcatccaggtgagtgagcatgggagggtgcaggagcccaatggggaggtcacaggaaggggagggaccttcaaggttgctgccaagggctctagccccttcgtcatccccccctcaccccgtgcattttgagcacctggtgcttgtgtcctggcaaagtgtctggtttgggaggagctgcctgctagggtcgcagggaggcagggagagggccaaggggggccgagcccttctgctgccgtggccactgtgtctgtgtctcctcagtacaagcagcagcacacactgctgcacaaggtgaacggggccctgatgctgctcagcttcctctgctgccgggtgctgctctttccctacctgtactgggcctacgggcgccatgccggcctgcccctgctggccgtgcccctggccatccctgcccacgtcaacctgggcgctgcgctgctcctggcccctcagctctactggttcttcctcatctgccgtggggcctgccgcctcttctggccccgctcccggccgcccccggcctgccaggcccaggactgaggccgggggccgggaccctccccctccccacccccacccccgtggagacagggctctggggctgatggctggggttgggagccagggtcctcttgcccggacaaccccaggactgacgatgaccccgaaagggaagaggccccatctctcggggactgagggggtggagagaggggacctcttccccctactctgcccccttcctgcacacccttgcgctggaggaggggagggggcaccgcctcccacccactgagggcaggagggcttgtggggagggacaccaacagggtttcaaggggaccaggagtcagaatgtggggagacgcctctgccaaggccatcccagcccctatgctgccatcccccagggctccccatcacccgagaggagaggacgccccaactaacccccgctggccctcgggcctcccgagtggccggctgcaaccacggctcctctccagggtaggccagcttgaggaatcttatttattttatttatttacccaaatttgaactagtctgttgggttgggggaaggaggtggctgctacccccaagccttcccagtgctgacaaccccgggggcaggcgagggcgcccagtccctcaccatcggctgcacatcgcgccctcgggccctgccatgtccctggtgctactgacctctcaaggcttcctccaatctggggtcgggggaccctgggaggtgctttacagaccgctaataaaagacgatctgcgtgaacgcc

SEQ ID NO: 824 - DNA, 32744 bp, Homo sapiens; identical to SEQ ID NO: 690
  source 1..32744: mol_type = other DNA

SEQ ID NO: 825 - DNA, 32742 bp, Homo sapiens
  source 1..32742: mol_type = other DNA
cgggatgcaccgctgcggggaccccccgcccggcctcgcggacccgcctcggcccaggacggaggaggaggcaggtgcggggcccggggcgggtgcggggacggcaggtggagggaagagggcatcgggccctgctcaccgcggtgtgtggggctgcccgaccgcgccccccgcaggtgccgcccagaccccggccgagggtcctcgtccccgcgcaggcccaggtcgaggccgagagagggcccgtgtccccgcgcagacctaggccgagagagggcccgtgaccccgcgcaggtcaaggccgagagagggcccgtgtccccgcggaggtcaaggccgagagagggcccgtgtccccgcgcaggtcaaggcccagagtccccgtgctcgcacagatggtgtcctggggcccagtcgcgctccccgctcgcggcagcccccgtgtactgggccttgcaaagtccgttaggagcgctccagggcgacagtgcccagcggttaacaagtttgtaattactttcgtgggtttctacgttgcaaattgagaagagggttgctgggttgggcccccctcctctggacgctaaccccacccaggtaaacagggatctggcccaggttcctgctgggtgccgaggtgggggattcagtggggagcactgaaatgtgctggaggcctggacgtgattccactgccaccaccccctttcccccggctacaaagcctcctgcggtgtgctttgtttttcccaggtagcagttattagccctgtatcatgactaaacgaacactaaagatacccttttacttattctcaaattcaaaacatgtatcaggggtccagaattatacatgctaggacctcaaaggtaagaaaggcacccacccacagccacgtgcggtggcacacgcctgtaatcccagcactttgagaggccaaggtgggcgaatcaccagaggtcaagagtttgaaactagcctggccaacatggtgaaaccccgtctctactcaaaatacaaaaataagccgagcgtggtggtgggcacctgtgatcccagctactggggaggctgaggcaggagaatcgcttgaacccaggaggcagaggtgacagtgagccgagatcgcgccattgcactccagcctgggcaacaagagcaaaacttctaataaaaaaaaaaaaaagaaagaaaggaaggagggagaggaagggagggaaggaaggaaggaaggaagccttctcttgtggtcatagttcagaggactgaatcactctgatatttgagcttaccctcaatttcaaaactctcattagaaaatgtttttaaatcacctgaaatgagaacaaaatctaagtagtatgtggagtgtagagatggtaaagcagtccagttaggttggtttgggcagcgtaagtgtgcatcgtcatgcattaaccaacagagaaccagtgccagggtccacaccaacagttttcaaaataaacagtctcaattagacctgaatatgacaggtgtggtggctcatgcatgtaatcctagcactttgggaggctgaggcaggtggatcacctgaagtcaggagttcgagaccagcctagccaacatagtgaaaccctgcctgtactaaaaatacaaactagccaggtgtggtggtgggcacctataatcccagctactcaggaggctgaggcaggagaatcactttagcccaggaggtggaggttgcagtgagctgagatcctactactgcactccggcctgggtgacagagcaagactccatctcaaaaacaaacaaacaaaaaaatttgacctgaataggcaacagagtttatcacaaacagatagcatagataagtattattttatgaaaatgtggtttcagttatatacatgtgtatatatatatatgtatatgttcatacatatacatatatatttgtaggggtatttgtattagatcatgatataacatgtatttattgtgaattacattcttaaaattgttactgagtttgaaccaagacaaattcgttacatatacagaaagtgccctatggtagtaataattattgcatactaattatttccacaattggaactatagaagagttcagtggtattttatgcactaattagctccatgttttatatttactttacatagtattagcatggcatgcatttgagtgtctgatttatcacactaagaatagatcattcctgacttgtaaggaatgcaatggcagaattgctccaatatgtgagaacggtcactgtggcggttgccgattatggaagccatgagccattattgttaccatgaaaatacgcatgatttatacattacttctactgttgccatgcgtgaccaaataaggatcttttgctttacattgtttctgctggaacaaagtaaagaagttcaacagtccaagagttttcttttctagtccagttattatgttactttttcagaaagcttaggatcttgataatagttcattcctgaggctgaaggggtttcattattaacaagtcagataattttcatttcagttttgataaaagatttttttttaattttgagcaaaggttgaagcacttaatgcttattgtaataattagttttatattttctattttgattgattcattggttgattttgattttaaggatttaaatagctgaaagtatggaccatatttctaggaaataatttcctggtgtaccatttatcctctaatggttactccagacatttaattgtaaatgactagtatcccattttgtaaataggccttgccgagagtttaacaggatcaagcaaattatttttatttttaccatacttactgttgtcataactgctttgatgagagctccacaaatgaatgaatgaacgttataatttatttatctaaatattgtgacatgttactactttttagtaaatttaatttttattccattttttaataagagactaatttttggcaagtttatttcagggaagctatgagtcatctgtctgaacaaagataagtgaatagaaatcatcctgtcttactgaacacgttcaaacagcacccaacaaagaaacaggctagctcacatctaaatttctaattcaaaactggtccagtacaacagaggttaaaaaaacaaagattccagtttctttccagtttccttttccttattaaggtcttagtaaaagccagtgaggaacactttttttttttaagatggagtctcgctctgtcacccaggctggagtgcagtggcacgatcttggctcactgcaacctccgcttcctgggttcaaggaattctcttgtctcagcctcaggagtagctgggattacaggcatgcgccatcacgcccggctaatttttgtatctttagtagagacagggtttcgccatgttggtcaggctggtctcaaactcccaacctcaggtgatccacccgcctgagggacactgcttaaccaacttagtaagttatggttttcttcatatctcttaagtgccttccaagatactggaccccagcatttgctgcttgccacgtagctcagctgatctgttgatagacccccacagagggacagtgaatgtctgctggcattcagggatgccctagctttttctaaccaaagctacagactctcagtagctggaaagcagggacggtatctgccttgttcactgcgatttctctatttttagactcatagaaagtgcatagtaaatcattgttgaatacatgaaaacaccaaagaaagaaggaagaacagcaggagaaagtatacgtagcttgaaacaaagggggagagacataatctgctcagagtttgatatcatcctcagataagagtgtgttatccactcttaactaatacatttgagggtctcttgtcaacccaacagtgtttctggggtgagatctgggctcataggatgaagagcttactggagtcagaacacatacctgtacgcgcacataggtacacgtgtgccacacgcaactctgatcaagttgtattgcagaagcagtttgtgctatactgttaaagaataaggctgcatataaaatggggctaatggtgtaatttggataattagcataaagagtttaggaagagaaaggttaatttttttttatttgagagagagtcttgctctgtcacccaggctggagtgcaatggcacgatttcagctcactgcaacctctgcctcctaggttcaagcaattctccttcctcagcctcccaagtacctgggattacgggcgcctgtcaccacgcccggctaattttttgtgttttcagtagagacagggttttgccatgttggccaggctggtctcgaactcctgacctcaggtgattcacccacctcggcttcccaaagtgctgggattacaggtatgagccactgcgcctggacaagaaaggttaatctgagaagcagtttcccagaggaaagggatgggacttggataacaagggatcacagatggggcctgagccaaggtcagagtgatcatagccagtgggctcaaccaaaggggacaatagtattgggtttggtggacagtaaggtggggcacatggggtagggattgaacttcagagggtggtttaggaaatagataatcctagaagtttagatttaatgtaatcagcataaagaagtcatatttctggagcaagaaagtaatttgatgggggctgtgttttgagattacttggtaatagcaagcaggaggacagctccccctcaggaccagaaagggaagggaaacagcctcctaggactgcaatctcagcaccactttcagtctcactgatggccagctctcctgggatgctttgatgtcacagaagcaactgataaggggaaatgcattcagttttgatcttccccttgagagggtctgaaatgatcaaagagtgaccaagcctacctgatatggttaatctttgtgtccccacccaaatctcatcttaaattataatccccataatccacatgtgtcgagggaaagaccaggtagaagtaactgaatcatgctcttctttcccccatgctcttctcatgatagtgagcaagttctcctgagatctgatggttttataaggggttcttctccacttcactcagcacttttcttccctgctgccttgtgaagaaagtgccttgcttcctcttcaccttccaccatgattgtaactttcctgaggccttcccagccatgccaaactgtgagtcagttaaaccactttcctttatgaattacccagtcttgagcagttctttataacagtatgaaaatggactaatacagtacattagtactgcagagagtggggtgctgctataaaggtacccaaaaatgtggaagcaactttggaactaggtagcaggcaggggttggaacactttggagggctcagaagacaggaggatgtgagaaagtttggaacatttcagagacttgttgaatggctttaataaaaatgctaatagtgatgtggacaataaagtccaggctgagatggtctcagatggagataaggaacttcttgggaactggaataaagttgactcttgctatgctttggcaaagaggctggtggcatttttcccctgccctagagatctgtggaactttgaacttgagagagatgatttagggtatctagtggaagaaatttctcaaaagtaaagtgttcaagaggtgacttgggtgctcttaaaggcattcagttttacgcattcacaaagagatggtttggaattggaacttatgtttaaaagaattgcagagcatacaggctcagaaaatttgcagcttgatgattcaatggaaaagaaaaaactattttctgaggcgatattcaagctggctgcagaaatttgcataagtaacaaggaaccaaacgttcatcaccaagacaatggggaaaatgtctccagggcatgtcaggggtcttaacagcagctcctccaattataagcccagaggcctaggaggaaaaaatggttttgtgggctcggcccagggcctggctgcttcgtgcagtctcaggacttggtgccctgcatgccagccatggttaaaagggaccaacatagagcccaggccattgcttcagagggtgcaagcccaaagtcttgtaagtttacatgtggtgttggggctgcaggtgcacagaagtcaagaatcaaggtttgggaacctctgcctagatttcagaggatgtatagaaatgcctggatgtctaggcagaaatttgctgcaggagtagagccctcatggagtacctctgctagggcagtgcagaagagaaatgtggggtcagagtccccacacagaattcccactggggcattgcctagtggagctgtgagaagagggctaccatcctccagaccccataatggtagatccattggcagcttgcactgtgctcctggaaaagccacaaacactcaatgccagcctgtgaaaacagctgggagcagggctgtaccctgcaaagccacagggacagagctggccaaaatgacaggaaaccacctcttgcatcagtgtgacctggatgtgagacatggagtcaaaggaggttattttggaactttaagatttaactgccctgctgaatgtccaacttgcatagggcctgtagtccctttgttttggccaatttcacccattttgaatgggtgtgtttacccaatgcctgtaccaccattgtatctaggaagtaactaacttgcttttgattttacaggctcatagatggaagggacttgccttgtctcagatgaaactttggacttggacttttgggttaatgctggaatgaattaagactttggggaactactgagaagacatgattggttttgaaatgtgaaagggacatgagatttgggaggggccatgggcagatgatatggtttggttgtcccacccaaatctcatcttgaattgtaatttccataatcctcacatgtccatggagagaccagatggaagtaattgaatcatgagggcagtttcccccatgttgttcatgtgatagtgaaggagttctggtgagatctgatggtttcataaggcgctcttccccacttcgcttggcacttctcctttctgctgccttgcttcctcttcaccttttgccatggctgtaagtcccctgaggcctccccagtcatgctgaactgtgagtcagttaaacctctttgctttataaattacccagtctcaagcagttctttatagcagtatgaaaatggactaatacactgccaaacagccacaatgctacacatgctcacttcaatctcaagcttggtctacatttctctaatgccctctggaacaaccaaatcttttgttaatgagaaggcagacagtgtgagtgtctttttcttgggaatgggtcatagttggctgacattacaaaccttagcctagcttgtgtttttcacagggcacccccttgtgcttttttaaaaatcccactagagaattcacaggctgaagagagagtaccccttcttgagtgtcctaggtttcccaagtagttctcccagttctgtgttagcaagtggcagggtaggatatgggataggtggtagaataggaggaagagggaaaagctaggtcataatctccttaagatcagggacattgccttcatctttgtatttcaagcaccttgtgcaatacatgtgtcagatgaatgatggctaggtgaataagaagcattttgtttcctcattgtcctgttcagatatgacatgttatcaacagcccagatattattcagacactcatcacccttttacctccttattcctcctatctgtttagtggtggtgcaactcatataaatatattcaaagcacatggaacattgactgaggtgcccagcccagtgttcagtaaaggaattgtggatattgaagctactaagttctatcttccagactaagacagtcacgggattggttatttggggaggtggaaactttatctgccgacttctgtccatttcctaatttcatattatgtagtcttagctcctcatttaaaatccacaacttaggccagtcatgctggctcatgcctgtcatctcagcactttgggaggccaaggtgagcagttcattcgagcttaggaattcgagaccagcctgggcaacatggtgaaaccttgtctctacaaaaaatgcaaaaactagccaggcatggtggcatgtgcctgtcgtcccagctacttgggaggctaaagtaggaggatcccttgagcccaggaggttgaggttgcagtgagccatgatcacactgatgcactccagcctgagcaacagagcaaaaccctgtctcaaaaacaagcataaaaaacaaaatgcacaacttattacttcatggacgtgggatatgaaatagtaaatcttgagagtcaatcttctctgtggtcttaattcatgcttaacatatgagcataggaatatccccacttcccatgcacatatgagcacagggatatccccacttcccgtgcacatatgagcacagggatatccccacttcccgtgcacatatgagcacagggatatccccacttcccgtgcacatatgagcacagggatgtccccacttcccgtgcacatatgagcacagggatgtccccacttcccgtgcacatatgagcacagggatgtccccacttcccgtgcacatatgagcacagggatgtccccacttcccgtgcacatatgagcacagggatgtccccacttcccgtgcacatatgagcacagggatgtccccacttcccgtgcacatatgagcatagggatgtccccacttcccgtgcacatatgagcatagggatgtccccacttcccgtgcacatatgaacatagggatgtccccacttcccgtgcacatatgagcatagggatatccccacttcacatgcacatatggatacttctaattcgtgcttacatatgagcatagggatatccccacttcccgtgcacatatggatacttctaatcgtgcttacatatgagcataggcatatccccacttcccgtgcacatatggatacttctaatcgtgcttacatatgagcataggcatatccccacttcccgtgcacatatggatacttctttctgcacttgtgtgaacacttttgctcatctgtgtgagtgtgtgcttgtgtctgttttggcagtcatgctatatttttattcttgacatccttagctccttcaaaagatgtgatgtgcctggcacatggtatgaacccagtaaatactggctgaatgagttaatgactgaacactatgttcagagaacagtaatgcctgcaacttggaaactttacacaatccttgtactcaaaatttaagtggagaaactaagtctatatgcataaaataaagtctgttacaaagtaacataagaataaaataaaattaattaaatatactatggatgccaaaatctgagataggtctcagttaatttagaaagtctattttgtcaaagttgaggacacacttgcatgacacagcctcaggaggtcctgaagacatgtgcccaaggtggtaggggcacagcttggttttatacaatttagggagacatgagacatcaacacatgtaagatgtacattggttcagtctggaaaggtggaacaacttgaggtgtaggtgggacaatttgaagtggggaggggacttccaagtcataggtcgataagagacaaatttcagagttgtaaaaacattgaatgagttagtatattgaaaagcacttagaacaatacctggctcagagcaagcacagagtgaatgttagctgtgattatgattataattatgatgactataattattattagtattgtgaaaggaaaataaatcttggggccccaaaatcactaagctaaagggaaaaagaaactggaaattgcttagggtttgccctaagcaatttgagttgcattcttttgagtttctgattagcctctccaaatgaggccatcagatgtgcatttatcgcagtgagcagaggagtgactttgaatagaatgggaggcaggtttgccctaagcgatttccagtttcttttccctttagcttagtgatttttggggccccaagatttattttcctttgacaatactaataatcattatagtcatcataagcataatcacagctaacattcacactgtgcttgctctgagccaggtattgttctaagtgcttttcaatatattaactcattcaatgtttttacaactctgtaagtatcactattattttcctcattttgcagttgagaaacctgaggactgagaggttaagtgacttgtctggagtcacacagctaaaaagaataaggtcacatagtgagcacaaaatggtattgagggttagcaatgaacattttctggaggaggcaagttgagtcctgtcctgtcccatcactgacagccacacctgtaaccaggggctgtattcacaaatggccattacccatctggccagccctcagagggagtggtgagctgagagagacagtcgtgttgagagcctgctcacatggtgacatggtctggcctgcatacagcactgcagccttcccagagtacatgctaattaattctaagactcctttgcatgaagttctcagtattgactaaactcttcaagggaaaaatctccctatttcccagcaaactcagagtagagctgacctccttcatgacacagcatactgacttcaagttttgaaagaacccagtgggctggtcatggtggctcacgcctgtaatctcagcactttgggaggccgaggcaggtgaatcacgaggtcaggagatcgagaccatcctggctaacagggtgaaaccctgtctctactaaaaacacaaaaaaattagctgggggtggtaacacgtgcctgtaatcccagctacttggggggctgaggcaggagaatcgcttcaacccgggaggtggaggttgcagtgagctgagattgcgccactgcactgcagcctgggtgacagagcgagactcaaaaaaaaaaaaaaaaaaagagagagagggaaggaaggaaggaaagaaggaacgaaagagaaagaaagaaaagaaaagaaaggagaaaagaaaagaaaagaacccaatgaattggtcctcaaaaagtaactacctactgtggtagagaggaagagacacaatggcaaatatatagatacataaatgtactctgtcagcatcaagtgtcaactctgtgccaggaactgttctaacccctggggatttagcactgaacacggcagacgaaaattccgtcctcctgaagcttacgtgggggagaggcagataagagatacagtaagttagaaggtgacaggtgacgtggaggaaaatgaagcaggagaggggctggagtttgtagggagggaggcccccaggtgagtctggatgcaggaaagcagttgtcctcccgactaatttgacagcagagggtcttctcctcagttttctcactttctcaccaagtggcctctcaggttatccggcaaagagactttcaaccctgggccaggatgagtgtggaagcggagtggagcggggaagggaagatgaagttcaggtcctctcatcctataatccatgtggggatctagaggcatcattgtggcagggaggagagatgactttatgacaataagacataggcttcacatttgagcggggtaggtattgatccagggatatgaagatggctaagtcatgtcccttgagaattcccagtgtagtggggaaccacttgtgaagacatttgcttgtttcattttatccaacaggagcttttccacacacttctttaaagaatgcagtttggtcttactctgtcgcccagtctggagtgtattgggccgattacagctcactgcaaccttgacttcccaggctcaggtgatcctcccacctcagccttccaagtagctgggatcacagctaccatacccagctattttttttttttcttgtagagacaggattttgccatcttgcccagtctggtcttgaactcttggacgcaagcaatcctcctgtgttggcctcccaaagtgctgggattacaggcatgagccatcgcacctggcagtttggtagcattttgacttaaatttctgtctgtggacaaatagcatttgaaacgtctatgaaaatgataagataaaacatgagaagaaaacagtttgttgatagtaaaatctcaaaaattttgccggttaggttaagaacaatagggcaaaaactgtatatgttaagtttcttggaagggattccttcctttgagggaaaagcctgttgattcttacgttttcttctctacgaaattaggttaaggatcggctgaaagcataaaatgcagcttagaagttgcccgcttccccttcttccccatctacacccatgcaactgtgggacctctgcccttggctaggagagcttttggcactgtgtcttgctgctggcgcccagactcaattttcctgcatccggcttactgtgttttcctcttctagttcctaagtggctctccagaaccttgactgggtttgtctctggtctacacttctcctatccctctccttcccaatttactaggtgaaaggcacccggtacccgctttgtaatgcacccctactgctcccgacaacacctctccactgtcatgcttaattgtctacatttcatttgtcagaggtccgacgttcactttttaaaatgcaatgaatcattaacatgctaataagtgatttaatatctattaatgaggattcgcaatataaaactgatttaatgtctcaactcactgcttccgttttctcataaaaggaaacagctaagtactacctaggagaaatgatacccacgtgcatgcatcttgctctttcctttaatgcttcctggggttctatcttttctcttagcaatgcactgatacatttatggtgaggcacaagtaagaaagagaagaaaaaaggaatcaccttaggaatccttgagataaccatatttgctttgttttcaactccacacacagcctatttcctgccctgggttattttcctcagaggagctgtggagatgactagacttacacataggtccacagctcccacaaagtcttcaccagcaaaccctccgagttcctcactcccacagctcccacaaagtcttcaccagcaaaccctccgagttcctcactctcattcctctagcacaagttgtgcaatagcctcatttttacatcttgcccctgaagaagggggaagaattacaccttgacagtgactcaaaaaagacagcagatgctgacggggttcttttgattaacaggagttatagaactatgtctaaatagttccgatttgatttgaacattatattttatcagcaaataacatgtgtttcattgtagaagtaactaaaacaaagcatgaaaacatgtggttctacaatattggtttttttgttttttgttttttgtttttttgagacaggagtctcactctgtcacccaggctggagtgcagtggagtgatcttggctcattgtaacctctgtctcctgggttcaaggaattctcctgccgcagcctcccgagtagctgggattacaggcgcccaccaccatgcccagctcattttttgtatttttaatagagatagggtttcaccatgttggccaggctggtctcaaactcctgacctcaagggatcctcccacctcggcctcccaaagtgctgggattacaggtgtgagccactgttcccagcctggttccccaatattcttttggcttgtttaattctgagtaagagagtccaaaatagggttcaggacattcttttcccgagatatccccggagtgaaaatgagtgttggatgatcactattttgggtactaattgtttgaccagtattgaacagctgagctccaggggtagaaagagatctaaggcttgtccagtgaggattcccaaagtagtggggaagcagatacaaaaatcagttaagttgtgatagagtagtaggtgttgcaataaaggtatacccacagaacagagagggccgaggctagggaagcttgagcaggattcagactttcattaggcacagaggcgagagagcagctcatggcaagggcccagaagctgcccactgttgtgtctggaatctagtgggaaagggcaaaaggaagtcctggagcagcaggttgcgagcaggccattgtgccaaggagtctggtcttgatcctataggtagaaggtggctggtagagtttaatcagcagaagaaaaagaaatgagaatgggaatgtgagttaggtgacaattggatgaagatggaagcctcatgtcaggaaaccaattctgcagtggtctcctggcagaaggtgaggcagacctgaactgagcctacctcggttagtggccaagtctgctttaaattcatcccttctgccagatggttttaaaaatgcatgagcccattactgaaaaacagaacgtcttcgaagagaaaggcagaccgggaagccctgagtgagaagtacccagtgaaaggaagggcgtttatcaatcctctctctttgaactaaattcattagtgaaatctgagaaactttggagctttaatgaatttgaaactggtgtttccctttatctgcatctagtccatttttaatttgcggtcatctattagctgatgaaaaaagaaaaatgtctttcagcagttgaagacagctaatgagaatcaggctctcagtgtgggcggtactgctgatgtttggtttgtgagagatacaggaatcaacttgttgaagctctctacttgtcagagcacctttaaataatccaagcccagagttgtttcatcttcaggcaagagaaagtgaaaatggcttcaaaggtacaatatctcaaataaacactataaaatgcatccacacttgcctttgaaattgtagtggttcaagcacacagagacaagcaacaatgtttatttcctgatactaatgagcttgtctgtctttgtctatgatgattgttcttagagacaaacaaataaaaatgcgaattatatctgactgttctaagaagaaaagattgccagactattgtattttttggcagttatatgcttcaaaaaactgatcgttttctcaattcctaggaagcgggcagagaaatcacattcctgtggaccaatgctccttagtggatgagttttgtggcatggtggtgatttagttagtaagaagccctgcctgttttctggagagtactatacttgtcgaaccagctcctaggacagtacagggttgtgactggtgttttggggttctctctgcgcataagccctttccttttaatacaaacagcaagatcatcctgttcagcagttgacagatgactgtgtgcaccaaaaggcaacaacgatgaggcaactgatgcatttgtaactcaatgtctcactgaattccagctttcttttctcaaggtggtgaaacaggaagcaacatcccatcaggaagaacctgagggtgccatccagtagcttcgcctcacgtcactgactgccctcagtcagaaatcttgactcgcaactttggagggtgggtctctgaaggaatttcaggtcttacacagagatgagttgtgctgctctctgaggagaacgaagctggttggaacgttggaagctgctctctgactacacttcacaagcaaggggcaccttttgtggactgacatttcagaaaggtaggcgccatcccatggatgtggttagtatttgaggactttcaaaaccaaggtggccgtgattccgcgtgtgagcttgtgtgtgtatgtgtgcctgggtgcgtaacagagagggagaggagatggagattgggggagaggcggacaaatgaagaaatgttcatttttggtctgatgtttgggagaaatacagaaaagacagacttggggccctttgctttgtagagttttgcttggaagtgtttagtagtagagggtaaatttcgagtccaaacttccactcctgacctgcattgctctcgggcgagtttaaactgattcattgagggttaggaagaaaggtctgggcagtgaaatcacacacggctgaatgctcagcatagcttggtttatcaggaaagccctgaatccaggtggaatgaaaggggtcagcacagatctttgccaggtggcaaaggccatttcagaccatcccagagtgccttaagctgagaacaaggtgggacttgctcaccccacagtggcaggccttcctaagctgcttctgtcttgagagatgtagtgctcaatgtcatgccaggagaaattagctgttcggttctaaggctgccagtctcatgcagaaaagtgaaacaaaatcaaactactttttctgatccaagcaaatgtttagcaagaatgttctgttaagcatttttatttttttgaaacctttacacaaaacaagggaaataaagctttagggctgaccagataatgaattttaatttattcattaacccacaatgttcaagtgccttctctaccttaagtgagtgtttgactttaaacttcacattttcattgccttcccccctacaagccttttgtttttcttaaaaggggtttccatttataatttcttcagtagaatttctggataaaaagttctttaaagagaaaatatgtatatgttcaaaaaggtaataattatgtggccctctcattcacaatatttctgcctttttctaaaatatcaatcaaattgatttacataagtttgaagatcattctgggctaataataatctacatttactaagtccttgctgtgtgtacgtgcattttcccctttagggctcatgatacgccactttcagacgaggaattgaggcttagtgagatttacagtggtacagtagggatgtgagaaagccacagctttattgcatttctgcacactaagatatatgatttcagctcattctatattcccattctattccattaaccccctacagggtccttgtgtggagggattcctgaagctatgataatattcaaatactcgaatttggtgtcttataacaaaaggccaaaatcaatcaatcaatctatcacctgcttctgctgttggaggaaggcttggtgtggtggacagaacattgactagaaagacagatcaaaattcaaattcctgcatcctgcttactaactatgaccctggcaagtcactgaaattccttttttatttttttgagatggagtcttgctctgtcactgaggctgcagtgcagtggcatgatcttggctctctgaaacctctgcctcctgggttcaagcgattctcgtgcctcagcctcccaagtagctgggagtataggcatgtgacaccacacctagctaatttttttgtagttttagtagagatgggggtttcgccatgttggtcagtctagtctcgatctcctggcctcaagtgatctgcccacctcagcctcccaatgtactaggattccaggcataacccaccacacctggcctcagtgcaattcttcaaatctcagtttccttatttataaaataattattataacatccatcaaacgaggttgtttattataagacataaaaaggcagggtatgtcaaatgccttccataggacctgacagagggtaggcccttggtaaacagtattcatttccccattttgcagtgatttcttcatgctcttgacatgttggatcctgttctaggattgggggtatcaccagtgaacaaagcagacaagtccctgccctcagggagttgcctttccactggtacttgttccttatatcctagtgtactttcttgggaaatcactttgtgattatctttctttgtggagctgatccagctttcaaacagcctcttaaagtaatgaatgtcctatgccaaaagtcccccaaagcatagtaaaatcaagcaaaaagcaagaacatcagatacttctttttcaaaagtcagtttgttgtggtaggccaggaaagttgtttttacacacacacacacacacacacacacacacacacagtttatgtaggttttccctggcctccacaccacagcagaagcactgccaggagctggcagagtgctcatgggaggagggtgctgggctggctccaagggagctccctccgctcacagagcacggagtgtatcgtggcaactgttcatttatcttgggccccaagccatccacacaagaagcttggactttccaagccctccccaacacgaatttatgggatgcgatgcaaagattgacctgcaggtgtacacctttataaggatggatttgggacaaaaacgattgacttatgttttggcaaaaagcctgcagtcaagttcatcaagtaggccagctggcatcaagaatggtgttttggcaatctatctctatgtttgaatccagagaaactgcagatcatagcagagagatagcagaggggaacacagagaagctctctctggaatcagatgcaggtagattcttctttctcctggaaacacctcaacacacaatacaacgatctaattgatcttatacagcccgagtttatggttttatttactggatggacccaggatgattgaaaaaatccttgtgccaacactagacagaccagacagttggcagtatgaaagaaggcattctaaagtagtgggacttactttcctaagtcctgtgcaacaatcaagcccatcattttacagccatgctgtatgtgctgccttaagatttgtccttgtagctggaatttacaatgatgaaaacataaatgaagctaaaagtctaattaaaataaataaattagggcttatgtataaaaaccccaattggcaagtgaacggagagattaagaatctttgaccttgtaacaaaactgtaacagccacaattctccacagggctttctgttgatggtggacagatgttcaattgtaaatgggcttcagttagatcacttccaaaggttgttattatcataatttcaaggctgagaatttccattaataaatagaaaatagctctgataagaaggagatttggcttggatgtccatgaaacaaattttacctttcccaaatatgagaatttaaaatttcttcatctgtgagtatcttcctgctacttaaatataaaattaaagggttctggttatttatttttttggcctacctgcccactggaaaatctgtggagatgatttgtgctggtggtggattatatgtttcaatctaatggaaagtttcctctttattgttttctgagttaaatatttaggaaataccaggaaactaagatatttaaccaaaattcccaaatctgtctgctcaggattggtaaacacacactcacattcatacacatgtgtgtatgtgcataatatgaaaacacaaccaaaagatgcatacatttctcattaatggaaaaagtgtaaaattcacaggtaaggcatatatttaggttatttggagaggtaaaatattacattaaggagcttgaaaccacttttacttactatattcaggttctaagatgaagtacttagtgaagaaaaatcatatgtgataatccatttaattctctgctgggataaggtctatttgttttattttgatttctttgccagacatattttactggatagtcaataaatacttgttgattagattgaccctgacacaggctgaacaataaactaatcatttcaaaatttaagcaaaaaattctgaaaacattttcttcaataatgaagattacttgacatcatttaataactaacttggcttcaatttcttcccctcaaagtttgttttcttgtttgacatatgattaaaaactttaaaaacatacaacatgctgatgctgaacaaatgtcaaattctgcagattagcaattttcatttgtaatgttcacatcagaggatcattactatattccactttgggtcaaagttacagggtttcataatgagctattcctatcccattagctgtaacttgctttacctggcttgattccaacagagatccgccttatgtggaattctggactataactaattgtgtaagagtaaaacttcagagcttttctagatgatgactataaaatcgtatgcaacttgaattttcctaagtggttgttgtgtagattacactattgcagtgattttcaaacgtttttaaccattactgttagtaagaaatacttttcagatctcaacttaggacatatatacacacacaattctgaaataatagtttcataaaacaatacttataggtattgttttctatttcatttcattacactctacaacatttctggtcataaccgactaattaattttgtgacctactggtagtggttctcaatactgtctgaaaattaaaatcaactagggaacaatagaccaatggaatggactaagatgctagaaaaaaaacctccacaaatttggacctttgatttatgacaacattggtactacaggaaaggacagacatttgaatgtccatgtacaaataaatgagtcttgattctcatcttaaaattcatacagctctaagtattaatctagatgtgacaggtaaaacaatataacttctagatcttcactgtccaatatggcagctgctagccacatgtggctattgagtacctgaaatactagaaaatttaaaattacatatgttactcccagttttcttcctactgaacagcattgttctagatgacaaaacagaatatatgtatgaccttgggtagacagtgatttcttttttttttttttttttttgagatggagtcttgctctgttgcccatgctggagtgcagtggtgcaatctccgctcactgcaagctccgcctcctaggttcctgccattctcctgcctcagcctcccaaggagctgggactacaggcgcccaccaccatgcctggctaattttttgtatttttagtagagacagggtttcaccgtgttagccaggatggtcgcaatctcctgaccttgtgatctgcttgcctcagcctcccaaagtgctgggattacaggtgtgagccactacacttggcgatttcttaaacaagatacaataagtactaacatgatgaaaaagatctgtaaattggttatgttaaaaataaggacttctgtttctcaaagcataccactaaaagagtaaaagacaaactgcaggagaggagacatttgccatgcaaataacatgtaaggagtcatgcatataacatgacttgttatgcatgtaacaaacaaggagtcctatccaaaacagaaacaaggcaattttgaaagatagaccgccacaacagaaaaatgggcaagaggtttgaacaggtacttcacagaaaaacatattcagacagccaagagacttgaaacatactcaaccttgttagctttctggggaatgcagattaaaactgcaatgaagtaccactacacacccaccagaaaggtgaaaatttaaaagacagacaatagaaattttggcaaggatattaaaccactggaactctcatacgtcactgggaggagtgtaaatagtcacaacagctttgaaaaactgttcagcaatatctgttaaactgaatatacatatgccttatgacctggcgtttccactcccaggtatatgttctacagaaatgcattcacgtatttacctaaagcatgttcaagaatgttcaagaatgttcataaatggcaccttgaagtgttgtaatcccaaactcaaaacaacccatatttccatcgacaacagaatgggaacacagatcgtgatatagtgatatagtcatgggatggaatattaaaagtcaacgaaaatgagtttgctactgttacatgcaacaacatagatgcatctcagttctaaaagttgagtgaaagaatccagatgccaggaatgtgctcaaaacaatcgtatttacataaagttcaagaacaggcaacacggatccatggtggtgacagggagaggcatgaggaagagtctggggtgctggtcatattcttttgtgctttgtttctttaccatctgtatgttatacttcaataattatattacagtaacaatacagcagtgacaatactgataccaggactgcaccttcagagatcttggtttagttgatctggttaggtagaaagcatggtcaaaaaatctctcccaaggaattcacatgtagaaccagggttgggaaccagtgcactaatggtttacaactggtcctttgaaaacccatgtgctatgacaaactgtaattgttacaccaggctgtgctaggcccttattatctctgttcaagttacactgacttgacgacataattcatattgagaaatgttagcaacataaggagtcacaaagttaactgacctagaaagccggtcaggtgcctgaaaacagttggccaggttggtaagcgtgtgttccatttaagggctccagtgattcttgccagtcttctgagtttctgagtgaagctgcaaatctggatttctatgtgcaaattcttgaattttcagtgttggctcaaattgttttaaagccccatgcaccagtccaaactgattggtagacccaaatttgccagcaccaagctctcccgttggtttgaaactctgacttaagttttagacctattatagaaggacgcttatgggcacagttgtgtaatatattaattatgtttctctttttctgcttctttagggatgttgtgaaacaaaagctgacatttatatatatatacatatatacagtatttgagttcctcagtagaaagctatcatatatactcaggtaattatctttattttattttattttacctctactgtgttttcttaactataatcttgggaaattaacatctgtgactcagaagttgatatctggcattgttttgcatattctggggacaagtggagtttgggcaaagccagtaccatgctattctttatgaaatactatagatttgtattctttccttttgaaagcggagatgcaggagaaagcttcatgtgacagcagcaggtagcaaagagccatcagggggtggcatttgctgtctgtgctctggtcttccacccccataacacctgctgttctgatgggaaggaaggaagagctggctgtgctgggcaggtctctagcttccagcgtcttacctgtaaggagaaactttcaaaaccacattccttcaaaatcataaaatatgaccccaaatgataaaaaatcatcatttgtacgaggaagagtcattcatgaagcatgttcgcaaatattgacttgatgaaaggcaaagtcaggtaacgtagaggggaggagttgcacttttaccgttaatgcctaaatttgagtctggctctgtatcaccttgagcagtcactttatctctctaaacttcattgttcacctgcaaattggaagcatgcataattattattgttgtaaggattcaatgagtgtgggtgcaacattgtaagctgtggtatgtacagttgttcgttataattttaatcatcttatttactttttgtaacggtctgtgaaaagctggtattattattcccggttttgacctgcaagaaccggatattcatgctgctggatgcctgatcccaggtctatgctctcccggcaccagctgtgcttgctgacacagagcttcccctcctccccaccctgcccactcctagtgggacagtggagggctcaggcagaaggggctcccatccaaggcaacactctgccttgggcctgtcattttctacaccttaccaaaagttttgctaaacagcaaaggcagtttatcacacatgtattttcccagcctgctttttagtgaaggtgacagtggtgaagaggtagcctactgggaggaagagaaggaggaagcattataagccacagagtgaagaaatacttcctgctcacaaagaaagtgctcgctgtgagaaggagcagttcagcggggccttcaggagtcacatgaagacttctgtcttggtcatgctaccagcccctctggtggctacacagcccgaacagatctttggcttccagaattcacaggaattctggaggttcagacctatcccaaggccctgtggacaggcctacccctaacatttgcaggacacagggcaagaatacaaatggaggcaccagccctcagctgggccctgtctttcctcccagcctcacttatgtcctgctctgctaggagcctgatgtgcatgtgtgtggccactgcatgctacgtcccctgccttcccctccccaagtcttctttgggccttctccaggcctagcattatgctgtgctgtcacttttaagaggacagacctagaaaggggcccatgcaggtcctggaagtgggctcagagctgctcaggcagggaattctaggatccttgatcacctagcaagtctggaaagggggcatggatgtgggtgtacatgtctccttgaacctatggactcctcacccaagggagaagtgaggccagaggagggccaaagggggctcttttaaattaaagccagatgtaagggtggggctgctcctgaggatcaagcacagggtcctggtacacagttggcacttaatcatacctttgactgttgtgtgacagagggacaaaggctgagcaatttcagaattgctgtggaatatctaagtattgctcttcttccacctccatgctccataaacatcgacctagcagcatggcaaaggttggagtggctgggatttcataagatggcagatgagtaacattcccaaccttgtgtactagcaggaagagcaatttactgagaaacagcttcactgggcagggaagagaaacaatccaaggctttccctctccccaaacaagaggacatcactggggctcagatgggtggcgtctcttggtatatttttagaatccatgtaggtttagtgtctttcgtatgtatattccagggagtagctggtatatttgaagctgaatatcatatgacccttccgttcacttttttttcagaacatttctttcctttagagcaacctaaagacatctatatttaaatttcatgaacatgaataacatcgaggaactctgaatcccctcacacagcacccagagctgctgctggaaggtggggatgggagtgaagggggtcagagtggtcacttcaactccaagtccacctcaatcactgtctcatctccagggttctcctccacaaaatgtggacgtgtgattcacagtagcactttggccaagtatattttttggcggattttttttttttttgagatggagtctctctctgtcgcccaggctggagtacagtgacgcgatctcagctcactgcaacctccgccttccgggttcaagcgattctcctgcctcagcatcctgagtagctgggatcacagatgcgcaccaccacgcccagctaattttgtatttttagtagagacggtttcaccatgttggtcaggctggtctcgtactcctgacctggtgatctgcctgccttggcctcccaaagtgctgggattacaggcatgagccaccacacccagccaggtggaattttttaaaataaaatatccaataagtcttacagaaagcattttaaaaagaaggcttaggaacacattgaccccaaatgaagatcaatagagcagaatcagaagatcacattgccacatgtttgatcccccagggaaaaggagctgataatgtgcctggtgtggtgtcgagctaggaaatcctgtgtatgttagcacagtatcgtctcacattcacaccagctgattttcactaataggcagagagatgacgtgaaaattgtgtaaatgcatattgacagaaatttaaggatactcctttgaaagaatgtgtatttgaaaagtctggaaatttttatttttaaataatatgttacattttcaaacaatatgcccaagactttttctgccagacatctttgcaagtgaagtatctgtaaattcagtcatagatttaatcattaatcaaaaaaattgaataaatgaaatttattctctaatgttccaggcaccgcagatatcctgtatgagccatgctctctctctctctgtccttctctctctctgtgtccctgtctctctctctcactctctgtgtgtgtctctctctgtctctttctctttgtccctctctctgtctcagtcattctgtgtttgtctttgtctatctctctgtctctgtcaccccctatctatttaaaatcggggtgttttacatttttttctttaagaggattcttgcattagacagggctagacagaaaagactagcctttttccagtatgaggtcttacgatttattttctcttggtgagtagttagcaagggctggtgatcactgacagagggagcagctgccctggccagagagatgaatgacccatccccatttgctcaaggtagaaaacagtaactattccaacaggtgcctaatcccccagcccaatgccattggcccttggccagagatattgctctaacttttcttgtgatttcggagtctgagaagaaagcagttgagactatatttggggatgtttttctgcactcctgcaccatttccctgcctctcctgtaaacgctcacacccactgcaccccaccctcctccaagaactaggatctttgtcatcttgttcttttccaaggggtgctttatcttgcgggggctgtaggctgtacaacaggaaaccctgcctgcaaacattacataagaaacacattttaaaatattaaaatttggagcttgcttcatcagtgtaccttagtaaccccaaatcctttcctaaaagtgacccagcttcctctttatctgtgggcaacagagagatgttccaaattccttcttgatcaaggtcctactctttttcataaaatgattcctttggtggcactgcccaagcaagtttcatgaggtaagaaatcctgctgtcactgaggaaatcaccccgcaaaagacactatccctcagaaaagccactcccccaccaacacttggtcagagtgacctaaaccctgatcagggtattgtaggaaatgagggactgctggctggccatcgtaccacttggaggcacagtgccatcaatgaggaaatgtaaatagtgactgcagtgtcaatgccaacagtatatagggcacttgccatgtgccaggcattacattaggtaactgagacacatgatgtactttatttaatcctgatctagaacttacaaaataaacataaaatgttgtgtctatttttacagactgacttgtcctagatccgttagctattcagtgacaggactgaccttcaaactgggcttcctgactccagagccacagttctaagctttcaggctctgtgaggaattcagggcttagaaaacatcgcttaccctaagccatgtagttggaaagtggtgaaagtggcattcagattcccaaactccttttattagcaggtcgctaggtcctgggttctcacatgtcttgtcctggaaatcctactcttgtttgctgaggttgggagggagatctgggcattctcccaggtgaggcccatctttggaaagcttggaaccacctgacattgcaacacagcctctccaggacctgtccctgggtattttacttagcacagttggtacccattatgtgggctttccttactgaaagacagctgtgaaaccagttatctatatccagtagtgagagagatgagaacacaatgggggaggaggctatgaagccacaggaggttctcccatttctctctctggggaatcttttaacttagtatttaattttattgtttaaaccagcctgacatctgattctttcctgtacccagtaggtgacgataataagatgaggttactgtataacgcttacccagcacattacagtgttcaagtatgtctgtatacctaatctcccttagtcccacgacaggtctttgtggtaggtggaattaaccccatttaacaggccagtaaacaaagattcagagatattgagttgcctgagatcactcagctattaagtgacaggactggcccttaaactgggtttcctgactgcagagccactgttctctcgaaagtttttaggcaagacttacagctgcttgtggtatatgaagtgctgcattcactcattttggtttgttatttttattgtgtccatcaattgccagcttgcaatctgtataatggccttacccacccctttctaaccggatgagttgatgggaagccagtgcagcacccttgagtggcacacaggaggtctttgcagacactaaggcaatcctttagtctctcaaatgggaaaactgagacagaaccaggtgactaaccttaggccctttgtgacttactggcagcaggttcccaactcctttgctctgccctggaccagtcacttgtgcccgacactaataacagggtaatttgtgagaaatgatgtgtgactcaccaggcgagggaggagagttcgcgaagatggccagtgaagaggagcaagatgtttatcagcaattggaaaggaaatgctgacagatgctccttggattaacatttctcagttttgcaacaccattgcctacttacccagccaccagcttacattttacattcctaaagtgaacaaccaaaaggtggggaggggagttctgcctttgaaaacagaactatcaatctcatagtgttcctccccatcaccttggacccctttttttgaaccctaagatttacattcttctaagacctatctgttctgtgactttgctttacacccctctgacttcagtcatacctgtttttctgcaaatttctatccacattactattctaagtcaacttcctgcctcacttacctccctgggtcctgagtgggcctttggcaatctctgtcaaggtaatgatcaggccaagataagcccaagcggattaaggtgaaggggccttgggagaattccattttggtgagcactgcctcctggaaagccatgtgctattgtgtctttattacctccacactgtaaagtcattttacaggtagatttcaagagcctgtcttcctactgactaagggagtacactttgtattttctctgaaattgttaaaatccaaaagattccaatagttagctgtttgtgtgagtaaaatggctgtgataagtttttatgtaggtaacaaacttgccttacttcaaatcagtttaatccacatattatctgtgtcaagccattagcttttgtatatgaaacatttactataaaaattagcctcttaaaaatattaatgtgaaacaaattaccatttagacaggggaagctaggtgtgtattggaaaaacactggctttcctgggtttactcagatacagcaattttatttccctgggactcagtttcttcatatctatagcgctgggctagatgttgcatgatttttagaataaaatttgctttcactgatttgaataatcaaataagaaaagagtgataagttttcctaatgttgaatcagtgataacaatattttaaaagtttaagccacccagaacttatcatgttagtatatcaattattttttatgtttctttctagtttttttatacccacacacatacatgtgatatgtataaaatagtatcatataatgagatcatatttatcatataatcatagtatgatgtaactttgaatttggattttactttttaatatgtcattaggatttctcatgttgataaattttataatttctaacattagctggatattattatctggagttaatatttcaaatgtgcttaaacattctggtctttaaaaaactaatattactaacattgaagtgttatttattaactgtagctttcaaaaattgtgtccagttttatgttttatgtatattcccaggtacacttgaacattttagtgactcctaaaatttattatctagtttccaaaaggatagtatcatttgtgttgccatcagtaacagatgcatgtagtagttttactatatcgtagttagcactgaatattatttttaaataacttcttctaacttaataagtgtcaattaaagaattttaggacctggaagtttatttagttcccttccttagaagggcaatttcatggtatttaatagtttgactccaatttatcatttaacagacatgaaataaagcgatttacaagcatttacccacttactcattctaacaaccctgcagggaggtacaatgatcaactccatcttgtagatggggaaactgaggtcatgctagttgtccatgggcacatggctagttaagtgtcaaaactaggctttagacctgaggagcctggctccaaagtccatgtgcttgaccgctgtggtatatgtattgagcacttactatttgtacacttactgtatgccaggttatggaaccttgggggatctggggctctggaaagactagatgaggatcttatagatgcttaaatggagacttgaggtgaaggggtgagcagagcattctaggcagaaggaatggcctatgcacatgccacaaggctaaaaaaagaactttgacagtaattccagcactttggaaagctgaggtggaaggattgcttgagcccaggagtttgagaccagcctgggcaatatagtaagacctcatcactactaaaaatgaaaaactagctgggtgtggtagtgcatgcctgtggtcccagctacttaggaggctgaggtgggaggattgcttgaacccagaaagtcaaggcttcagtgagccatgatcatgccactaaactccagcctgggtgacagagcaagatcttatctcaaaaaaaaaaaaaaagaaaagaaaacaagaactttgccttttgctttcaaagattagaaagcagacccctcacagttgcagtatcacagactgaggggaagaggggcacagaagaactggaaaagtaggcaggggtccaaccgccccgggccctcctgcaagcatctcagttacaggagagtgcagggagagggaagacagggagctgcctccagacagaggtggactcattttggagaaaaagcctctgacacaaccttccccaagtggagtttcttctgcatacaacaggagacagcagtagccgcctggagcatttctaagaattaattcattgggtcaagatttaggttaggaaggggctgatagatggcaacctagatcacagtatattgtggagttttattacagagccaagagaaacacatcttgaagggaagaccatgaggggagagctctggctcgaaagggaacttgaccctttcagatgccaaatgtctaattggcatttttgaggtttattagttttgctaggaaaatatcccaattatgtttagtaacagtgagaaagtattgccctagtggaaagtgacagctggctcatggagacattaaattttggaatcagtgggagcaaaagggcagaatcacatcttcctgaaacctcaagtcatcacctaatttataagcacaataaagtaaagcaaactctaccaacagtgttaggagggaaaatgagggggctctcccttctcatttggacttccgaggccttttttgacttgctcagaataccctcagcctttgatatctagtattagagtaaagcacataaagatggttggacttttccatcaaggcacactgcatccagtcaggattagagtaatgggagattggctagtaacaactctgacgaatataggactagcaggtataagaagcagtcacacctctgggatattgagcacccaaggaagaggctccccacaggctgacatgcagaccctcttgaaaggagtctttatggtaccagcggaacttgctggaaaccagccctctggaacttgccataaatctgccctgtagggttctgggagagctgctcattagcaggtatctccctggaggcacgctgccacaacacccccaagggaggtgctgaaatctgctggcagctgggggttgctggagcccttcactgtgtgccccagatctcaaaagcaaaaccctttcctcccaccatgttgctacatgaccctcttctgacaaagcttcctgaccagctggcaaagggaaaatatgtaaagggattggatccattttccccaagcaggcaaaaaggatgaatttggagttgagaggcattaacttgacaactggcccaagcttcaagaaagaagccctgtaagaagagcaaagactcatgatgctcctctccagggcatgtaacagagcattaatggaaacccaggctcccagtggacttacgatgctcctctctagggcatgtaacagagcattaatggaaacccaggctcccaatggacttacgatgctcctctccagggcatgta

SEQ ID NO: 826 - DNA, 10457 bp, Homo sapiens
  source 1..10457: mol_type = other DNA
tccgtagagtattagctacagaaacctttccattgccatactgagaaactgcagcaggcagtgtgcctacaggtctacaaagaaacttcaggtaagcagaattatttagaacagcctttttatcttggcagttcaattaatttggattcttgttctaaatcatttgtatttgttaatttatttcttttcccctgcaaacccttggaaagagcactccccagggtctcaatgttgagaatgaattcttcaaaaccttttaggtacctgaaactggaaatacttcagaaaaagccagtgcgtatccttttgaatttgtaaaatgtccaaatgctttccttgaattataagttatcaatatgcttgtacctttctctgacaccctctagatctccatagtaatactgttagcagaaaaaaaaaatcaatattctccttgcctccaatcctgcttctaaagtattagtggtttatttgcatagaaaaatcttccttcttccttctgtgtcatgtggctagaataaaacaatgcttttctgttgccctctgccaaatttctctccattcattgaaacatttggcaactggtatcctaatgtttctctccaacaaacttctgctacatcctattcatgtctgtggtacctgaaactcccattcccttcttggctcctactctgttgacttggagttgaagccaacagccctacatcccaaactgatctacctctgagtgcctctgacatcttaacctctaatagtctaatatctgatcccaatctcctatttttaagtacatttttccctgtctattaacattgctattctttgacttcatcaagtactttcttccatggctttttctatattttcttactttattggtctccaacctactttactttttctcttctctctcctggatgctacagtttgtaagtttcaatctctcatttctatatattcaaatgctttgtaccttatcttttttgctacaccagccctgaaaaaaccaaccttggtttgttttaatttgtcttctctgcttctactctcagggagctgagctcaatatattgttgagtaacacttccaaatcatagtgtccatctttacattatcctaagcatgcttgctagtccttgctaattctagtccactctttctcccattaacatcaaaagccatttaaaccctaactgtttcccataaaatcctacttctttttctcgacactttcttggcatactccctcacccacttactgctaaaaagtgattttggaaataggaaaaaattttacctcttccaggaaacagacattcaaaaataacttgccaactctctgctctttttttctaaccctgtgtactcccatataaaattagtcctcacttaacattgtcaataggttcttggaaactgcaatttcaaatgaaacaacatataacaaaattaattttaccataagctaattagtataaagaagagttaagttcctacagcatatttctggtcacaaaaacatcaccaaacttataaataaagaacccaaacacttctaatataaaacaatgaactaaatggaaactgcgtatacatttaataaatattaataaaaacaagataattatttacctaatttttggtgagtctgtgtgatggtggtcacagtagtggtgggttaaattgagaaataaatgtttgcaaagcaaaagttgtaaggagcacctcttgcctctatgaagttaaaattcaatcacaaatatggtggcctcactgagtcctttggcacagcattgtttattgtcattcatttgtatgattatcatagacttcatgaatttttgttttattatgaatgtttcattcattcattcattcattcattcatttttcaactggctttttccagttcaggggagcaagtgactgaagcctgtcctggtagctcagagcacaaggcaggaacccaccccagactggacacctttccatcacagggcgcacacacacacacacacacacacacacacacacacacacacacagagtctcactcatcctgggacaatttagacagagaaaatccatgcagacatgaggagaacaggcaaactgcacatagacagtagtccagccaggaattgatgtttttctcttcaccattgtaatgaaaagatattgaacaaaatgacattatttgatgacctgctgtatacgtacatacatacacctgcatctgcatccatcctaattttttttctgacttttcactgaaagaagtattcttccagtccaaaacttaatttcacaagtatgctgagaattatcattgacgattacatgaattaatcaacataaagaagctgaaatagggttggcattttgtatataaggtcaatgaatttctgtcacctttctatgtcctgtttacacattggcctattaatgacttacatcttacctcttgtagttagtataggtatgcttaactctcatctaataagagaaatgccttttttgagctcttgtacctctcctctgtccttcgatattctcatgttcttcttcctttcctggtcaagctctttgaaaaagttaccttcacttcctcacgtttcattccacatctcttaccaagtcagtaatcaactcctaactccaaaatgcactgccatctttagtactcatatcttttagcttctcagcagcctttgactgctttggtcgctctttccttgaagttgattgctctcctttgtggaatatgctaccaaagcctgcagaatgggcagaatgctgtgccatttggttagtgcacccatcatcctagacagtgacagaaacacattagctttttctagatctgtggtttgcctcaaaatatctattttgtgtcaatagatttattcaagcaagttacatgtagtccatctttgaagttgcagttttcttcatttatgtttctgtccggtggaatggtcaccttcactggattagaggtctttaaaatgtccttcagaaccttgtatatacacaaattaccaccatgctaaacacttcacataccttttctggcaatgaaatcctcatgacaacctacaaagtagatattactatccccattttatagataatgcaactgaggcagagactcaaataatttgacttacctaaggtgacccagatagccagaggaggagccaggggtggagttttggtttgtttaattccaaagcccatgttgttaaccactgtgcttccttttgtattgattatggctatacacttacatatatacatgcatacatagatgtcatatttactgagttttctaggattgcaaaaaatattaatggcttccttgcaaaccatcaaaatagtgtagaaaattttctatttgttggttcttggaaaatatggccattcttatatattgtcttcaagtatcatatgaggtattacatatttatatatattgtcagccgtgtatatggctggaagaaagttcaaaagttcatatttatatcttatttatatactactttgtttcagaaagactttcaggtgggtatatgcaaatgtacatatacacagataaccattcacctatgcatctttatattattatttttttaatttttattttattttattttattttattttattttattttattttttgagatagagtctcacactgtcacccaggctggaatgcagtggtgcgatatcagatcactgcaacctcctcttccttggttcaagcaattctcctgcctcagcctcctgagtagctgggactactgacactcaccaccacacccaggtagttttttgtatttttagaagagacggggtttcactatgttggccaggctgatctcaaactcctgaccttgtgatctgcccgccttggcctcccaaagtgctgggattacaggctgagccactgcacctggcctgcatctttatattattaattgggattacatcatatgttttcctgactttgtaacacagacgttttcctatgtcattaaacactcttcaaagacatcattttgatagttgcctggtaatctattatttggatacaccatcattaacttgatcatttcttcataatgaattttgtattatatcttatatacagtatattataataaattttcttatgtttacatccttaaacatatctattattatttccttgggatgagtttcaggatgtggaattactgaataaaagagtttggtctatttttaaggttgctaacatataattccaattcctagatcttgccaatttctacttggtggtatcatcactaatcaacaattttttcttcctatggttttgttccttaggagaaaagggactacacacaatatagtctgcaagatttttttttcagaagattatattctttcttgatagctgaaaatagtacccatgctatgggaacattagagcaagtgtttcaatgcttgggggtggtgggctctccagagggacaatccctgaagagatgcattattttttatttgtgcctggacagctgaaggcattcactctccatattcttttactggtttgaatcaaatgagcatgggagatatattttgccagatatgttaatgtactttttaagtggaattgtatggagattactaaggagccctgaggtctagttacacctctgagctttaatttctcatttgtaaactgaaaagtttggactagataatttctaaagcccatcactgctaatagtgtatgatgtccctggtgacttctccttcctcttctttctggacacctatcatatctctctaggtatttttgtttttgtgtttatttccttagatcatcttcttgagggaaagaagctgaagtgctacataagatgcttgtgcttcataactctcagaagctgcagattctgtataaatccttagaaaagagcatccctgaatccataaaggtaacggagtaggaggagatcaaaggagagagagggttgagttgagaggaggacagattcaggattcataaccttaatggggagatgggaatgcaagtctaaagtgagaatctgtgcaaagattactttaatatcaatatccagtcaatcacccactttgcttcctttttgtgacctcttaaacatcttttgaatttatccttctgctatctttggtgtactttgtcatctcttccaggtaattgcaatacctccttgtctccaatcttaacagcctagttacaactttgtgatgagagtcatctatatgacacatatagggtcatatcactccctggttttaaaatttgccatagcaaatttgcagagtccatctccaaggcttaattgggttacagggcttatcccaaaattctccagccttttttattttgcctctcaacattctcctgccatataccacttgctacaaatattgagcccctcacagttcagtaggcatgatatcatctgccatactcttaatcatttcactcatgctttttctcctacttgtaataacttgctctcattctctattttgccagaaaaaggcataacatattcatcaagacccagttcagatattgcttctgatattgtaagtttccttatcacttcctagacaggtagtgcttttcctccttgggatcctacaccaccatatacatatatctctcagaccacgtgtcctacgatggttgaactatgtactctctatccttctaaacttaactttagggttgtagccatatcatattcacctttgagtttttcatgcttaagacagacctgatacataatagatgccaaataaatagtgtgttatgaaataaagaaaaaaactgagaaaatggcatgaattttttagaaatgaatgaatatcagggaagccagttcctaatgactcaggtattaacttggatttttgtggatgctttttgggccgtctagcagcataactctcaatgagtagcccaatgagccatcctggaagcactggcccatcctaagtcctcctatacttcttgtccttatttctcatgtcatgtcttatttctccacatataagactctatattggagaagaacttcatcctctcctgctttgttctgttgcatcgtaggtatatggcgccattttcaacataaaagataaaaaccctttcaacatggaggtgctggtagatgcctggccagattaccagatcgtcattacccggcctcagaaacaggtaggagcaatagttactgaatatgagggtagtcactctccagacgttctctgcatggcaatgagggaactgaaactgaggagtggtgagaagaacattgacactgttgatgtatgcaggttttggaagggctgtttgggagacagggtagggcagtgagataaggcttgaacttagatccagtgatcagtaatccaggatgtgtaaataaaattaggattccacccagtcaatctattccatcaagattctgatcataggaatacatcccaacctagacttctatggctgaaagtgattaagaagtgttttcacctgcaaggactcccaaggggaagtgtcaacagcagagggtaggcaggcatatggaggcagactgagctgtctattctaggtactactctggctctggaatgatggttctttccaaaacttcatctattcacatgcacaccaagagccaatcactgagccagccccctgggtcaggattagctcaggtgacaccttgtcaaaaacctggagccttgccaaacctgttctttatatttctttccataccttaggcaccttcacttttaaatgcttaacatacaccatttagggtacacttcccattctagacaatggagttatttactcaccctctcaagggcagctcactttagtgccctaaaagaaagcaactatcttcagtgtatcaagagtgagttattcttgaagtgactccaaggccattttctacacctgtctcagaaaaacagaatatttcaaacaattgaatctctagcactctagacctatgcaagaacattttgtaaattgtagcgctatgtaaatataattgatatttgttatatcaggagatgaaagatgaccaggatcattataccaacacttaccacatcttcaccaaagctcctgacaaattagaggaagtcctgtcatactccaatgtaatcagctgggagcaaactttgcagatccaaggtaactagtctgagttaaaagaaaaagatccatggtttattcctagccgatatggaaggcataaagtggtacttgtctttctcctttctccaggttgccaagagggcttggatgaagcaataagaaaggttgcaacttcaaaatcagtgcaggtagattacatgaaaaccatcctctttataccggaattaccaaagaaacacaagacctcaagtaatgacaagatggagttatttgaagtggatgatgataacaagtgagattttaccttttgcttcccaaattccttgatagaattactgagttgccacaaaggctgtacttggaaatgtaggatttgagactaaattatgatgggctacacaattgcatgggtaaagaaagggagttatgttagcaactgtgtactgagcatggacatagccttcattagacaaggtctttatgcatattatttcacttagggctcacaacgtccttctgagagggtaatggacatcatggtgacatcaaaacatgtttactgaaactatttatgtcttacaaaatgctgcatgcttatagaaaatacataagtatataaaataaaaaataaaatctgtccacttgggttcccttgctaggtgtaaataattttgacactgatatgtatgcttttagtactctatatgagttatgtatttatttttacaacacatacacactttactgcaacttctgcaatgaatatcatcataaatagatcattgcacagttgtgtaaatatatctgaaagatgaattactagaattaaaattgttgagtcaaataatatgcatactaaataaatgatgttaacaaactggatggcaagattttcatgaatttaatgtgtgatatcataacttatgaaacaacctaaacatccagtaatggggaaatggataaatttattatgggacattgaaacattagaatactatgcagccattaaaaagaatgaagtagctctacacgacagattataaaatatttccaaaatagattgctacatgaaaaaaaataaggtggatagaacaatgtatataatatgctaccatttgtgtaaataaacaaatgtacatatacatctagaattgcagagaataactggaaagttgtaaaaaatatgttggcattagtggttgcttctagacaaagtaactgggtaatatgagatcagagaaagaagagagatttgctttcctctagtaatccatttatgctttatatttgtattactaattgaaaaaataaatagaatttaaacacacactcacagatacatttgatttagccagaaaagtcaacactcttcaaatcctgctttgccccaccagtgttcatatgagacacttaaggggaacatatacacagggaaaatgataaatggggattaaataatatttagtagtataactctggaaatctggcatgaaatacctgccctaaggtgattcctctaagcctacatggatatcttggtatcttgccactctaggtttggctatccacaggagagggtacaggaaagggtacttgagatctttcaggaagcaagtccaggatcaggtgaagtgagcaaaaacaaagcatcgcccgtagaaaacttagcgttctgttacccacccactggcaaacatgaagtgactctgaaactgacaaacttctcaaaactctttctccctggagaggggctaaacttcctggagatcttctctcttccaccatccccatatttacagatgatattactgtaatttcacaagcaagaaaaccaagtaaacaagagaacataacctttccaaaagaaaataatcaggattagaatcccaatggttagcaccaaaaatgtagtattctttttcttatattgcagcttcttaaactgcgtttctgggtatgtgatgaagggctttgggacacatgaagatgtaagatcagcattgttctcatcttcctgtaaaatatgttttattggaatatctgttcaatgaaatactatcttgtatatttagatatcttgtgatgcagaactcaaaatgcacatggtttcatacatgcatctttcaagtaaattcagccatgtggagggcttctctggcctatattcacactcttttagggacatgtgttcattttcttccttagggcacttagtgggatattttgagatgtcctataacatatcatgctgtctctctgctattaaatgggccgtaaaacacacagtgttcccccatcaactatttggaaacattttgaagcggaaatagaaaaggtagttgttatgcatctattgcctcctccaggctgtagggtccttaaggaaaggaatggtgttatatttattttttgaaattccagtgtttggtaatattggctgaataaatgtaaaattctttttcttcacagggaaggaaacttttcaaacatgttcttagatgcttcacatgcaggtcttgtgaatgaacactgggcctttgggaaaaatgagaggagcttgaaatatattgaacgctgcctccaggattttctaggatttggtgtgctgggtccagagggccagcttgtctcttggattgtgatggaacagtcctgtgagttgagaatgggttatactgtccccaaatacagacaccaaggcaacatgttgcaaattggttatcatcttgaaaagtatctttctcagaaagaaatcccattttatttccatgtggcagataataatgagaaaagcctacaggcactgaacaatttggggtttaagatttgtccttgtggctggcatcagtggaaatgcacccccaagaaatattgttgattgattccactgtccatttcaaatctttcttatcagtaaaaaaacattaattcaaacacaagcattgtgatctacattagcacaaaatgcaactgattatctaggatctgtgtattacttaagctcacccttaacagttttaccttccttctcctctgtattcttacagaaaattagaagctcaattttatggtctcataatttcctttatgacagacatctcagaattaaaatcacccaaagccaatcattagtgccaagataaccctttaacggcaacactttcttaaatgaagactatttctttcatgaaaaaattcacttttatgactttcttgttaaaataaaaagtctgctttta

SEQ ID NO: 827 - DNA, 7604 bp, Homo sapiens; identical to SEQ ID NO: 686
  source 1..7604: mol_type = other DNA

SEQ ID NO: 828 - DNA, 32746 bp, Homo sapiens
  source 1..32746: mol_type = other DNA
agccttttttcccctgctgggggccgaggcccggccaggagcagagtccggctgcctggggcgggcggcgcgtgtctgcagctgctccgggtagcccgctaggcgcgccgtccccagccccgccgccggccctcggtgcgcccggccgcctgcacccccaggtaagcgagcaccccgcgccgcgaacaccgccccgaacgccaccctcacggcggtccccggccccgcctccgcggccatggcggccccagcccggcccccactcgcagctgggctccagcccccatcaccccgccggggactgtccccctcggggcttcccatcatggccgtctccccgagctatccgcgctcccccacgagggccggggcgcaacgggtgcccgaggacgcggctgtgaaacgggctggagcgagtaggggcgatcctggcctcgtgacgcgggggaatccggatgtgtgagccgggggagcgccccgtttccccgacgtgccagggctggggacgcagctggggccctggcctcggagtccgcagcccggccgcgtagacggcttctgagaaccgcttaaacacgtcattccaagcccgagctaacccatcaggcggccggggtgaggtggaggtgcccaggcggggataatgtcatttggcctggttggaccagccagcgagggctttttaggcccagggcctagccgggagtgtgtgcggagcagaaaagaggccagcctggctgaaacgcggagagggagggtctgaggtggagagaggttggccggggcctgggaagcggcgaggagagtgtggaacccgttctcggggcggtggggaccagggaggcttggaacagcaggtgcatggcgtgatcggattgtgtcttaagaacatcccgtagccgctgtgggtaggagagatggggatacttggaagggggcttctggcttgacctggctggaaggtgtgataggaagtgggtgaactgaaaattcgctttggcagagtaacatcgtctaattctgtctgtttgcaagtggagcgtgggggaccgatgtttctcctgggtagttaggagtatatagaagaggctttcattgctgggttgggagacttgaggagaagctgctctgggggacacaggaaggtgggcagggggagaggctgttgtggtttgcaaaacctaccagatgggggaatgctcccatcgactccagtctgagctcaggcaaggtctcaggcatctgagcgcagaggccagggtgaccccactggggcgacctgggtctgttatatggggatagggttcctggactgtggaattgtctttgaagccctcggcctcccccagcctcaaatgggtctgccttccaggagcagctgctgtgaataaacacagaagtggagctgggggactgattagaagcctcattcagtgcacctgggccccagcaggcccagccaggcgtggaggaagaggcattgaggactttccttacctgtttttccagctcacccactgccagcagaggtactttgagcctggggtgtggggggtggggggcggccttggtcgttgaactggctgtagggcccccagggaaaggtttctgagcttcagtttacccatctgtaaaatgggtcagtagtatctgagcctgggagtgttcatggatcgatgaaagccgaggctaggcagatctcggtggcagccacacccctaaggaaccggagagggttctaacgcccggtgggagttcagggggatgtatgggcttccatttctcctctgagaaattcacaacagtgtccacctcctgacccagggctgtctgcaggttgaataaagcggttgacccagtgcgtggcacagaatgtcttggctcaggagccactgggatgcctgtagttggcagcagaagtgggcccaggttccctcctcccacccgtgggatggcacagaaaggcaggtgccttgggagctcgctgccctgtccccttctctgagcaccacaagcttctccctttccgactggctgggcttgagcctgaccaccccccagccctgtcctgccactttgagttgagggcctccgggctactgacttcaccacttcctgcttcagtttctccacctgtaaaatgggataatagcagtcatgacctataggtaaagagctgaacacagtgcctggctggttgtgaatacgtgctaaacaggctattaaaatatcacgagaatatcacagagctggaggctattaaaatatcacggaggggctgggcgtggtggctcacgcctgtaatcccagcactttgggaagctgaggcaggcagatcacctaaggtcaggagttcgagagcagcctggccaacatggtgaaaccccatctctactagaaatacaaaaattagccgggcgtggtggcatgtacctgtaatctcagctgcatgggagactgaggcaggagaatctcttgaacctgggaggcagaatttgcagtgagccgagatcgcgccactgcactccagcctgggcaacaaagtgagactatctccaaaaaaaaaaaaaaaaaaaaaaattcagagtcatgcctggggtcagggggagtccagaggagtcacctgactcagcctaaggaggagtcagggaaggcctcctggaggaggtgacagttggctgggtcgctaagggtaaggaggagttaaccaggccaagagaccagtgggcaaattgcagaggagagaaactgccagggtgcttggatgaaacaaccacaaagccagggttgtaagatccagaagaggggagaggaagaagggcagagccagcctgccagccttgaacaagcatttggcattatttagagctcagggaacagactgcaggggtcgaaggcaggagcctggagaccaggatggaagggactgcaccaggccaggggagtaatggtggggctggaccaggtgaaggcgtggacgggtgagacttgggtggatcttggagagatatggagaggccgggggagggagcagctgctcatgggggagaagctttaggtgtaagtcagcaatctgttctcagcatctggaaattgccatgctgctagacacccaggtggtacggcgtaggatgggctttaaagcaagctgggagcttgggagacagcagaaagagggcagaaggaaaaccaggagtgggtggcaagctgggagccaagggagctggggctgtcataggaggaaagggtcttgaaacccctgtttgataattcagtagcaggcatcttactgtttttttaattattattttttttattttttggaatggagtttcgttcttgtcgcccaggctggagtgcaatggtgcgatctcggcccactgcaacctccacctcccgggttcaagcaattctcctgcctcagcctcctgagtagctgggattacaggtgcgaaccaccacacctggctaatttttatattattagtagagatgaaggggggtgggtttcaccatgttggccaggctggtctcgaactcctgacctcaggtgatgcacctgcctcggcctcccaaagtgctgggattacaggtgtgagccactgcgcccagcccgtctcactttcttttgtggctgctctttaccaaccctgttctgttccccatgcctttcagtacaagctcttttctttgcttttctttcttgtttttgttttgttttttcaagacaagttctggctctgttgcccaggctggggtgcagtggtgcgatcttcgcccactgcaacctccacctcccaagtttaagcaatcagcctgggactacaggcataagccaccacacctggctaatttttgcatttttttgtagtgattttgtagagttttgccagttgcccaggctggtctgaaactattgagctcaaacgcctcagcctcctaaagtactgggattacaggcatgagccactgcactcggcctctttctttctttcaaaggcagaatcttgctctgtcgctcaggttggagtgcagtggcatgatcataactcactgcagcctcgacctcctgagctcaacctcagcctcctgagagctgggaccacaggcatgcaccaccaggcctagctaatccttaaaaaaaaattttatacacatggacaggggtcttactatgttgcccgggctggtcttgaactcctggcctcaagcgagcctccagcctcaacctcccaaagcactaggattataggcatgagccactgtgcctggccaagcgcaggcttttctttgccatccttgaataggcccctcagacccatcatggctctgaccagagtagcatagagaggcccggcgcggtggctcacgcctgtaatcccagcactttgagaggccgaggcgggcagatcacctgaggtcaggagttcgagaccagcctggccaatatagtgaaaccccgtctctactaaaaatataaaaattaaccctgtgtggtggcatgctcctgtaatcccagctacttgggaggttgagacaggagaattgcttgaacccaggaggcagaggttgcagtgagccaagatcgcactactgcactactgcactccagcctgggtgacagagcaagacactgtctcaaaaacaaacaaacaaaaaacagagtagcatagaagagaccttcccctccctgagtctggactttatacctttgttaataggatgctgtcacacacacacacactgaaccgcctggagctcagctcagctttccctccctaccccctcctggactcccagagacagattttaatccagggtcccatgacactgtgtctgaagagtgatcatttcctatcagctatgccctggggaccccttctgccctgtgcctggccccactttcctcccacccctgtctgtctgtctgtctgtcatttgttcattcagcacagacttaggaagtgtctgcagtgggaggcactggggacagacagccacaggaagccttacggagctgatgtccccgcagggagaaggtgatggggacaaggatgaggcttgaaggagcagctagacatctggaggaagagtgctccgggcagaaggcccagcaggtgcaaaggccctgaggctggaacaggcatggtgtgttggaggaatgcaatgaggctggggtggctggagcaaactaagcaaggagtcatagagtagagagaggagtagatgaagagactgaaggtccttgggaacccccagtccaaccacagcataccctggagagtccttgctcaaggggacttgaggagtgaaaggttatgggaccctactgcttttgcacggttactttgtcgtcctgtatgtgcagtggtcacctgtgctggggtgctcgaaccttgaaggctgaggaagctggcaggaggaaggagaggaggactacgcagtggccaagacttctcctcctcccctccacacaatggggctcagctgaactgggagagggaagtagccagggaagggtactgatgagcgtatggaagcagaggagatgaagggcagtggggaggaggtgggaggggaggaggaagaggaaagggaggaagacgagggggaggagagggaggagggggaggaggagaaaaaggaagaggagggggaggagagggaggaggaggaggagaaaaaggaagaggagggggaggacgaggaggaagaagcaacggcagcagccagtgggcaagcagccagagctggatggaggagccaggacgttctcagataggtgatgggggagccctagggatgcagggatggtagcctcgatcaggggcctagaggacaaacagcaaaagccaagcagcagggccaggcgcggtggctcacacctgtgatcccagcactttgggaggccgatgtgggtggatcgcctgaggtcaagagttcgagaccagcgtggccaacatggcgaaaccctgtctctactaaaaatacaaaaattagccaggtgcagcggtgtgtgcctgtagtcccagctactcaggaggctgaggcaggagaattgcttgaaccaggggggcggaggttgcagtgagcagagatcacaccactgcactccagcctgtgcaacagagcaagactctgtctcaaaaaaaaaaaaacaaaaaacaagcagcgggtgtgtctgggggatgggccagcctctagcctgcagtcgctcccttcccaggcaaaagagagagaactcggtcccctctccctgtaccccacaagagcctgggcaccctccccactcccaccacgaacctgggcttcactgggagggaatttagacacttggatgctggagcctagatctgaggttctgttgagccacggcactgtgacccggactgtcccctccatccccgtccaaactgggagggggcatcccttgtccctggcactcctctgtgatctggcaggtgtgatgagccacagcagggacaggggaataggggctgggctttttagggtgatggcacccagacggtaacaggacgggagggaggtggtcctctgggttttgtttctccatctgggatgttggtgagggcaggcataagccacctctctgtgcctcgagtccaggatgcctggccctgcctcagggcctttgcactggctcttccccctttctagaatgttctatcatcagggtttcctccctcacctccctaccttctcagggagggcttcctgacctccctctttaaaattgtagccctgccaggcaccgtggctcacacctgtaatcccagcactttgggagcctgaggtgggcagatcacctgaggccaggagttcaagaccagcctggccaacaaggtgaaaccccgtctctactaaaaatgcaaagattagccaggcgtggtggtgggcgcctgtaatcccagctgcttgggaggctgaggcaggagaatcacttgaacctgggagatggaggttgcagtgagctgagatggtggcactgcattccagcctgggcgacagagagagattttgtcttggaaaaaaaaaaaaaaagaaaattacagcccccactgcctgactcctcattccttttcctgccttatttttctctccacctgacaataacaaaacaaacaaattatcaaaatgcagggccagatcaggtggctcatgcctgtaatcccagcactttgagaggcaagttgggcagatcacttgagcccaggagttcaagaccagcctgggcaacatagcaagaccccatttctgaaaaaaaattaagatatagagtctttgccactccctcatctccaccatgtccagaatattggctccatggagtgaaatttcttgtctactctgttctctgctgggatcccagtgtgtagttggtatgcagtgggcacccgataaatgtgaagtgatgtcagccatcctgggtccttatggctgcagcctgagaggttggacttggggggcggatggcgttgggggtagcgtacctcgggtggcaggtaacaggcaggttctggagacaggcaggcttgggtccaagtcccagactctactccctactttatgactttggatgactccatgcctcactttccccagttgcaaagtacagatgacagagggacctggcacttaacacatgtcagcttcccggggaccttgctggagtctggaaggagctgggggccaatctgaggcctccagagggtcagactctgagacaggacatttatgactttcccacccactcctagaattttccagaaatgtgatgaagagcaaggagacgttactttattttgggcagtcaggacccctctgaaaaggcgacattagggctggggcctgagtgggagtgagtgatgggctgagacaggaattggacttgtttactgccctcccagagacccctcattcagtggggagacagacgtgtctttgggcagttacaaggcagattaaccagggtacaaggaaaacaatcagagacactgaaggcaaggagaggctcgttttttaatttttttttgagacagagtctcgctctgtcgctcaggctggagtgcagtggcgcaatctcggttcactgcaatctccgcctcccgagttcaagcgatcctcctgcatcagcttcctgagtagctgggattacaggtgtccactaccacacctggctaatgtttttttttttttttttgagatggagtctcgctctttcacccaggctggagtgcagtgactccatctcggctcactgcaagctccgcctcccgggttcatgtcattctcctgcctcagcctccccagtagctgggactacaggtgcccaccaccacgcctggctattttttttgtatttttagtagagacggggtttcaccctgttagccaggatggtctcgatctcctgacctcgtgatccgcccgcctcggcctcccaaagtgttgggattacaggcgtgagccaccgcacctggctaatttttgtattcttttgtagagacggggttttgccatgctggccagactggtctcgaactcctgatctcaagtgatctgcccgcctcatcctcccaaagtgctgggatctacatttggccttctttttgtttttgcttttattttgagacagagtctcactctgtcgcccaggttggagtgcagtggtgcaatcttggctcactgcaacctttgcctcccgggttcaagcgattctactgcctcagcctcccaagtaactgggattacaggcacgtgccaccatacccagctaatttttgtatttttagtagagatgaggtttcaccatattggccaggctggtcttgaactcctgacctcaggtgatctgcccaccttggcctcccaaagcactgggattacaggtatgagccactgtgcatgaccaaggagaggctcttgacccaggctgggagtcttcaagacttcctggaggcagccacaggcaagctgcccacttgaaggtttaaccatgccaggcatcagataacggaatgctgaacagtgatttagagggagcggcccaggcaaaggcctggcatccgggaatggcatcggagcaacattcctaaaattgaagcagactctgggaatccacccgtggagaccctaggctgagaacctcggagtcagggtggctgcgggagggcagacagggaggccaggacagggcagtgcgttcggccaggtcacaaaggcctcgaatgccaggtcaggagccatggggagcctccgaggagatcttgagatggggaagggacaggctggtactcagagccactgctgagagagggatggactccatctgtgtgtatcccagaggaggggcggtcctggaccgtcatctgagaggaagtgctttgcctccagttacacaaacacctccggtccttaaagggacgataggtagcctctgcctccccactgggggcccttctctgtgccaacccatccaacccagagggctgatggaagacgtgtgctctgcaggggctctctgtggcttcttgcttcactgggtggatgggtatcaagatggtgacttgaggccgggagccgtggctcatgcctgtaatcccagcactttgggaggccgaggcgggaggatcacttgaggccaggagttcgagaccagcctggccaacgtggtaaaaccccatctctactaaaaatacaaaaattagctgggcatggtggcgggcgcctgtattcccagcgacttgggaggctgaggcaggagaatcacttgaacccaggaggcggaggttgccgtgagcctagatcgtgccattgtactctagcctgggtgacagagcgagacttcatctcccgcaaaaaaaggtggtgacttgatttcacagagaactccagctgcctgagccaccctgcaggataggagcaggctctgaggtccacagtttgctactgtctcaacccactgcccccagctcctctgagacccaggcaggactgcaggcccatgtaggttcagatggatgcctggaggccggacacggtggcttgcacctgtcatcccaacactttgagaggctgaggctcaagtatggcttgaggccaggagttcgagacaagcctgggcaacatagtaagaccctatctctataaaaaatatatattttaaaattagctgggtgagggctgggcacagtggcttatgcctgtaatcccagcactctgggaggccaaggcggatggatcacctgaggtcaggagtttgagaccagcctgaccaacatggtgaaatcccgtctctactaaaaatacaaaaaaattagccaggtgtggtggcacatacctgtaactccagctactcaggaggctgaggcagaaaaatcgcttgaacccgggaggtggaggttgcaatgagctaagactgtgcttctgcactccagcctgggcaacaagagcgaaactctgtttcaaaaaaaaaaaattagctgggtatagtggcatgggtgcctgtagtctcagctattcaggaggctgaggcagggggatcatttgaacccaagagtttgaggctgcagtgagctatgatcatgccactgcactccagcctgggcaacagagtggaatcctgttgtctcttaaaaaaaaaaaatttgttaagtggatacatacctggggaccctggagctccacggctgctgccctcaccctgttgttttcctccctctcggatgatgccatcttagaattccatgcctggaatttgcccaccggctctcctcgccccctcccacccctcggctgtgtgtccccttattcctgcccaagcaggcagttcccagatctaccccagatactcatcccaatctgccacccccaccccttgaagataccctacccggacctcagcacccctccccgaggctcctgtctctgccaccctccaccttcagcctccctctctcttcttttctggagacagcaccatgctctgttacccaggctggagtgcagtggtgcgatctcggctcactacaatctccacctcgcaggttcaagtgattctcttgcctcagcctcctgagcagctgggattacaggcatgtgccaccatgcccaggtaatttttatatttttagtagaaatggggtttcaccatgttggccaggctgatctggaactcctggcctcaggtgatctgcccgcctcggcctcccaaagtactgggaatacaggcatgagccaccgcgtccggctgagcctccctacctgttctgacccagcttccccactctggctgctgtcacctgcaagaggccagccagcctctgagtgacctccagggatgggacaacctccaagggcagcctgtgttgccaggagaactcccagaatcggtccctcccgaaatctctgccgccttcccatggcatcaaggctgagggcttctgttaccactgctgttttgtgtttttttttttgttttttttttgagacggagtctcgctctgtcacccgggctggagtacagtggtgcaacctcggctcactgcaagctctgcctcctgggttcatgccgttctcctgcctcagcctcccgagtagctgggactataggcgcccgccacggtgcctggctaatttttttgtattttttttagtagagacggggtttcaccctgttagccaggatggtctcgatctcctgaccttgtgatctgcccgcctcggcctcccaaagtgctgggattacaggcgtgagccactgtgcccggcctgtgtatttttttttttttttttaaacagagacagggtctcgctatgttgctcaggctggtcttgaactgctaggctcaagcaatcctcccaccccagcctcccaaagtattggaattacaggtgtgagccactgtacctggttctgctgctgtgtccttcaaggcatggtaacagacacttggtaacctccccttgaatctggagtgcccgagggcctgggctggcagccttgccaacatcgggaactggtcaagactgcactttgttttgtgttcattgtatttgttttcacggctagcctctgcacgtgatgccaatgctggcttgctctttcagggagagagggagggagagaaagtgtcttctgaaaataaatgtatttcggtaaacaaacaatgtgagccttttaacttttttttttcttattttttttttttgagacggaatcttgctctgtcacccatgctggagtgcagtggcacgatcttggctcactgtaacctccacctcccaggttcaagcgattctcctgcctcggcctcccaagtagctgggattaccatgcccagctaatttttttgtattattagtagagacgaggcttcaccatgctgaggtcgaactcatgacctcaagtgatccgccctcctcagcctaccaaagtgctgggattacaggcatgagccaccacacccagcctaaaattttattttatatttacttactgacttatttatttttttatgtttttttttttttttttttttttttttgagacagaggcttgctctgtcgcccaggctggagtgcagtggcatgatcgtggctcactgcaagctccgcctcccgggttcacgccattctcctgcctcagcctcccagtagctgggactacaggtgcctgccatcacgcccagctaattttttgtatttttagtagagacggggtttcaccgtattagcaaggatggtctcaatctcctgatctcgtgatccacccgcctcagcctcccaaagtgctgggattacaggcgtaagccaccgcgcccggccctatttatttttttttgagatggagtctcgctctgtcacccagactggagtgcagtggcgcaatctcggatcactgcaacctcggcctcccgggttcaaacgattctcctgtctcagcctcctgagtagctgggattacaggcacccaccatcatgcccagctaatttttgtatttttttgtagagatggggtttcaccatgttggccaggctggtcttgaactcctgacctcaggtgatcctcttgcttcagcctccgagaagtgctgggattacaggcgtgagtcactgtgcctggccagcatgagccttttttatttatttatttttgtttttgagacggagttttgctcttgttgcccaggctagagtacaatggtgtgatcttggctcacggcaacctccgcctcctgggttcaagcaattctcctgcttcagcctcccgagtagctgggattacaggcatgcgccaccacacctggctaattttgtatttttggtagagacggggtttctccatgttggtcaggcggatcttgaactcctgacctcagatgatccacccgcctcggcctcccaaaatgctgagattacaggtgtcagccactgtgcctggccagcacgagccttttgaaggagagcagtgagtgcctcacagcacaggtggaagacggacaggtggccatgagggtggtgggaaagcctgaaactggagcttggttgttctctggaatcctgggtgcccggtctcagttgagccttttactcatttgtgcagtcggtggacagtttcctgctacccgttgtgtgtcaggtgctgggaaaatggagaggtcctaatcaccaggatatgggggaagatagttgtccctggctgggtgcagtggctcacatctatagtcccagcactttgggaggttgaggtgggaggatcacttgaggccaggagtttgagaccagcctgggcaacatagggaaaccctgtctctgccaaaaaaaaaaattagctgggcatggcggcatgtacctgtaatcccagcactttgggatcctgttgaggcatcaggatcacttgaacccaggagtttgagactagcctgggaaacatagtgagacctggtctctacaaaaaaattttcttttttaattggccgggccgggtgcagtggttcatgcctgtaatcccagcactttgggaggctgagaggtgggaggatcacttgagctcaggagtccaagaccagcctgaccaacatgttgaaaccctgtctctactaaaaaaatacaaaagtagctgggcatggttgcacacgcctgtaatcccagctacttgtgagactgaggcaggagaatcacttgaacctgggaggcggaggttgcagggagctaagattgcaccattgtgctccagcctaggcaacaagagagaaactctgtctaaaaaaacaaagacaaaattagccgggcgtggcagtgcacgcctataatcccagctactcagaaagctgaggtgggaggatcacttgagcctgggaggtcgaaactgcagtgaaccttgatcatgccactgcactccagcctgggcaacaaagcaagaccctgtctcaaaaacaaaaacacaaaaaacagttgcccgtggctgggtgcagtggctcatgcctgtaatcccagcactttgggagaccgaggcgggcggatcatttgaaatcaggagttcgagaccagcctgaccaacatggtaaaaccccgtctctactaaaaatacaaaaaaaattagccgggcatcatggtgcgtgtctgtagtcccagatacttgggaggctgaggcaggagaattgcttgaacctgggaggtggagggtgcagtgagctgagatcacaccactgcactccatccagcctgggtgacagcaagactccgtctttaaaaaaaaaaaaaaaaaaaaaaggccaggcacggtggcccatgcctgtaatcccagcactttgggaggccaaggcgggcggatcacgaggtcaggggttcgagaccagcctgaccaacatggtgaaaccctgtctctactaaaaatacaataattagccgggtgtggtggcacgcgcttgtaatcccagctactcaggaggctgaggcaggagaatcgcttgaacctgggaggcggagattgcggtgagtagagattgtgccactgcactccagcctgggtgacagagcgagactccatcgcaaaaaaaaaaaaaaaaaaattgttgccccaaaagttctgagaaagatgaggtaggagaacccaggaggggagtgtcccctaacccagcccagcggcgattggtcggccctcctagaggaagtgtctgttgaacagagtcgtgaagagctgggaggaatttggcaggctgaagggagggcattactggtagggaatggcatgtgccaaggtccatttgctggggagcaccgtgccaggccagtgggagcacttgcaggattcaaagctgcgggtctgatttgcaggcaagaagaaagacctgggtgctgagtggggaggcggccaccatgattcaatcaagaaatgggagccgtggaaatcgggcagaggagggactgtcgcgggaaagacggacgtaatcgtagggcttaatgaggagctgagtgccgagagggtgtgagatggagtcagagatgactctcagaattttgtccctgaagactgggtggagggtgggatcttggccaagaagccaggggaggaggaaagaaggctctgtgggagatgacttcagccctgacgtgtctggacagcgcgcagacgggaggtattggggcagcaggtttggctttggcgggatggtgacctgggagcagcagaaatctggaaactgacagcatggacgtgctggccgcagcttccaggcaggtgaatttcccagggagagcagatggtgtgaggggatccaggactggcataatttagggagaaaaaccagcacaaattagagaaaacagcagagaggaggggaaccaggaggtcatgattctgggaaggagggatggacaaggggaggagatgctactagagggtcccagtttcatgcttagaggaattgaccacttgggattggccatgggaggctgcgactgatggccaaaagccaaaggctggagtagtagggtggggacagagaggtggcagtggacagtgaatagaagcaggaaggcaagtcctgttttccaataattcttttttttttttttttttttgagacaaagtctcactcttggccccccaggctggagtgcgcaatggagcgatctcggctaactgcaacctccgcctcccgggttcaagcgattctcctgcctcagcctctcgagtggctgggattacaggtgcccgccaccaagcccagctaatttttgtatttttagtagagatggggtttctccatgttggccaggctggtctcgaactcctgacctcaggtgatccacccacctccgcctcccaaagtgctgggattataggcgtgagccaccgtacccggccgtgttttctgataattctgaggctactgctgatgagctgagtgtctctgggcccatgtctgtctggaatgcctggtgccacagagctggggtcaaattactgcctggccatttgtcagctatgtgaccctgtgtaggtgatccggcatgtctccaagactcagtttgttcatctgtgaaatgagaatggtgaccgggcaaggtgactcacgcctgtaattccagcactttgggaggccaaggcgggcggatcatttaagtacaggagttcaagaccagcttggccaacatggtgaaactccgtctctactaaaaaatgcaaaaattagccaggtgtggtggcgcatgcttataatcccagctacttgggaggctgagacgggagaatcgcttgaatccgggaggcagaggttgcagtgagccgaagtcacaccactgcactccactccagcctgagtgacagagcaagactctgtcttaaaaaaaaagaatggtaacagtatcttcctcagggtgtgactgatatttccaatgcagggaggtaagggcttgtccctgggtaagcgtctgatggataatacctgggatggtaccaacgctattggtcactggtgccttaggataatcctggtgtgggtgtgggcaaaagcctgctctcccacagaacagtctggctttgcacctgcttggccctatatgaatctacctccatgtatgctgtcaccagggagcagcacaggggcccagccaacagctggtgggaggaggggcagatgttagagcaggttgagtgaaggaaggatcccatcagagcataacccagatttcacaattatctccaccctggaaggtgggcagggacatcaccaaaggggctgatcttgatggaaaattggtttcttggcccgtgtagtggctcatgcctgtaatcccagcactttggaaggccgacgtgggcagattgcttgagcaaaagagttcaagaccagactgggcacagtggctcacgcctgtaatcctagcactttgggaggctgaggcaggcggattgcctgaggtcaagagttcgagaccagcctggccaacatgctgaaaccccgtctctactaaaaacacaaaaattaggccaggcgcagtggctcacacctgtaatcccagcactttgggaggccgaggcagacggatcacctgaggtcaggagttcgagaccagcctgaccaacatggagaaaccctgtctctactaaaaatacaaaatcaactggatgtggtggtgcatgcctgtagtcccagctacttgggatgctgaggcaggagaattgcttaaacctgggaggttgatgttgccgtgagccaagattgcaccattgcactccagcctgggcaacaagagcgaaactgtctcaaaaaaaagagaattggtttcttaagtagtgaggtgggggtagagggctcattccctaccaaaaatgccccctctcctgtatcaaccctgtctcctgtatcaaacacaccttcagtggaaatcttttcattttcatgtactataattttctatttaaaaagtcacccttaatatatatacatacactggaatatgattcaggttttttttcttctttttccttgagacagagtctcactctgtcacccaggctggagtgcagtggtgcgatctcggctcactgcaacctctgccttgatcttggctcaagcaattctcatgcctcagccttccaagtatctgggacttacttggaagtaagctggccaccacgcctagctaatttttgcatttttagtggagatggggtttcaccatgttgcccaggctggtctcgaactcctgatcgcaaatgatccacccgtctcagcctcccaaagtgctcggcttacaggcatgagtcactgcacccagcctgattcagccttaaaagggaaggatgtaacatgtcatgtgggtgaaccttgaggacattatggtacatgaaatcagccagtcacaaaaggggagatactgtgtgattccacttacatgaggcccctagcgtcaccagattcacacagagagaaagtagaatggtgggtgccaaaggagagggaacagggaattattgattattaggcatggattttcaggtttttgttgctgttgttttgagacggagtctcactatgttgctgggctggaatgcagtggcgtgatctcggctcaccgcaacctctgcctcctgggttcaagcgattctcctacctcagcctcccgagtagctgggattacaggcgcccgccaccacgcccagacaatttttgtatttttagtagagacggggtttcaccatgttggccaggatggtctcgatctcttgacctcatgatccgtccatttcggcctcccaaagtgctgagatgacaggtgtgagctactgtgccctgccagagtctcacgatccgtccgcctcggcctcccaaagtgccgagatgacaggtgtgagccaacgtgccctgccagagtttcagttttacaacatgaaagaattctggagctggatggtggttatggttacacaaccatgtgaaatatttaatgccactgaactgtataattaaacacgattaatggtaaatgttgagtattttaccacaattaaaaaaaatttttaaatatgtcagccgagcatggtggctcacacctataatcccagcactttgggaggcctaagtgggcagatcacctgaggccagtagtttgagaccagcctggccagcatggcgaaaccccatctctactaaaaatataaaaaattagctgggtgtggtgtaggtgcctgtaatcccagctacgcagcaggctgaggcaggagaattgcttgaacctgggaggcggaggttgcagtgagctgagatcccgccgttgcactgcagcctgggcaacaagagcaaaactccgtctcaaaaaaaaaattttttttttaagaagtcacccttaaacccactccttataaaaaaaaatcagtgaaggccgatcatggtggctcatgcctgtaatcccagcactttgggaagccaaggtgagaggatcacttgagatcaggagttcaagactagcctggccaacatggtgaaaccttgtctctcctaaaaatacagaaattagctgggcataggggcacatgcctgtaatcccagctacttgggaggctgaggcaggagaatcacttgaacccctggggcggaggttgcaatgagcagagattgcgccattgcacacaccagcctgggccggtgagacttcatctaaaaaaaaaaaaaaatccatgaatgccaggtgtggtggctcatgcctgtaatcctagtactttgggaggctgaggcaggcggatcccctgagtccaagagtttgagaccagcctggcaacatggtgaaaccccatctctacaaaaaattaaaacagtagctaggcaaggtagtgcacacctgtaatcccagctacttggggagctgagctgggagtatcacctgagcccaggaagtggaggctgcagtgagctatgatcagtaaaacacaagacaggttcactggctcccatcccaacccggaccagctccctagtataacaactcacatgcatgtggactatacccttagagccttcttcttctttcttcttttttcttcttcttctttcttcttttttcttcttcttcttcttcgtgtgtcgctctcacccaggctggagttcagtgcgatcccagctcactgcaacctccgtctcctgggttcaagtgattctcctgcctcatcctctggagtagctgggatgacaggtgcctgccaccacgcccagctatttttttgtatttttagtagagacagggtttcaccatgttggccaggctggtctcgaaatcctgaccttaggtgatctgctgcctgccttggcctcccaaagtgctaggattacaggtgtgagccaacatgcccagccttttttgttttttgagaaagggtctcactctgtcagacaggctggaatgcagtggcatgttcaggactcactatagcctcaacctcccaagctcaagtgatcctcctgcctcagcccctaaagtagctgggactacaggcatgtgccaacacacccagctagttgttatttgctgttgttgttgttttaattttagtagagacaaggtctcactgtgtttcccaggctggcctcgaactcctgagctcaagtgatcttcccgcctcagcctcccaaagtgctggggttacaggtgtgagccaccacatctggccttacagccttcttctgtgtgtttatgtgcatatatgtagccatagggaaaaaaatcaaaatcctttggtgttctttcttattttttcaaatatttcacctgccccattctctttcctttctccttctagtactcccattgcatgcaagttagacctttttttttctttttttttcttttttttgagacggagtctcgcctgagctggagcacagtggtgcgatctcagatctcggctcactccagcctctgcctcccaggttcacatgattctcctgcctcagcctcccgagtagctgggattacaggcatgtgccaccacgcctggccaatttttgtatttttattagagagagggtttcatcatgttggccaggctggtttcaaactcctggacccaagtgatccgcccaattcagcctcctaaagtgctgggattacaggcgggagccactgtgcccagccataagttagatcttttgatatcatccagaaaataccaaggctctatacagtttctaaattgaggtaaaatatatgtaatataaaattaaccattttaaacatgtttaagtgtgcaacttagtagtattcagtacattcaaagtgttgtgcaaccattaccactatccatttttacttaaacttttttcttctctgttcttcagtttggatatttgctatcaatctgtctttaaatttgttagcactttcttttatcatctccaatgcgctatcaagcccaaacagtgaatttttaaatttcagattgtgtatatttttaagttttataatttccatttgttttttgttttgtttgtttgtttgtttttgagacagggtctcactctgttgcccaggctggaatgcagtggtgcaatcacagctcactgcagcctcaacctcttgggctcaagtgatcctcttgcctcagccccccaagtagctgggactacaggcttatgccaccacgctcagctaatttttgtattttttgtagagacggtgtttcaccatgttgcccagctgctcttgaacccctgaactctagtgatccacccaccttggcgtctcaaagtgctgggattacagacataatagctgcctcaaacacctttctgctaattccaacatctgggtcacctcagagccagtctcctttaacttccttctttcctgagcatgggccatgttttccaattttgtgagatgtcaagaaattttggattgagtgctggatattgtggaagatatgttgtagagtctctggattctgttatgttcctttgaagagcaatgattttttaaaatttaactatttttttatcaggcagttaacctggctggactcagactccaaagtctgtttctcctgtggtgggtagcagatgaaatcttggcctagttctgttagcctcagcaaggctagttggaatacgttcaatatccatgggctaagagtcagcaagagatgtacacagacttttaatgtagaatatggggctttccatctctggctcttttcttttctttttcttttttgagatggagtcttgctctgtcgcccaggctggagtgcagtggtgtgatctcggttcactgcaagctccacctcctgggttcacaccattctcctgcctcagcctcccgagtagctgggattacagatgcccgccaccatgcccggctaattttctttttgtatttttagtaaagacagggtttcatcgtgttagccaggatggtctcgatttcctgacctcgtgatccgcctgccttggcctcccaaagttctgggattacaagcatgaggcactgtgcccagcattttttttttttttttttttttagagacagtctcccaggctggagtgcagtggtgcaatcatagcttctgggctcaaaggatcctcccacctcagcctcctgagtagctgggactacaggcatgtaccacctcacccagctttttcttttttttttttggtagagacagggtctcactatcttgccaaagctggtctcaaactcctagcctcaagtaatcctcccacctcagcctcccgaagcagtggaattataggcatgagttacgacacccggccctatcctcttaatctttaagccagtttttatctccaatgaatagcaataaaaatgagaaattcacccagtgccatttctttcttccatttatagattcccttccgattgctacttgtttttcctctttagagtgatactgtccagtagaattttatttcttttttcttttcttttttttaagacagaatcttgctctgtcacccaggctggaatacagtggtgcaatctcggctcgctgcaacctctgccttccaggtttaagcgattctcctgcctcagcctccctagtagctgggattacaggcacgtgccaccacacccggcaatttttttgtatttttagtagagacggggtttctccatgttggtcaggctgatctcgaactcccgacctcagatgatctgcccacctcggcctcccaaagtgctgggattataggcatgagccactgtgcccggcctagaattttctacaatgatggaaatgttccatatctgaattctgcaaagtggtagccactggctacatgtggctattgagtatacaaatgttgttagtgcaacatatttattaaaacctttttatttaaacctttttttttttttttgagacacggtctcaccctgttgcccaggttagagtgctggtggtgtgatcacagctccctgcagcctagatctcccaggcttgtcatccttccacctcagcctcctagagagtagctaggactacagggagacaccaccatgcctcgctgattttttttttttttttttttttttttgaagtggaggtgaggtttcactatgttgtccaggctggtcttaaactcctaggcttgagtgatcctcccgccttgacttcccaaagtgctggggttacagacataagccactgcagccagcctgaatctttttattttattttttttaagagatgagggtctctctatgttgtccagcctggtctcaaattcctggcctcaagcaatcctccaacttcagcctgggattacaggcaaaagccaccacactcggctaatttttttttggggggcggagtcttgctctgtcacccaggctggagtgcagtgctgtgatcttagctcactgcaacttccgcctcccaggttcaagcgattctcctgcctcagcctcccgagtagctgggatcacaggcacgtaccaccacacccagctaattttttgtatttttagtagagacggggtttcaccatgttggccaggctggtctcaaactcctgacctcaggtgatccgcctgcctcggcctcccagagtgctgggattacaggtgtgagccaccgtgcctggcccaggtagttgtttttttatatttagctcagtgtttatcattgttatctatgaaagagctggcctgatgtggctgacttcaccattaccagaaggagaattcttgtggttttccattgtataaattatcaggccattagtgtctctctgtactttgcttttattttttttaactccataatcctcccaagccattgaacatagctcttcctccaccccatacctcctttagtaatttttaaaattaaaaaattttttaattgtggggccgggcgcggtggctcacgtctgtaatcccagcactttgggaggccatagcaggtggatcgcttgattccaagagtttgagaccaacccgggtgacatggcgaaatcctgtctctacaaacaaacaaaaacacaaaaattagctgggcatggtggcacacgcctgtagtcccagctgctcaggaggctgaagtgggaggaccacttgagcctgggtggtgaaggttgcagttagatagcaccactgcactccagcctgagcaacagagacctcgtctcaaaataagagagtcggctgggcgtggtggctcacgcctgtaatcccagcactttgggaggccgaggcgggcggatcacgaggtcaggagatcgagaccatcctggctaacacggtgaaaccccgtctctactaaaaatacaaaaaattagccgggcatggtggcaggtgcctgtagtcccagctactcgggaggctgaggcaggagaatggcgtgaacccaggaggcagagcttgcagtgaactgagattgcgccactgcactccagcctgggcgacagagtgagactccatctcaaaaaaataaataagacagtctccctctgtctccaaggttggagtacagtagtgcagtcatagctcactgcagcctccaacgcctgggctcatgcagtcctcccgagtagctgcaccacaggcatgagccacagcccccagcttccagaacctttttgttttccaaaactgaaatgctgtactttacccattcaattttaactccccatttcccttcccctggcacccaccattctattttttttttttttttttttttttttttggagacagagtcttgctctatcccccaggcaggagtgcagtggcttgatctaaactcactgcaacttctgcttcccgggttcaagcaattctcctgccttagcctctcaagtagctaggattacaggcacgcatcactatgcccagctaatttttgcatttttagtagaggtggggtttcaccttgttagccaggctggtctcgaactcctgacctcaggtgatccacctgcctcggcttctcatagtgctgggattacaggcatgagccaccacgcccggccccattctactttctgtcactatgaatgggactattctagagacctcatataagtggaatcatacaggatttgtcctcttgtgacaggtttatttcattcagcataacgtcctcaagatttatccatattgtatctttctctttttctttctttctttcttttttttttttttcagacagagtttcactcttgttgcccagactggagtgcaatggcaggatctcggctcactgcaacctctgcctcctgggttcaagcaattctcctgactcagcctcccgagtagctgggattacaggcacacaccaccatgcctggctaatttttgtatttttagtagaaacggggtttcaccatgttggccaagatggtcttgatctcctgacctcgtgatctgcccccctcagcctcccaaagtgctgggattacaggcgtgaacgaccgcacctggcataatagggacgaggtttcactatgttggtcaggctagtctcaaactcctgacctcaggtgatccacctgcctcggccttccaatgtgctgggattacagggccatctttttgcttttttttccccatttgctgttttaaaacttctagttcaggccgggcatggtggctaatgcctataatcccagcactttgggaggccgagggaggtggatctcctgaggtcaggagttcgagaccagcctggccatcatagggaaaccctgtcaaaaaataaataaaaaatacaacttctagttcaggctgggtgtggtggctcatgcctataatcccagcactttgggatgccgaggtgggaggattgcttgaacctaggagtttgagactagcccaggcaacatagtgagaccctccccccaatctctataaagaattttaaaattaggcaggctggtggcatgtgtctgtggttccagctactcaggaggctgaggtgggaggatcacctgagccccaggtgggttgaggctgcaatgagctgtgatcgtgccactgtagtccagcctgggtaacaagagcaagaccctatcccaaaacaaaaacaaaacaggccgggcgcggtggctcacgcctgtaatcccagcactttgggaagccgaggcgggcagatcacgaggtcaggagatcaagaccatcctggctaacacggtgaaaccccgtctctaccaaaaatacaaaaaaattagctgggcatggtggcgggcacctgtagtcccagctactccgggggctgaggcaggagaatggggtaaaccgggaggcggagcttgcagtgagccgagatcgcgccactgcactccggcctgggtgacagagtgagactctgtctcaaaacaaacaaaaaaatgccttctagttgaaaaggttttacatgtcctatttcatgacttgtcatttggtgtaccagagttttgttagttcaaatcgagaaagacgtttcctaacatgacatatgcgttagtaaggttttctttggagggggaactctgtatatgctaggtgtttcttaaactttcccaagagtttgggtcaaatttctgcttatggctgggcgtggtggttcatgcctgcaatcccagcactttgggaggccaaggcaagaggaacgcttgagcccagcctgggcaacatggtgaaatcccatctctacaaaaaagtacaaaaattagctgggtgtggtggcacccgcctgtagtcctagctacttgggatgctgaggtgggaggatcacttaggcccaagacgcagaggtagcaatgagccgtgatctcgccacggcactctagcctgagcaacagaaccaggccctgtcttctaaaaaaaaaaaaaaaaaaaaagaaagaaagaaaaaacagggctgggcgtggtggctcatgcctgtaatcccagcactttgggaggctaaggcagatggatcacttgaggccaggagtttgagaccagcctggccaacatggcgaaaccccatctctactaaaaatacaaaaattagccaggcatcgtggcatggacctataattccagctactcagtgtggctgaggcagtagaatcgcttgaaccagagaggtagaggttgcagtgaactgagatcaggccactgcactccagcctgggcaacagagcgagactctgtctcaaaaaaaaaaaaaaaaaaaaaaaaacgaaaaggagaaaagaaagaaatctgtttatttcttagcttgcaagtcaccttgctgttagttctctcacagttatctgccccaggaacacagagacgattatagataaagatcctgttaccttggacctggtaaaggctgctggactaggtgtagctcactcagcctccagctttctgttcattatcttgattgagggggtgatttcatgggtgtgtacatatgtcaaaatgtgttggaactgctgggtgccgtggctcatgcctgtactctcagcactttgggaggcggaggcgggcagaccacctgaggtcaggatttcaagaccagcctggccaacattgtgaaaccccatttccactaaaaacacaaaaaaagttagccacgcatggtggtggatgcctgtgatcccagctacttgggaggctgcggcaagaggatcacttgaacccaggaagtagaggttgcagtgagccaagatcattccactgcactccagcctgggcatagagactgcatctcaaaaaaacagaaaaaagtaggccaggcatggtggcttatgcctgtaatcccagcactttgggaggctgaggtgggtggatcacaaggtcaggagattgagaccatcctggctaacatggtgaaaccccaactctactaaaaatacaaaaaaattagccgggcgtggtggtgggcgcctgtagtcccagctactcaggaggctgaggcaggagaatggcgtgaacccgggaggtggagcttgcagtgagccgagattgcgccactgcacaccagcctgggcgacagagcgagactccgtgtcaaaacaaaacaaaaaaaagtgttggatctcacactttaaacacgtacagcttcttgcctgttgattatacctccgtaatgctgtttttatttttatttttttaccattaatagcccaagtgggccccctcacactcccacgtgtatacttaatcctgtctctgtgcgagtaacaatcagatggtaatccccccccacaatccctgctccactactccacctctggggctggggactgctcattttttccctccaaccccccagagaccagatcctctctcctccctcacggacctccccactttactctgggatgctgggggcccctggagatctcaccctggcctgaccatcactaactggggagagacttagaggcagacttgaatactccaacctccagggagccagggctggctcagaagaaaggtctaggggcagggaggggtattggctggggaggggactctgcctagcataggaagagcaggggaggcctcttaaatagggattttaatctgatccaggacttgaaaggcaagtgggaactggcccagggaagagggcggaggcatgttggaaaaagggcactgatgcagaggcctggaggcttggggctggtcttgggaatcataccatctggatggcatggggctgaggtaaccagagcttgaatagaactgcagaagagacagatgattccagaagggtaaggaggtggaggcccctctttacttccttcccacagcaggcaccaggccagagttgggtgggcacctgctgggggatcctcatggtccagtattggttgtaggttttgagggggctgacaggagaggtggttgccagggaatggttccaagaagatgcaataggggaggaggctggggatacccaggggacatggcccagcttacggaggctcctgagcttccaggggcatagacattaagaaattgcacgctgagcccgagtgtggtggcttgtgtcggtaatcctagcactttgggaagccatagtgggagaatggctcaagaccaggagtgcaagaccagcctgggcaacataccaagaccctatctctacaaaaaaataacaaaaattagctgggtgtggtggcatgctcctgtagtcccagctgcttggaaggctgaggcgggaggatcacttaagtccaagagttcaaggctgtagtgagctgcaatggtgccactgcactccagtctgggcaacagaatgagaccccatctctttaagaaagaaaaattgtggccaggtgtggtggctcacacctgtaatcccagcactttgggaggctgaggcaggtggatcacctgaggtcaagagttcgaaaccagcctggccagcatggtgaaactccgtctctactaaaataaaaattacccgggcatgatggcaaacacctgtcatcctagttattcaggtgggtgaggcaaaagaattgcttgaacccgggaggcagaggttgcagtgagccgagatcgcgccactgtactccagcctgggcaacaagagcaaaactccgtctcaaaaaaaaaaaagaaaaagaaaaaagaaaaattgcatgattagcttctagtaccccgaaagcttagagggcaagtagaaggaggagcttgctttttggggaaactttaatcagcagaggtaggcctggggaggcctccgcaggaccgtatgaaccctgagcccactgtgggagcagagcagccccctcctcacccaaggaagcttctatccttgactgtcccccttgctgactgagtgacctgtgatctgtctctagtcatttcttgctttgagccttgggcttcccagttcccacgtttcctttatgggaatgtttatggagatcaagccaaccatgcctgttaagggtgggttatttttctagagagtttgaccacctgagctaacatccttgcaccctcccacctgtccatctgtctattctactcattcatccatgtagcaaacatttatgtggcatctaatgtgtccagccctgtctgaggctctgaggatacagcagtgactcaaacaacattcttttctttcatgaaacttatgccttggggtgaagaagacaccccaatgaaacagatcaactgggacaagagggttgaaggaactacacaggatcaggagacagaataatatggtggcctctttggtggtagtctgagaagtcttcttggaggaggtgacatttgagctgaaataagaatgataacacagtcagacatgtatgtgactgtctggggtgcaaacatggtacaagtgagcttggtgagttggaagcccagcaagcagcagttgctatggattaagctggggaggcagaggtggggaggcagcagggccagaatgtagagggcaggaatgtgtgcagaaataaggggctcaggtaaggcggaaccttgaacttggggtccaccttggggtctttggggggagtggtacctcaaccggcagcatctctggtcactaacaccctgtgggacctctgctcagagaggctcagagtggaagagacaggtccgtctggaagggacagccaggacccggtgcagaggcaggctgtggttatctgcaaacagcccccttccttccagcatgtcacgtgctcccgcctgagcctctggccgcaggaatcaggtgaccccaggcagcgggccaggctgcaggggcgggtgagtgagtcaatgtatgcaagtgtgtgtgtgtgtgtgtgtgtgtgtgtgttttcatctctgggaggcccagacatctggggtctgaattaattgcctttttcacaaccatggacaagtcctgtatttccagctagattgaaagcaaaacaaaacaaacctatgtgcatagctctgatctgctgagcagtgccagggtccttgggggttcggggaagccgtgggaaccagtccttctcactcagacccctgaagaggggcagggatcctctactcatgccccctaacccacctcccgtgtcagtacaaagccccattctctctctttcccccaatctggggctatttttagccactaagaaggattatcagtttggttcccaggtggcaggggccaagctgggagtggggccagggaggcttcaaacagcagccaggcttgggggcgggtggggtgaggggagaagaggctggtcacactggccctgccacccacgcggtggctctgcagatgaccctgaagctgctgtcgtccagcccagcccaaacacttcagctgcagctttaagggaaggtggcaggggcaaggaaagcttccagcagccttaggcacctcagatgctggaaaccgtcctaagggcttggaagaaccatctagaagcctccataggccagcaccccttctttccagaccactccccatcctgcccccacctcctgtctagcagtaactatcacagtctaagctgttttttggggggtttttttccgaaacaggatctgctccgtcacccaggctggagtgcagtggtgtgatcacagctcactgcagcctcaaactcctgggctcaaccagtcctctcacctcagcctcctgagtagccgggattacaggtgtgtgtcactatgcccacctaatttttaaatttttttgtcttgctatgttgccctggctggtctcgaactcctgaccttaagcaatcctcccacttcggcctctcaaagtgctgggtgtgagccactgcactcggtcctctaaattttactaggtgctcactccacctcaggtgccattccgaaccactccatgtggaagaggggctattgtttgttccattttacagataaaactgaggcacagataggccacgttccatgcctggtaaacgggtgaggcaggaatcaggaatcagatccgttgtgatatcagcatggagtgtttataaactgcccgcctgccctgagcctcacaatagcctggtagaacaaggagggaatctagctgtacccatttttcagatgggacaactgaggcccaggaagacagaggatgacagggaacaaacagaagaactggatccaaaagagaaaagctagaaattgaggaacacatccctcagcctcatttcctcccttccctcaggagaagttgagccttgctggcctgaggtgcctggttatagccatgcctgagcccctcccatatgccagactctgcctcaatgccccaggtgca

SEQ ID NO: 829 - DNA, 16682 bp, Homo sapiens
  source 1..16682: mol_type = other DNA
atgaaccaatcaggcacgaaccaatcaagtttatcagactcgaaccaagcaggcataaaccagccaagcacaaactcacttggtatgaaccaaatggacatgaaccaagggagtgcaagcctatatgaaatgaaccaagtggacatgaaacaaccaagcatgagccaagctggcatgaggcaatcaggtacaaacctaccagacataaaccaacccgacatgaaacaaccagacacatggcaattaggtaggagccaaccaggcatgctgcaacaagaactgagccaactagtcctgagcaaagcaggcataagccaaccagacccatcgcaaccaggcccaagccaatcaggccccagccaatcacgcatgaggcaaataggcacgaaccaatcaggtatgagccaaccagtgatgcagcaactagacagccagtcaggtgggagccaaccaagcatgagacaagtaggcaccagccaattaggcacaagccaaataggcatgagccaaccaggcacatggcaaacaggactgagccaaccagtcctgaggcaaccaaacatgagtccaccaggcatgtggcaaccaggcgtgcaacaaccaggcatcagccagcaagtcccaagccacccagacatgagtcaaccaggcatgagccagcaagtccccagccaaccaggcataaggcaaccagacactagccaatcatgtaagaaccaaacagacatgagccaaccagacgcaaaccaatcaagtttatcagattccaaccaaacaggtataatccagccaagcccaagcttacttggtatgaaccaaatggacatgaaccaatggagtgcaagcctatatgaaatgaaccaagtggacatgaaacaaccaagcatgagccaagctggcatgaggcaatcaggtacaaacctaccagacataaaccaacctggcatgaaacaaccaggcacatggcaattaggtaggagccaaccaggcatgtggccacaaagcctgagcgaactagtcctgagtgaagcaagcataagccaaccaggtccaccgcaacgagccccaagccaatcaggccccagacaatcaagcacgagccaagcaggcacaaaccaatcaggtataagccaaccagtgatgtggcaactagacatgagacagtcaggtgggagccaaccaagcatgagacaagtaggcaccagccaatcaggcacaagccaaataggcatgagccaaccaggcacatggcaaacaggcctgagccaaccagtcccgaggcaaccaaacaagagtccaccaggcatgtggcaacgaggcatgtggcaaccaggcatgagccagcaagtccccagccaactaggcatgagacaaccaggcactagccaatcaagtaagaaccaaacaggcatgagccatccaggcaggggccaaccaggcatatgggaaccggggccgagtcagccaggcctgagccaacaagacctgaaccaattagtgctgagccaaccaggcctgagtcaaccaggcaggagccaaccaagtgtgagccaaatgggcatgaggcaaacaagcatggattactttcaaataagacatgcagaggctggagactgcccagaaattttgcgactgattaaagtaagcctatttttattacatggagcctcatggcattggtgtagggctgaaagagtaagggaggcatagttggggttcgaattctgcctctgctagttatgtgttcataacctctggtagttacttaacctctttactcttcattttctgcatctaaaatcaagattataacaatatatatctcaaaagattgttgttatgaaacaataacataaaatgattacatataaattgcttggcatatagtaaggggctcaaaaagttataggggaaccaattcctggaaattttagggactgaatgtgttctctttcctggggaaattttaactttaaaagagtgtcttagagaaaagaaatgcttaccttaaacaaatgacccaccgatgatagaatttcatattttagtggctaggattttgcggtagggagtcgcattgcttctaaggccacacctacttgtagaaactgatgatcagctacctaaaaaacaatattcacatgcaacaaattttccatacattttcagacagttcattgatcactgaagcccatccacagacagcccccaggagccaaggagctgggttacatatttctcatttaaatgtttattttaatggctcccttggaaatcattccagttaattaaagggacaagctatctagtagtcacagttactgtgctgaagttctgtggtgctgaaagcactcatttatgtgatggacaacctacagaattccatataaagctgtaaaccatgttctttatggagtaaatatgtggctggagcaaggcatagattgtagatacgcagccctcataagtgttttgtaatgaaaatgttttaataatatcctcactaatatatttaaatcttatctaaatcaggccaagtttgtgttccctttggagagtgtgttttaatggccaaaataaaatacccatagttttctagtgaaatccacctgttgaagtgattctaggcctggttacagatctgtaagaattgggttacctatccttttatggcttacattctattccatttccacaaattctcacatcatttctctaactggcattaatctgaatgattagataacctatcaaaatactatgcccaagagattattacagatccacattcttccaggtggtagaaaacattttttaaagagttttttgtagttctagcatctgacactcggtcggcaattaataaatttattgttgaatgacaattaatctctttacctggacaaatgcacttttcctagctttccaagcaatgcccattgtcatcaccaagggaataatacatcactagattaccccatttcaatgaaactatctgaagggtttctggccacatttactttttaatttgccacatgtatctgataatacataagatgtttattgggagtaattttaatgagtattcattgtggaaaaataatagaaaagctaaattactctctcacatacatgtatatagtgactaattggctttgagttttatgttcttcttaatattttatgtccatttgtcctaactcctgttcattgctaagtttgcaaaacattctctccttgcagaggagtttattagagtttgcaatcacagtaattgcttagctgaatatattacaggttttattgactgtcccattccaagtatcctctgtatgaactcattttatactattctcaatcagcacatcacagcattatttgggagcctagtcatttcattgccaggcagccatacttcttgcttaccagaatttctaaagctttttattgtggtggtccttaaagtgtggttttggaccattggtgaaccacagatggtgctgggtcatattaatattttatttttgttcattatacaaacattgaatgcatattaggggaagattatataccaagtagtataaaagatataaggattcttggattacagtctctctctaccctcaaggagcttacagtgtcttagaggaggtatcgacataaatattgtcctccctgaccaatccattctctacacagcagccaaaatgcttaaaactccattgagcttctggttgccttgagaataaaatccaaacttcttactaatgctctatgtaatctggcccttggggttctcctgtattttaaaagcttttttccattaaaagtttaatgcaattccagtcaaaatctccaaattttcacatagaaacattttaaaaattcaaaaaagaagagtaatgaggggagatgatctataccagatattataaaactgtaagtaattaaaatactatggtaactagtggaaagatagatcaatgggacagaatggagagtccagaagttctcttaagtatgcagtcagccttctgtatccatggcttctgcatctgtagattcaaacaaccatggattgaaaatatttgtaaaaattgcaaccgtactgaacatgtacagacttttttcttgtcattattccctatacaatacagtataactatttacataatatttacattgtattagatattgtaagtaatccagagatgatttaaaatatatgagaggatgtacatagggtacatgcaaatactctgctatataaggggcttgaacactctcagattttggtatcctggggctgagggagcaggtcctgaaactaatctcccatggatacaaagggatgactgtaaatgaggatgtagtatatgataaaagggacatgtcaagtcagccaagatgggttattcagtaagtgctgttgggactattgggaggaaaagataaaggtgaaattgtacctaacttcttacaccaaaaaaagttgaacaaatcaattattaatattatgatcttaaaaagaaaacgagtgaatattttttgcttttcaagcttgagatataaaccatgaaggaaagaacctgagtatgtaaaataaaatgatatagtaaaaagccacaataaaaaagcctcaggttaaactggcaaaaacatttcataggcaaacacctgagagacttctctgtaaagcctatgagcttcataatacataaactttatgacagctgccttgaatgctcagtaactttttttgccttacttctcagtttctggctgcattcaaggttactaatctggataattaacattcatatgtgtgaggtataaacatagttaatctctctctttaataatatttatacatcctttcgttgcattactgttgtagattttgtttctagatgactgggattaagtctgactcacttttaacactgcccaggacgtcacatgtcaataaatgtttaatacaaattttatgatgattatcatcttaataatttattgctaaatcataaactgaaggttttatctactttgacaggaattggctgcctgtgaaaacatgctagatgcaatggagttaacagcagctggtaaggtgttttgtggtattttcagagcaagaaaaagaaacacacagtactacttagatatgtggaagctattgttcttggtacataaagatgacaccattactaacatgtgcaggacataaatttgatagctttgtcagtgctccactattttattttccttatttttagtacaaaaatgatacttaagagctcttacacctttacagctccaatagacttcagctggttttcagaatgtaaaatgaggagtgttactggtcaaaaaagtataatttaacacccagtatgttggtagtaacttgatacaaggaaattgataaaagcaaaatgatttaaaatattttcaaagtatttactacattttgatagtcatcaagattaataggataggctagtgatttctgaattggaacattttaggcagtaaatatgaagatgaaaagattattgatgtatataaaattacaaatggcaaagactaggtgaagacagttatcaaaatctagaagaattgatgaaggataactccttgaagttgaatacttcagaatgcatgtaataaactgagaacattctaccaaggagataaatggtttcactataatactgggtgacagattcagaaggaagttatgggatgttttgtggagtcttttgcgccatgccctaacaaactagtcttagtgccttggtcagaaatagaattctgaactgcatagatcatggatcagttgtcttatgtgatgatacttatgttcttatacttggtaattaacaccactagaatgttaactaaatagtaattttgttggcttaaaagaaatagtaagaaatacaaagttgaaagtaatgtacactctatgaaagcagtactcaaactgaaacagcataacaaaatgagcatccctaacctgataatctgaaatctgaaatgctccaaaatcagaaactttttgagcactggcattacactcaaaggaaatgttcattggaacatttcagatttcagattagggatgctcaactgttgagtatataatgacatattttaaaaatcaaaaaaaatcagacattcaaaacacttcttgtcccaagaattttggataagagatactcaatctgtactatgttgagataatgcccctacactatttcattgtagttagaaaaatactgctcaggataatatgtaacaatcataaacaacaaacaacaaaatactttgtatactccagcatcctgccttaggatttcagtatatatttaaattgcagtaatttcataatgtcctcagtcctgtttttatcttaaaatgtccttatgtacttgtatagaggccggtgagatatttgatttttgtttactcttacctattgtcacaaacttttaaaaaatgtgattaaatacacatatcattttaactatttgtaactgtataattcagtgacattcaatacatccattgttgtgcaaccagcaccactatccatctccagacattttcatcacccagctgaaactctgtaatcattaaacaataaatccataggtgggaattgaacaatgagaacacatggacacaggaaggggaacatcacactccggggactgttgtggggtggggggaggggggaaggatagcattaggagatatgcctaatgctaaatgacgagttaatgggtgcagtacaccaacatggcacatgtgtacatatgtaacaaacctgcacattgtgcacatgtaccctaaaacttaaagtataataataagaaaataaataaataaaatttaaaaattaaaaaaataaattaaaaaaaataaatccccattgccgacctccctccccctaggctctcataactactattctactttctatctctacaaatttgtctattctaggtacctcatatgactggaaatatatatttgtccttgtgtgtctgccttatttcacttagcataatgtttcaagtttcatccaagttgtagcctgtatctgaatttctttccttttcaaagctgaataacattccattgtgtatatatataatgtgagatatatatatcattttgtttattttgactgtttccaaattttggctattgtgaataatgctgctgtgaaacattggtgtacaagtatctgtctgagttgctgctttcattattttgggcacgtacctaaaagtggaatagctggatcatatgataatttgggggtttttctgaggagcttccatactgttttccacaacagctgcatcattttacattctcattagcaaagcacaagggttctaatttctccacatcctcaccaacacttatttttgtttttttgtaatacccatcctagtcggtatgaagtgatatctcattgtgttttgatgtgcattgcactaatgattagtgatgttgaacaccttttcatgtgcttattgacccattgtatatcttctttgagaagtgtctatttatgatatttacacattttggaattgagttggttttttgttgttgagttgtaggagtcctttatatagtctggatattaatcccttatcagatgttatttccaaatactttctcccattccatgggttgcctttttactcttgatattgccctttcacatacaaaagattttatttttgataaagtccaatttattcattcttttgtcacttgtgcttttggtgttatatccaagaaatcattgccaaattcaatgtcttgaagatttcccatgtttcttctaagagttttataggtttagcacttatgttgaggtatttgatctattttgagttacattttgtacatgatgtgaagttaagggtccaacttcattattttgcatatggatattcagtttccctagtactgtttgttgaaaagacggtccttttccccatgaatggtcatagaacccttgtatcaatgggtcagatatgtgagggtttgtttctgaggtctctattctgttcccttggtctatatgtctgtccttttgtcactaccctacagtattaactgctgtagctttctaataagtttcaaagtcaggaagtgtgagtcctccaatattattctttgttttcaagattgttttggctatttggggccccttggaattccatatgaatgtgaggatcagcttttctatttctgtgaaaaaggctgttggaattctaatagggactgcattaaatatgtagatcattttgaatagtattggcatcctaccgatgttgtattcctatgcatacacagggttgttgttgtttttcttttttaatttctttggatattttccagtttctttgagcaatgttttatagctttcagtatacaagtttttaacctccttgattagatttattcctaggtattcaattattttaggggttattgtaagtggtactgctttcttaatttattttttggtttgttttttgctgctatatagaaacacaacttatttttgtttgttgatcttgtaccctgcaactttgctgaatttgtttacagctctagaagctttctcttagattctttggaattttctctatatagaattgtgtgatctgcaaatagatagttttaccttttcctttctactatggattttttttgtttttttgtttcgttttgttttgttttgagacagagtcttgctctgttgtgcattggcacgatcttggctcactgcaacctccatgtcccaggttaaagcaattctcctgcctctgcctcccgagtagctgggattacaggcacatgccaccacacctggctaatttttgtatttttagtagagatggggtttcaccatgttggccagactggtcacaaactcctgacgtcaggtgatccacctgccttggcctcccaaagtgttgggattacaggcgtaagacactgggcctggcctatggatggtttttatttatttttcttgtctaatagctctggccataacttccagtacaatgttgaataccagtggtgaaagtgggaatctttgtcttcttcctaatcttaggggaatgttttcagtcattcaccattgagtataatgtcgttttcataagtacgctgtatcatgttgaggaatgtccctctattcctagttttataaaagcttttatcatgaaagtgttgtgctttagtcaaacacctttttcggcattcattgatttgattatgtgggtttttccccctttgtttcattaatatgatgtattaaattgatattcttatgttggtgcacccttacgttcctaggataaatcacacttgattatggtgaataatccctttaatatgctgttgagttcaatttccaattttgtggagaattttttaacctatattattaaggaatattggcctgtaactttcttctaatatctttgactgcctttggaatcagagtaatgctgacctcacggaattaattacaaagtgttcccgtctcttcattttttgggaagagttagagaacgactggtattaattcttctgtaaatgtttggtagaattcaccagtgatgaggccatttggttccttccttttttttgttgggagatctttgattactgattcaaacttttgcaggtctgttgagattttctgtttcttaagtaggtttaggtaatttgcatgtttgaaggaatgtgtccatttcttctaggttatctaatttgttgttatataaatcataatatttctatacccccttttaatgttgtagtgttggcagtaatgtccttattttcatttctgattttaattatttgcatcctctttgtcagtctagctgtcaattttgttgatcttttcaaataatcaaccttcattgattttctccatgtttttctatcctctattttatctctatccaatttttattattaccttacttctgcaagctctgggcttagtttgctcttctttttctagttccttaaggcataaagttagattattgttttagataattttttaaatggcatttacagctataattttccctctgagcactactttcacttcatcttgtaagcttttgtttgttgtgttttcattttcgttcatatctctaagtgttttcctatttcccttatactttcctctttgacccattggttgtgtacggtgcgttgtttaatttccacatatttgtaaatttctcaagtttttttcccactgatttctagtatcattgtattgtcattagaaaaaatactgtgtgtgattttcatattttaaaatttattaagacttggtatgtgacctaatgtatctatcctaaagaaagttccatgtgtacttgagggaaaaaaatgtgtattctgttgtagttggatagaggtttctgtatatgtctgttagatacaattggtctacagtgttcaagtcatctacttttctgtctggttgtcctatatattactgaaagtggggtactgaatctcctattattgtcttgctgtgtagttctctcagttctgtcagtgtttgcttcatatattttggagctgtgatgttcaatgcatgtatatttataaatgctatgttcttggtgaattaacccctttatcatttcataatgtactttgtttcttgtaagtgtttttgacttaaagtctattttgtctgatactagtatagccaccctagctctctttcagttactatttgcatgaaatacctttttccatcatttcattttcaacatatttgtgactggatctacagtatgtctcttgtagacagtatatacttggatcatgtttttgtttgttttccttaatctattctgcctatctctgtgttttggcaggagtctttaatccatttacatttaattactgatgaggaaggactcacctgtactatttaactgtcttccatacgccttaaagcttttggttgttcctactttcctccattagtccttttcgtgtgttttatttttgtagtgaaacattttgattccttctcatttccttatgtgtgtattttatagatattttgtgtttaccatggggattatatttgatggttataacaatctaattttgatttaaaccaacttaacttcaatagcatacaaaattcttcttatatatatatctctgtccccctcttctgttattgatgtcagggattacatctttatacattgtgtgcccaataacgtacattaggctgggcatggtggctcacgcctgtaaccccagcactttggaaggctgaggtgggtggatcacttgaggccaggagttcgagactagcctggccaacatggcaaaaccccatctctactaaaaataccttaaaaaattagctgggcatgatggcaggtgcctgtagtcccagctacatgggaggctgaggcatgagaactacctgaacccaggaggcagaggttgcagtgagctaagatcatgccactgcactccaacctgggtgagcaagactctgtctcaaaaaaataaaaagtaataattatttttatccatttgtcttttagacaatgtagaaaacaaaacgtggagttagggtcatctctcagtatatgcaggagattggttccaggacccactgcatatacccaaatccatgcctactcaagtcccacagcgagtcttactgaactcacatatatgaaaagtcagtcctctgtatatgtgggtttctcctccaatgaatatcgtttttgatctgtgtttgaaaaaaatccacgtgtaagtgtacttgcacagttccaccccatgttgttcaagggtcgactgtataaacataattacaatactacctcttataattgctcatgtatctgtctttaccagaaatctttattcatacaactttgagttactgtttagattactttcatttcaacctgaaagactccttttggcatttcttgctgggcaggtctaatggtaatgaattccttcagtttctttcttttttttttttgagggggctggggtggggggtgtttgggaatgtcttaatttatccctcattttgaaggacagttttggtggatataaaattcttagttgacagtccctgctccccctgccccccagactttaaatatcaatccactgctttttggcttccaaggtttctgatgggaaagcagatggtaatctaattgaggatccctcatatatgacaaattgcttctcttgctgtgtaagattctgtgtctttggttttgagactttcattataatgtgtcttggtgtggatttctttgggtgtatcctagttagagtttgttgagcttcttgtatttgtagattcatgttttatgtcaaatttggttttcagcagctattttttcaaattctctctctccctctctcctgttaagtcccacaagatatatcctgttccacctgatgatgatgatgttccacagacacttttggctttgttcacttttcctcatcccttttctgtttctcagactcaataatttcacctggcctagtttcaagttcacagactctttcttcaacttattcaaatgtgcctttgaacccctccagtacagtgcatttttttttcatttcagttattgaacttttaagcttcagaatgttagggggaggattttttaaaatttatatctatattattttgtttacatatatttttcctgtatttgtgcatgtcttatctctctgggcatctttaagacagatgttttaagttgtttagtaagtcaaacatctggctttcatcagctatgttttttgttaatgtattttattcctttgaatgaccatcatttcttgtgatttttgttgaaagctagacatttgaaacttatactatggtaactctggaaatcagattctcctttttccccaggatttgatgggagtttgttttaaagcattacagggcgttctctgtgtcagggatcagcctgagttgaaagcttaatgtgttctcaggtcccctctccatcttttttttttttttttttttttttttttgagacggagtctcgctctgtcgcccaggctggagtgcagtggcgggatctcggctcactgcaagctccgcctcccgggttcacgccattctcctgcctcagcctcccaagtagctgggactacaggcgcgcgccactacgcccggctaattttttgtatttttagtagagacggggtttcaccgttttagccgggatggtctcgatctcctgacctcgtgatccgcccgcctcggcctcccaaagtgctgggattacaggcgtgagccaccgcgcccggcctccatctttatctagtcacacatggtaactttctaaattcccctgtatatatgtttttaattcccaaatgtctcacaaaacagggcagctcctttaaatctcctggaagccacttcagctcgtgggggttggaacaatggcagttaacctccaagtcgtcacctcagtgatcagagtaacaacacacagtcaaaacacagaacttcagtattttgaggacaagaggtttattggtcacccttgctccagcaagctgctacagaaatacaggttgctgttcccatggagtagagggtgctgagtgttgggtagctgccacctcactgatggctgaatttgatccaaattaactgcagttgaccagccaggctgtctcctgtaagttgcaaatgttcagataaactccagagttccaaaatattcacttcagtttccgccaatacaattgctatccaggtggagagagaaattcctagtgcttcctatccaccatctccttctctctgctataaactttctgacatcctatatatgaattgatatttcagatttactcagagatggctttggggacaatccccttttctactgcctgattgcagaagtaaacgatcaacaaaaaccatcaggtagagtaaacctttcttctccagttcaatctggagtatattttttccatgctgaaaaatagtacagttttgtagcatataattactattaagcagaagagaatgtgtataaacccagtttttttaaagaaaatgcatggtatgtacttatgtttgtataaacattattattaagagacagggtctcgctctgtcacccaggctggagtgcagtggcatgatcatgactcactgcagcctccaactaaactcctgtgctcaagtgtctcagcctcccaagtagctgggactacagacatgtgccactatgtccaactaatttaaaattattttttgtagagacagggtgtcactatgttgcccagactggtctcaaactcctgagctcaagcgaccctcccgccttggcctcccaaagcacagggattacagccatgagccactgcgcccagctaaaattttttggaagatcgtacaccacactataaaaggagggcttatatcttaaaggttgtattttaagggacttaagtcctctacactatatgtttttgtattgttatttttttccagtgagcatttattactttaatagttaaacaaacgccaaaagacattcaatttgggggtaaagaactggctaagattcaaccaacctttctacaccctttcttctcccttcctaggcaaactgactgttggatttgccatgtactactttacatacgactcatggactggcaaggtactttacctagaggacttttatgtcacacaagcttaccaaggtaaaactaaaatttatgatattacttttaaatactttaaaaattaaagtgacatattttaaggagatagggctttactatacatacggtgttttagttaatgtaacttattgctacttaatgagtttgatcactatcctaatgagtttgatctaatctgtgattgtgaagactcagtcacagattagaaaaacattttattagttcctctcaaggtttgaataagccaagctatcacatggctatatatttttttattttgtttttgagacagggttttctgtcacccaggctagaatgcagtggtgtgatcacgactcattgtaacctcaacctcctacactcaagcaatcctcccacctcagcctcccaagtagctggggctacaggcatgtgccacagcacccagctaattctttattttttggagaaacagggtctgtgttgcccaggctggtctcaaactcctgggctcaagtgatcctcctgccttggcctcccaaagtgctgggattacaggtgtgagccatcgtgccatcacatgtgtgagccatcgtgtgagtataggccacacagctatacttttatctttaaaaaatgctttcacattttaggtggttttcagtaaaaacagctaagaaatataccgttataagacaatagtggcagagactcacttcttcactgatctttaaaataaacccaaactcttctatgacctttggtacgtcattccaattaggaaaaagggatatgaaagcattcacgagttgtgtttccagaagctattaataatatacaaaaaacagatacagagttttagatattatttattttaaactaaagcaaataacaagttaagtgaaatttgcagttttcactttgcattgtctatttaaaaggcctaggtattggagctgaaatgctgaagaggctaagtcaggtatgtattacaattagtattgatattctatacattaaccttttcttaataaatattcacagggcataaattaaatcattaatctcaccatttgaacataaccccaacatatacttcaaatttctacccaaattaaactggattttcaaatcagatgatcatatacagtatatgaattatagtcaattaaaattgatttatatataatccacaaccacactatacaccctttttgctatcaagggaaagtaagaaggagggagattagaaagcatttttattcaaaaacacaggctcacagtatgaatattacaagactataaaagcaagatcttcttgtattttggaaacatatgagaacatgtgttcttttaggtacaccttttctgtatgataaaggctttgcaaatcagttttgagattttaaagagggctttaaagctcagaacagtgagacttttttctttttacagctatagaaaagttcaaaaggtaactactatatttggaagtattattcacacatagtgtcttgcatagagtagaccttcaataaaatatatgtgttaacgaagattatactttcaaatgaaagtaatatttgcttgtttgtttttaaacagatagccatcacaactcaatgtaactgcatgcactttcttgtcgtcatttggaaccaggcttctatcaactactatactagtcgaggggctttagacctttcctctgaggagggctggcatctcttcaggtttaacagagaagaactcctggacatggcatgggaagaatgaaagaggctttgtaacaactcatcccaacacagcctccaacatttgactgtcacctgagtctaacagcagtttgactttgttgtacaatacagcaagtgatcatc

SEQ ID NO: 830 - DNA, 4404 bp, Homo sapiens
  source 1..4404: mol_type = other DNA
tggcgacggcgctgatggctgtggttctgcgggcagctgctgtagccccgaggctgagaggccggggaggcactgggggcgcccgaaggctgagctgtggcgcgcggcggcgggcggcgaggggcaccagcccggggcgccggctcagcaccgcctggtcgcagccccagcccccgcccgaggagtacgcgggcgcggacgacgtctcccagtcgcccgtcgccgaggagccgtcgtgggtgccgagtcccaggcccccggtgccccacgagtccccagagcctccttcgggccgctcgctggtgcagcgggacatccaggccttcctgaaccagtgcggggccagccctggggaggcgcgccactggctcacgcagttccagacctgccatcactccgcggacaagcccttcgccgtcatcgaggtgagcggagcccggcgtgggccgtgacgcagcgaggggatggggttgtgcggccacctgtcctcaggcatggcaggatacgctgcgggctctgcgcagcggaagcgggaaggagcccggcagggcccagaccagcgccgccgggaatgggagaggccgtaagctcctccggaagcctcccgcccagcccgagtgaggatcctgggggaccccacccgccaggtgtgatgctctgaagaaggcccccaacatgggcgcagttaggggttcagaaggacctggacaggagccgcttgcactgcccctcccccaaagatgtcccggagtccaaggtcggagggaggagggcgggaggtaccccagcgtgagacaagggagtggcaagacccaacggggcaaagggcggagcaggtgggcactggtggccagaactgggtcctgacagcttctggaagggtagggtcaccgagacggccctgcaggccaggctgtgggagccagcggctcaggtccgtgtcacgctccttgaaagcccactcctccgcaggtggacgaggaggtgctcaagtgccagcagggcgtatccagtctggcctttgccctggccttcttgcagcgcatggacatgaagccgctggtggtcctggggctgccggcccctacggctccctcgggctgtctttccttctgggaggccaaggcgcagctggccaagagctgcaaggtgctggtagacgcgcttcgacacaacgccgccgctgctgtgccattttttggcggcgggtctgtgctacgcgctgccgagccggctccccatgccaggtgagtgcccgccctgcccgcccaggcgtcctcagagcgtgctactctgcccgccctgccccgtccggcaggcctggagggggccctctcgagcaccacgtctggcccacagctacggcggcatcgtctcggtggagacagacctgctgcagtggtgcctggagtcgggcagcatccccatcctgtgccccatcggggagacggccgcgcgccgctccgtgcttctcgactccctggaggtgaccgcgtcgctggccaaggcgctgcggcccaccaaaatcatcttcctcaataacacaggcggcctgcgcgacagcagtcataaggtgcggccctttctttcaccttcccccacgccggcgatccgggccttctcttgcgcccctcgcacttctccccgacgggccgcagactcactagcaagccgggtgggtagaaaagcctaagggagtataggggaggagttcagccctgggtgcccagatctgcgccctccctggctaaggactccgggcggaagtaaggataaaggggtcagagaaaagagaggtccgtgggggtaggggggcagtccgtgccggctgtgggccaggctcacccgctgactccggacacaggtcctgagtaacgtgaacctgcccgccgacctggacctggtgtgcaacgccgagtgggtgagcacaaaagaacggcagcagatgcggctcatcgtggacgtgctcagccgcctgccccaccactcctcggccgtcatcaccgccgctagcacgctgctcactgagctctttagcaacaagggtgagggcggtgggcgggccggggactgggtcccgggagtgagtactggccggggctgggtgtctgcggtcaggaggagcggcttctcctcctgtccaggagccgtagggggaggcggggggtgtcacagcaatggctcctgctgctgccgaaacccgggggaggtgagagaggaggagacccagtgtactggaagggaactccgaaggaattaaaggaatgggcgggactaggggggagaaggaggggccccccggtgggcggggccaggggcgggaccataagggaggtgttcgaccgggagagatgggcggggcttaggtgggtgggccgggtcagcggcgggagacagacttcaaggagcgaggcaagactaacggaagtgggtggggctccaggcgacaggaggaacttggggcacaatctctgcctggggaaagcatctccttgaatgaaaatcacagacaaatctatgcagaccactgaaatcatttcactgtggaggtctcccaaagacggaaattgtcccaccagcgcctgtcctacctgcagtccccaccaggctgcgcaaacggccctccagccagactagcccctccccatcctcctccagggtccgggaccctgttcaagaacgccgagcgaatgctacgggtgcgcagcctggacaagctggaccagggccgtctagtggacctggtcaacgccagcttcggcaagaagctcagggacgactacctggcctcgctgcgcccgcggctgcactccatctacgtctccgaggggtaagcctgcggaccccagagggcggggtctggggggcagtcgggcagcttcggaccaaggagaggtcccagcctgccgctctcccgctgcgccaggtacaacgccgccgccattctgaccatggagcccgtcctggggggcaccccgtacctggacaaatttgtggtgagctccagccgccagggccaaggctccggccagatgctgtgggagtgcctgcggcgggaccttcagacacttttctggcgctcccgggtcaccaaccccatcaatccctggtaggtcctgccactcccagctctgggctgggccctgacttccctcccctctcccacccttgccaaccatgccaagaaggctgggcttcctcttcttccactggtctccctttcactacctcccaggggcagaacacacagaaagcctgagatttcccgagttaaagcatgcttaacactccttttctggcagcaagtgacacctcctaagccccacgcagcccacctctcacaggggcctgaggaatcctaacccttcagggtctattggaggcctgcggcgcctccagtggaacatccctcctctctccttcagtaactaccccctcacccctacaccctgctctgtgagcactaggaagtgagcaagaaccctcctctttgctgcacagccaaggcagtgtggagagcaaagcacccgctcccttcctgtgtgcgcctggcaaggtacctaacttctctgagccttagctgcttctctgtgagctgagcatcacaatgccaggctcaggcctctgctgtgaggataaaatgagataacacacagcaggaccaagctgggtgcccagcatgcagtaggtcctcaatcaatgttttttaaagacagaaccagtgagtaatgaacactggccttgccctaaaaactgtttcctacatcacctccccacacccaggtacttcaaacacagtgatggcagcttctccaacaagcagtggatcttcttctggtttggcctggctgatatccgggactcctatgagttggtcaaccacgccaagggactgccagactcctttcacaagccagcttctgacccaggcagctgaccctcaccatggacactacaggccctggaatggccagggtggaccaaaagccatgccagctgggcatgaccccaggcagccagccacaggctgaagggggcttgttggctgagtgatctgcagaggagaaagcagccccagctctgcccagaggaggcgctgaagtgggacaagcacaggaaagaaggggaccagtctaggaccccaactcgactcactctaaagctacaaccaaatggccttcgattttcaacctggggattaggggaggggagggtgccttccagggctctactcaggactaaccctaagggtgagctagtttctgtgcctctgtgctatgttttgaggctcccttacccaaaataatacccctgcctgcgtgatattctaccattcattttaattcctttgggtcttgcagtttttcaggaggccttgattaaaatgcaaatacttgtctgaga

SEQ ID NO: 831 - DNA, 13031 bp, Homo sapiens; identical to SEQ ID NO: 688
  source 1..13031: mol_type = other DNA

SEQ ID NO: 832 - DNA, 16766 bp, Homo sapiens
  source 1..16766: mol_type = other DNA
tggaatccactaagaaggggcgagaccagtgaggattcaactaaagggagcgagaaggggcggggacccgggaggaggaagtggagtggccaccgaggaagaggggagtggtcggggtggggcacaggatggtggagagactgtcaacaacttttaatgagctcccttggcgtcctagcctagcccccaggcactgggagcattgcagaaagagaaagatactgtccctgtcctctaggtgtttccagtctagttggggagacaaaacaaatacacattaaatagataacaaacaactccaacttgtaaggctataatagatacgtgtagagcatatgtataatgcactgtattcaggaattccaagcagttcgaacgtcatgacccctcagaagttgacccagaagctggtgaaggaggcccagagaaaggtaacaaaaggatcagtggtcccagtggtttggctacaaatccatgcagataaattcaaagctccctgaagccaagaatgaatggcaagaggtagtatagtaaggtagctaagagtggggaccacggattccaatttttggcactgccacttactaatctataaaaataggcacactgattaacttattttcatcttaatttgctcatctgtgaaatagggatgataatagcaatactcatctcattgggcaattggaggattaagtgaagtagaacagtgcctggcatttagctccttcgataagcttaaccattgttgtactatttccaaactccctgcctagactaaattccagactggcagaactgttatggtctgctccatattgtcattttaaaatataaaaagtaggccgggcgcggcagctcacacctgtcatcccagtactttgggaggctgaggtgggcggatcacgaggtcaagagattgagaccatcctggccaacatggcgaaaccccatctctactaaaaatacggaaaaaaaaaaaaaatagctgggcgtggtggcacatggctgtagtcccagctactcaggaggctgaggcaggcaaatcgcttgaacctgggaggctgaggttgcagtgagcccagatcgcgccactgcactccaccctgggcaacagagcaagactctgtctcaaaaaaataaataaataaaaataaataaaatataaaaagtaactctagggccaggcgtggtggctcatgcctgtaatcccagcactttgggaggcagaagcagatggatcacctgatcacctgaggtcaggagttcaagaccgccctggccaacatggcgaaatcccttctctactaaaagtacaaaaattagctgggcgtggtggtgtgcacctgtagtcccagctacttgggaggctgaggcaggagaattgcttgaatctgggaggcagaagttgcagtgagccgagatcatgccactacactccagccttggcaacagagcaggactctgtctcaaaaaacaaaaaacaaaaaaaaggctggatgtggtggctcttgcctgtaatcccagcactttgggagaccgaggcgggtgggagacccgaggtcaggagttcaagaccagcctggccaagatggtgaaaccctgtctctactaaaaatacaaaaattagccgggcgcggtggcagccgcctgtaatcccagctactcggaaggctgaggcaggagaatcacttgaacctggggagtggaggttgtagtgagcctagatcgcgccgctgcactccagcctgggcgacagagtgagattccgtctcaaaaaaaagtaactctaggccgggcacagtggctcacgcctgaaatcccaacactttgactgcgcctgaaatcccaacactttgggatgccaaggtgggtggatcagttgaggtcaggagttcaaaactagcctggccaacatggcaaaaccccatgtctactaaaaatccaaaattagctgggcaaggtggcaggcgcctgtaattccagctacttgggaggctgagacacgagaaccacttgaacctgggggttggaggttgcagtgagcctagatcacaccactgcactccagcttgggtgacagagtgagactctatctcaaaagaaaaaaactaactctaatttaatgtgtcacctaagtttcaaagggtttagatacattctcagaggacagatttaaatggattgttaaggaaaacaagatctggccctaacctttctcagtcaacatcattttttccacatttttctacacgatcatcaacgaaagactagtaagttggatattacagtatttaggttcttcaaagaaggcagaatcccagctctttgtgttgtttacaggatcctgaagatacagaactatgttcatagaaaagttggttgggtgtggtggctcacatctgtaatcccagcactttgggaggccaaggcagatggatcatttgaagtcaggagttcaagagcaccctggccaacatggtgaaaccccgtctctgctaaaaacacaaaattagccaggtgtagtggcgcatgcttgtagtcccagctactcgggaggctgatgcaggagaatcgcttgaacccgggagcaggaggttacagtgagccaagaacacatcactgcactccagcctgggcgacagagcgagactgcgtctcaaaaaaagagagagaaaagttaaaagaacatgcacaaggtcgggcacggtggctcacgcctgtaatcccagcactttgggaggctgaggcaggcggatcacttgaggtgaggagttcaagaccagcctaaccaacatggagaaaccccatctctactaaaaatacaaaattagccaggcatggtagcccatgcctgtaatcccagctactcaggaggctgaggcaggagaatcacttgaacccgggaggtggaggttgtggtgagccaagatcgagccattgaactccagcatgggcaacaagagcaaaactccatctcaggaaaaaaaaaaaaaaaaagaacatgcacaaaacagatggcagcctaagtacttaagatgtcttaggccaagtactaatagagtattgatgtaatattgggatcagggtggttgtcaatggacccaaatcttagaaaatttatctactaagatatagaacaaatgggctgaatcagctgaagggggagttaggatatgattttggggcaaggctgggttctcaaaccatggccttcccatcccagaacacaatgccaaatgaccatctggaatcactgctgtaaggacgcaggtccctactccctctcctgtagagacctgggagattaaacagcagtaacatagtagcttctgttctgcctcccatgaccctttcagccctgttttcttgccccctgataacatagcatttattaagcacatattattgaccaggcattgtaccaggtacttccaagcacattatcttgtctgttatcacaatcttggatatagagagtttttaacctcattttaccaatgaagaaatagggcccaaggaatttggcgcctaaggtaacaggtagtaacctgaggagtttccccactctaagggcaggggcttttgtagttatgctatttctttaggcttccctcagaagaactcctgattgcacaggggagtccatgtgtctatgtgtcccacggcgggataaggcagtgcagacctcaaatctgctttttgtttcatggcagggtctcactctgtcgcccatgctggagtgcagtagcgtgatcttgactcactgcaacctccgtctcccaggttccagcgattctcctgcctcagcctcctgagtagctgggattacaggcgcccaccaccacggctggctaatttttgtatttttagtagagacggggtttaccatgttggccaggctggtctcgaactcctgacctcaaatgatccacccgccttgccctcccaaagtgttgggattacaggcataagccaccgcacccggcctcaaatctgcttttgttgtcaaaaaatcaagtgagttttgcattgtactccagagtatgcctatgtttgttgttttaatgtaaaaactaatgccctttcctccctaatcattgagtaatatcggcactcctggaagacgtgttgtgtttattctgcggcttcttgtaataatggctaataatagctatcacttattgagctgtaacttcatgccagatactctactaagtgctttacatagattatcaggatactgccaggttggaggtaagactccttgattttacatgctgatctctccctcactagactaaacccttaagcatgtggaccatgttgtatttgtgtgtgtaaccctggtgcctaggacagtacctggcatagggatggagctcaataatgtgtcgtattaggctaggcccatacagtggctcacgcctgtaatcccagcattttgggaggccaaggtgggtggatcacctgaggtcaggagcttgagacctggccaacatggcaaaaccatatctctactaaatatacaaaaattagccaggcttggtggcgggcgcctgaaatcccagctactcaggaggctgaggctggagaatcacttgaacccgggaggcggaggctgcagtgagctgagattgtgccactgcacttcagcctgggagatagagcaagactccgtcttgaaaaagaaaaaaagaaaattatcatgttagcggatatcaaaggcctgagaacctgtacctccattctgtcagtttcctatcctttttccaacaaccaaaagttgaagaagctgggacagagctgccctctttggctgctccaaatcctttcaagtgcccccagtttcaactgcatctgagctgctttagagaatgagactcagtaaattcctacccatccgatggtgtcttttatggacctcactcagacccaagatgctctggataaggtttgaggcttgactccttcccagaccctgagcccccagccacggtctccatacactcaggctggctagcagggtaagtgtggatggaagccgctgcttagtttttatttttgtcattgttgaggtgtaggaaggaggaaaaaaacttgattccctaatgaagaaaccctctcttatcatggccccatctcccagcctttcgtggggaatagagctatttcttgggaggatttcacttatttataaatgtgcttccagaaactgagctggtctggcctctccccttgctaagtggggtgggtggtgtgcaggaggcggcagagccagcagcagagtgaactggtctcagggaagcaggccctgtctcgtccctatcttaaccagccactggagcacctctctggacccacaaagtatgctcaggcccaacactgccctctgcgggagcctgcttggcctctccattgctgtgcaagcgatttcagcctggcccaaagagctccttccaccctggagcaggtgtttgggaaggctagggtgccttaggcactggggacttcagctggggggtggggtgggaggtgagctgccttgggaaaccccccacaccctcatgtggctggctgaagaaatgcctccgaggctccagctgaatgccgctcaaggcttttggagttaaaacggcccttctcattcctggagcctcacctgctccttgcacaggtgccctgggaaaactgtgggacttgcccaaggtcactctgcagtacagtcaggatcaggacccagcccagctggcccttggccattctgactcctgctgtgagggtgggttgcaatccactgggcaaaacactttatgctggggcaacagtgaaaagtttgagcaatagtgacagcataggatcaccaggttcgtcctgtttccctccttcctgaagatacagggtgaggcacagtgaatctgctggaccagcttcaagaacaatatgtcagcctatccactgccacctcccacagctccagactcgtgggtgcttcctggatgtgaccagccataggtacaaagtagactcatcatcttttcctcaaatagtttcttctcccagagttctcatcctgatggatggcagtatcacttacctgggtactgagctggccacctgagggtcagccctcactcttaagctctacatgcaatcaaagcctgggtcttggcccctcactgccttttcacacccttcctgtccagagctgccccaccaggggggcagatccatggagatgtggggaggtgggaggtacagtggctgagagtgagcttccggagtcacagggacctgggtttgaagcttgtgctgctgctggtcactatgtgaccttgggcaagttattttactctctaagcctcagtttcctttctgtaaggtgggaataataataatacctacttcataggactgtggagactgtaactgaccaactgaatataacgtgctttgcccagtgagtgcatgatggcaggcctgataacattagcttttcttaggaattcatttccatctcttgcctagacctcggctgtaggcccctcaccaggccccaggccgtctaatctgtctgctgccttgttcccagggtgactgaaaatgcaagcacggtcattggactcttggctttatatctttctgtggctccccagggtccacccaagaaggtgcatgtggcctttcataaactgatctgatccttccaaccccccttccccctctgcatccagcatggagtgctctgtgctccagcctcagtcacctacttcaggaaattttttttttttttttttttttttttttttttttttgagacagagtctctctctgttgctcaggctggagtgtcctggcaggacctcgactcactgcaacctccgcatcccgggttcaagacattcttgtgcctcagccttctgagtagctgggattacaaatgccccaccaccacacctgggtaatttttttgtatttttagtagagatggggttttgccatgttggccaggctggtctcaaactcctgacctcaggtgatccacctgcctcggcctcccaaagtgctgggattacaggcatgagccaccaagcttggcctgttttttatttttttattaaaaaaaataatagagagaaggtctcactatattggccggactggtcttgaactccttgggctcaagcgatcctcctgccttggcctcccaaagtgccaggattataggcatgagccaccgtgcccagcctcttttggctttttaaaatgtggctactagaacatttaaaatcacatgtggggctcacacaatcttactattgggcagtttggctccattacttggggagccgtaggtcccttctttgtccaggaggtggcaatccctccctgccttggatgcttccattccagaatggtctggaaggttcctgaggtaagtgcctatctaatacggcgatattgagccccaaataaggcagggtcccactcagccctgcctttgagtcacccacctcaacggaagactctgggccgggcgtggtggctcatgcctataatcccagcaatttgggaggctgaggggggcagattgtttgaggtcaggagtttgagactggcctggccaacatggtgaaaccccgtctctactaaaaatacaaaaaatagccaggcgtggtggcatgtgcctgtaatcccagctactcaggaggctgaggcaggagaattgcttgaacccgggaggcgggggtttcagtgagccgaaatcgcgccactgcactccagcctgggcgacagagtgagattccatcttaaaaaaaaaacaaaaacaaaaacaaaaaaacagaagactgtgcctctagctgataggcacctgctctgtgggtggcacgatgccacattctcaacccagcctctgttttccaggagtgcataagcctcttggggggacaggtgtgtagtggatgctgtggtgcacctccccatcacatccctctccaaacactgcccttggctaaaagaagatgcctcccccaaccactgactgtctgtaaggggcacaaagcctggccaacatggtgaaaccccgtctctattaaaaatgcaaaatttgctgggtatggtggtgggcacctgtaatcccagctacttgggaggctgaggcaggagaattacttgaacctgggaagtggaggttggtgaactgagattgtgccactgcactccagcctgggtgacagagtgagcctccaccaaaaaaaaaaaaaaaaaaaaaaaaaggaaggaaggaaggaagaaatcaatcaatcaatcaatcagtcagtggtgggtgcaacatctcaggtgtctgagaggtacagggatggagtaagtgtaaggactggggggctggatggctgttggggcagtcagtgcagaggagaaaggcagtcagaggctgggggtgaagaatcactgcttgaaggcaaagtggaaaagccagagggcctccttggcagcatgtaaagaaactcgcctcctgaagttaaggaacagagagaagtcagcatggcagagcctgagagcaggttgaattcccaaccttaatgagtcagcgatacagaggaggcccctggggagaagcgggagccatccagggacagaggttagtgcccctccttccttggggacaatgcctcttccttaggagacatgtactacccccttcccaaccctgagtatatactgcacctcctcttcttgcactgggccagtaactagggctaaatcgcaacctcacctactggtgaagtgctgggtcggctaagggaggaaggaggctctgtcctgaaggagctgcaggtcccagccagagccaggagagtggggactggaatcagaggatgctggctgggccaaggggatcagagcataaagttggataaggaacgtgtgttggtatgggagctcttttccctgttacagaatttatcaccctggcaaggaccctggtacttggaagcttggagaaagtgattcagggctcttacccgcagtgggcaggactgctgacggctcccagctggattttcctgcaactgccctcaatgaagcaagctgttccacccaaggttgatgcaggacaaagaggtgggtccagaagggcttcccaagtctgaagctcctcgggggatgcgccaaggcctcggttacagctgcaccatcacggctcagcttccactgtccagccctctgccctgctccatggtaggggtcgctcatgagacctctccccaataaacttgccgcacacagttctccatctctcatcccccggggagcctgccacgtggtagtactcaggctggaaaggtaaagacgataacgcgagatgtgctcagtgccaggtctgtggggcagacctttagtgcaggggaggagttgagagagaaagtgaccatcgaaaccaccaaaaaaatgcagccattgcacaagagcctgaagagagggctatgcttcctgcacgccgggcctctcaactgctctgcatggaaaaccggtatctcagaggcatcgtcaaggtgtccctgggacatggccatggggcccactccttggtctgccccaaatgggctcccttcagtctgggtgtgaaactgggcagctgacacacggaggggagggggtgtgtctccatgcgggaagctcccagattccaggtccagggcttctgcactgggcccggtggggatgctcactgcccctgcaccaggctctccgggggtatcagcagctgcagcaggctcggtgcccgggatggggtgggggccgtggggaggttttctccaacccccggccgtggcagcgagtcagtgtgcctttaatcaacggcctctgcactccacctctcactgtcaccattaaggccattcctctgcatctggcctctccacccatttctcccttctggaaggattccttttttttttttttttgagatacagtcttgctctgtggcccaagttggagtgcagtggtgcaatcttggctcactgcaacctctgcctcctgggttccagcaattctcctgcctcagcctcccgagtagctgggattacaggcacccaccaccacgcccagatcatttttgtatttttagtagagacggggtttcaccatgttagccagactgctattgaactcctgacctcgagctatccacccacctcagcctcctaaagtgctgggattacaggtgtgagccaccgtgcccggccttttctggaaggattcttaaaggtcatcggagcctccctgttggcagaatctgagatctgttctccattctttgtggcatttcaggctctatctgccccatttcttggacattctcccctgggttcttcccttcttgtggcttcacctgtgttcctgttaataactcctttccctgctaacagtggacatcccaaaagcttggttctcagctttcgtgtggtgatacacatcctctcagaaccttttttactgtcatgatatcagttatccgctcaataactgtcgtcatcatcctcaccacatctgattaggagtgggatgggggctctgatgggtcagaggtgaggctctaccagggcaggtggggagttaggtagcatggtccctggcagttctctgtgtgccctggacaacccctctccaaactgctatagaatattctggagtcctgcctgggtgcggtggctcacgcctgtaatcccaacactttaggaggctgaggcaggtggatcacctgagttcaggagtttgagaccagcctgaccaatatggcgaaagcccatctctaggaaaaataaaaaaaattagccaggcatggtggtgtgcgcccgtaatcccagctacttgggaggctaaggcaggagaattgcttgaacctgggaggcggaggttgcagtgagccgagattgtgccattgcactccagcctgggccacagagcaagactctgtcttaaaaaaaaaaaaaaaaagaatattctggagtcttgaagtggaagcccagtcacagaccatgattttcatgggaccgaagagccttttgggagaaaactgaaccccatctggcatttgaaatgtgtaaatctgtctgggagatcgaaagaggccaggctgggtggagagacagggggacccctgaggggagccatcatgggtgaggcagggtggcatggtacacactgggcagggagtcgcggtgggtgagttgtggatacaggactttcaagggagctgctgctggagggagaggctgggaacaaagagcctcggcctcccaaagtgctgggattacaggcatgagccacgacgtcaagccatttctgtggtttacagtcatccagtttgtgtatcatctgttacagcacccctgggaaacatacagatgccagcttctccctgtctgtatctatatattttttttttttgagatagcagtttcactctttttgcccaggctggagtacaatggcacgatcttggctcactgcaacctctgcttcctgggttcaagcaattctcctgcctcagcctcccaagtggctgggattacaagcgcccaccaccacacctggctgattttttgtatttttagtagagacggagtttcaccatattggccaggctggtctcgaactcttgacctcaggtgatccacccgcctcagcctcccaaagtgctgggattacaggcatgagccaccgtgcccggccttgcccatcaggttaggtgtttatcagctgtctagagtgactgaacaggtacgacttggggggcaaaggacacattctcccccccatccccaagatccacctgagaggcagtcaccagaggcgttgccagcactcttaactgcaatagcaggacaagactgggcatctgataaacagtgcaatcggtgtccctggcgtgaggatgatctcggaggtgcttcttttttagagcccacctgaggtcaggatttttttttttttttttgagacaacatcttgctcagttacccaggctggagtgcagtggctcatcactgcagcctgaaccacctaggctcaagtgatcttcccacctcagcctcccaagtagctggggctacaggtgtgtgccaccatgcttggctgatttttaaattttttgtagagacaggggtcttgctatgttgcccaggctggtctcaaactcctgggctcaagtgatcctcctgccttggcctcccaaagtgctgggattacaggtgtgagccactatgcccagccccagggatctccttctctctgtacccatcaccctgttgggcccctcaccctccttattttccttctcattggtggtggtatgtggttttcttcctgttgaccaggacaaaggtcccagcgatcaccctgccctcccctgtctcctctcctgtcccacaagggtttgaacttcccagtttcaccatgtttaacataccgcctcatctttaaaaaaaatttatttttatttgtatttttttgagacagggtctcgctctgtcgcccaggctggagtgcagtggcgagtcactacagcctcgacctctccggctcaagccatcctcccgtctctgtctcccaaagtgctgggattacagcggtgagccactgtgcctggcttactgcctcatcttgttccctgaggttctagacctctagggtgttgtccggaaagaacagggccatgtggaagtcagcaaagagagaggccgattgaacagcaggctcttctcaggcatcgccaagtgactgattaggattggccaccagggggtgccatggagccacagtctatgaagggacagaagaggccttttgggggaccctggaggttgaaggtggggatgcccagctgaggtcttggacatgaccaccccaccaaccaagcccaaggaggtctctggtcggtcctgagaggtctgttgagggtcccttctagcaggcaggtgggcctcagagtgcagaggggccctgggagaaggggacccagagacaggaggaatgcatgtggtgggtgggcgggggcatcgggacggggtcactccacggtcaggggctgtgtcccaaaccgtatgggtaggaacaggagcttcctctgcgggggggtcgaaagagtgcacctgtgaggacactgaaaaccagcaggagaatcatgaagacaggaaacaggagtctcattgtgagatgagtgggtcccaccagtgcagccgtggcagtgcatgtcaggaggctgacccggctttgcccctcccccttcacttgttggatggctctgagcaggttactgaacctgtctgtgcctcggtttccttctctataacgtggttaatactcatttggccgggcttccgtgtggattaaaggagacgcgtatccagggcccggcacatagcaagtgctgtaagcagtggcactcacaggctgccaggacaggaaggaccctcagaggtccgtcccaagctgtgtgggtaggagcagaagcttcctctgcagggggtcaaaagagtgcacctgtgaaatccaacctccaggacccccaggagcccgagatggacacaggatctgcactgctgggtggggcggagaggcaggtgctggcgagagaagagctaaggggtgcaggatggggtgtgagctggagggcagggggtagtcagagccaacagggagaggggcctgcatcccgagggaatgccagcaccaagtgccaaggcctgggcagccctgggaatgggtggagccaaggtcaatagcagagagctttgtagttgagatgtttggtagggcaacctcctgaatatttaaatatttaattaaattaaatatttaaataaacttgaagtagaacgtacttaaagtgcacaaattggtagcttgaattcccaccccctccccccacataagaggtgggcttgtccaagactccgagggacagagggagaatcgctggtgcccagccagtcggtgacagagcagggattagagatggacccctgaggcttagccccacgctctcttccccaaaccctggggcctcagtcagcctctggtaatcccttctgtgcccagggcaccagagctgacgtttcccttcagcaaggcaggggccgaggctgccagagccctgctggcgtcatcctgcctgggatagctcgagaggtggggtggggggattacaaacctctaacagcaccacaggctgcccggggaacatctgctactacagccttgcagcccggagtcccggattttactggttcccgtgcctgcggacaggcccccagggctagcggctttgtggagggaacactgggtatcctctccacagtccaggtaggtgggacccccactcctggctctcagcctttaggaacaggagcttctctacttggagcttctagacatggagggaaacatggaagccatggagtttattaagtgtcttggaaggtggagggagggatggcctcctctaagaactgcaaatctgcagggtgtcttgggagacaagagtgcccagaggggaatgtctgatgagctggatgtgtggggcagggggtgtcctatgcactctccttgcctgctcctccccattccccaggccctctgcagcccccggctccctctaacctccccaccccccaccacaaatcctgcatgtgtgtggcccagtctgaggccatctggatagaagtagaggctccctaagggcccactttgattaaggggctctctaggaccaagggctgaggctacctaaaaagctctctgccacaggatcttgcacccaaaggaccagaagcctccctctggggaggtaagataaaccacatgaatggtggtgtgggggaaccgggcgcccacccactgcacagttgcattagacgtggtcagtggagggtcacgagtcctgcctcccctcccaccgtgggcagcagggttggggtgccccaggctccactgagccctgctcatccctgccaccatctctggggctcagaagcacccagacggcaccctgagaccaatgtctgcaggtctgcaaggtggcaaacctccagggatccttctggctgagagggaaaggtggggagacagtgccaatgtttgcaatgcctggtaacagcctcggggaccaggtacctggggaatgtgcccattgatttaggggctgtctccaccccagttcctgctacaaaagaggccagatacatactctggggcctgcctccctggagatgaggatgagacccctgtcccttgctgttctccaacaggtgctgggaggccctccttggcttaggaggacacttccaaagctggggcgccccaaggaggcaccagtggccagaatgtccacgcagagcacccaccccctgaaacctgaggccccacgtctgccacctgggatccccgagtccccgagctgtcagcggcgccacacactccctgccagtgagtttcgctgcctcaccccggaggacgctgtcagcgcctttgagatcgagcgtgaaggtgagtggccccgcacagggtcagagggatgctccactctggtccagttatcctgtggggaggagacccttagtctcctgtccttggaggctgggtcccagagtatcagaccatgtgtgcgctcaagaaagtgggggaaacagcagccctaacccccattttcctgtggggaacggggcatctgagtggacactcggggtgcagcagacagtggacgcgaggcacagcgactaccagtcacccacctgagcctcctgccacagccttcatctccgtcttgggcgtctgccccctgtacctggatgagatccggcacttcctgaccctatgtccagagctgtccctgggctggttcgaggagggctgccttgtggccttcatcatcggctcgctctgggacaaggagagactcatgcaggtgaggacagggctgcgacgcccagctccagggaggcctctgaagacagaggtcagccagatggcggggaggggagcccaggggctgggatttcttcctccagaactggagagatgagtacaggccacaggcccctcccagagcaagaccttctgggtcttcaagttttctccatggggttgggggtatggctcccaatttggggccctcctttgctggggtgggtgccctgaccacaggcacccaggggacacctgctccctgcctgggttggtggttgggggggagcacgtgtcagcagaagtgacctgggatctcatcccttgctcgctcccaggagtcactgacgctgcacaggtctgggggccacatagcccacctgcatgtgctggccgtgcaccgcgccttccggcagcagggcaggggccccatcctgctgtggcgctacctgcaccacctgggcagccagccggccgtgcgccgggccgcgctcatgtgcgaggacgcgctggtacccttctatgagaggttcagcttccacgccgtgggcccctgcgccatcaccgtgggctccctcaccttcatggagctccactgctccctgcggggccaccccttcctgcgcaggaacagcggctgctgaactgggctgcccacctggctgccaacatgatccccgtctctgccctgggctcctcttagctcagctgagcatggagacagcagtttccagagagtggagagagcagggctaaataaagaggagataaggtggcttctcacggcctga

SEQ ID NO: 833 - DNA, 32742 bp, Homo sapiens; identical to SEQ ID NO: 687
  source 1..32742: mol_type = other DNA

SEQ ID NO: 834 - DNA, 28181 bp, Homo sapiens
  source 1..28181: mol_type = other DNA
aggtgcgcctcccaacgccctggcgtgggccgtgtccttttgaagaatgagaatgtttcattgagcctacgcctcctgaatgcgggagggccacgggatggtcccaagactgtgccaaggcgtgccaggcctcgggtccttgagaaggagcgagggctccaagaacggtgaggtcggagcgggccggggcgatggagcgggagcggcgtggcgtgctggagggccgggagaagcgggggtcgccagtcgaggggactgcctgctagtgtcccccgtgccccccgtcacgggcacggcgcggtggggtgggggagcggggggcgcgcggggcaggcatgggggcgcgacacggcggtgcgcggggtctctcggggtccaggtccaacgggcccccagctccggcccccgcgcctgggtttctctgctgggaaacgggcaggggcgcgggcccgcctccagggcgccccgcgtccccgctggccgccccccagccgcgcccccagcggggcggagcttgcgccggtcccgcccctccgccctccgctctcccgcccgcgcgcccccggcccagctgcggcgcgtgacgcggggcgcgcggctccgtcggctaccgcgggcgggcgcaggcgacgggcacggcgggcgagcgggcggtatggcggcggcggggcccgcggcggggccgacggggcccgagcccatgccgagctacgcgcagctagtgcagcgcggctggggcagcgcgctggcggcggcgcggggctgcacggactgcggctgggggctggcgcgtcgcggcctggctgagcacgcgcacctggcgccgcccgagctgctgctgctggcgctcggcgcgctgggctggaccgccctgcgctccgcggccactgcgcgcctctttcgggtcagtgtggccgggggccgggacgaggggaccccggactgggggaagccgggaccggggacctggggccgccggcgcgttcctttcttccagcgctggctgctgcggatgaaggggtcgccggaacgtgggtgggggcctcgggctggagaggcccaggacgttggagccccaggataaggtctctcgggccgccgcgcgcccccttcagacagtgctgcgtgggggaaccgggtagatgcgggggtgtggccgggctggggtgagtctgggacatggggggcccgagacaggtgggatgtttgagacgtgggggaccgaggcacggccctttccggtcagtttgggaccagggggccccgcgcggtggatggctccggccaccgcgcgctctttccggcagggccgagccagacactgagaagcccaggaccgggaacgggagggctcggcgcaccgcggcctgcgccatgcgcctccctgccatgcgggctgcgccccggcccggagcgaggtccgctgcccgttttctgctgggtccgtgcggcggcggggccggcttgcccgctgtaatcgggaagaggcaggagctgcccggtcgctgccttgtgcctatctggggtcagcgccaccctccgaccagggatggcaagggcctgggtgctctggccacgccagtggtcgctcccttggaggtgacatggcccggggcttcagggttggactgtgctgcctccaagaggcgacagcagaattccccagtttctgcggagaccatcgcccctgcgagagagtgaccatgatggtgacattggcgcctgaccccactcacttccctggggaggggtcgctgtggcaggagctggttggaaggtgtttgggcctttagcttggcctggacacccccgtggaccagctggtgtcaccccgcccgtctggctggagggtgcagggacaatgtgcccagcgccaacaaaggggcctttctctgctggccgggaagaggctggcccttgtgaggtcgatgatgggatgttgtctgactgccactctccccactcccgtccccatatcacccacatgagggagagaccccagccacacccctactgtgggagggggagacagggctgtccagggcccctccctgggtccgcagtggtctttatcctgcttgttgcccctgccttcttcccagtttccagctgggaagcccgagacccaggagggcaagccgtcccccacccctgcgggacaggaggatgtggcggctggtagactaccagggccgagccccgggggccctccccagccccttgggtggggtgctcgccccatttcgaggctcgcccttcctcagaaatgggtggaggggctgccgggtgttccaaagctgatcttcttggcagcagcctggttgccaggggttaccggagccggctccagctgtctccatgacaactgctgggtgctctgggctccggccccctcagcctctgggaagggggtgggacttgtccaggggtggggcttggccgggcagctctggagccgcgccccgccacccacccacccaccgcactccccaacccctgccttggagccagcagcttcctctgcactcccaatgtcccctcagggtctcacctcgcctgtgacaccttttccgcctcctgtcccctttttctgcctccagcccctcctcccctttcatcgcccccaggttcccatgtccccgccacaccttccccctagtctctcccagccctctagcctctccagaatctcccactgagggggcggcttcctcacaagttcttcctctcccctctgtgtcggtcccatggggctctctgtgtttcccaagatgcccccatataaccccctccatgttcccttcaagggtcacccccaccagcccaactcccttgggctgacgcatccatccgtctccctcatcgtaagcccaagtgtcccccttctggcccccagagccctcctgctcccctcggggcctcccccctcactcccctcccagcaccgcggcggccggacagctgggcactaagtttagccttggcaggcgcctgtgggctctgtttatgctccaggtggctgtgggcatgggggacaggccttcccagtgctgcccggcctggggagtccctgggcctcagtttccccaccccaaaggagcagtctctggcccccagcaccaatggctgcccgcctgtcttctcccccatagcccctggcgaagcggtgctgcctccagcccagagatgccgccaagatgcccgagagcgcttggaagtttctcttctacctgggcagctggagctacagtgcctacctgctgtttggcaccgactaccccttcttccatgacccaccatctgtcttctacggtaggggccctgaggggatggccgggagggctctgcttaaaacacaaagacgccaggcttgtggtcccagctactcatgaggcagaagcaggaggatcactggagcccaggagttggaggccaaggggagctatgagcacgccactgcactccagcctggacgacagagtgagaccctgtcttgtatcaaaaaagaaaaagagggccaggcgcagtggctcacgcctgtaatcccagcactttgggaggccaaggtgagtggatcacgaggttaggagatcgagaccatcctggctaacatggtgaaaccccgtctctactaaaaatacaaaaaattagccgggtgtggtgggcgcctgtaatcccagctactcgggaggctgaggcaggagaatcgcttgaacctgggaggcagaggttgcagtgagccgagttcgcgccactgcactccagcctgggcaacagagcgagactctgtattaaaaaagaaaagaaaaaaagaacagtgtaaggggatgcttatcagaatcagagctcctatgggtgtctcagaagttaagccagccccaagacaaaggtgatccctggggacaggaaagggggtatctggccgtgttggagctcagggaagacatcctggaaggacccctgtgtgggtccaggcaggcattccaggtgtcggtaacagcacgtgcaaaggcccggaggcactcacgtttcatggggacaggaggagggtggctgcagagagctgaggcagcagcttgagttctgttctggatgtggttgtttttctttttttgagatggagtctcgctctgtcgcccaggctagagtgcagtggcgcgatctcggctcactgtgagctccgcctcctgggttcacgccattctcctgcctcagcctcctgagtagctgggaccacaggcgcccgccaccacgcccggctaattttttgtatttttagtagagacggggtttcaccgtgttagccaggatggtctcaatctcctgatctcatgatctgcccgcctcagcctcccaaagtgctgggattacaggtgtgagccactgcacctagcctgaatgtgatgtttttaagcacagcatggagaggattgggttttgtggatgacaaaatgcttcctctggctgccctatggaggtgggagggtcccctcggcttgcaccatcttggtgaggagataaacatgatgaagcctggtgcgatggctcacgcctgttatcccagcactttgggaggctgaggcaggtggatcacttgaggtcaggagttcaagactagcacggccaacatggtgaaaccctgtctgtactaaaaatacaaaaataaattagccaggcatggtggcgcgtgcctgtaatctcagctacttgggaggctgagtcaggagaatcacttgaacccgggaggcggaggttgcagtgagccgagatggtgccactgcactccagcctgggtgacagagcaagacttcatttccaaaaaaaaaaaaaaagatgagaatgagaagtgggctgggcgtggtggctcactggctcacacctgtaatcctaacactttgggaggcggaggtgggaggattacttgagcacaggagttcaagagcagctggggcaacatggtaagacctccatctctacaaaaaattagcctggtatggtggggcacgtctgtagtaccagctacttgggaggctgaggtgggagaattgcttgaacccggtaggtggaggttgcagtgagctgaggtcatgccactgcactccagcctgggcaacagagcgagaccctgcctgggggttgggggtgtggaggggaagatgataagaagtggctgtgtccaattgattggagtggatgtggcctgagctccgggtgggctgggcagggaggtgactgcagcgcgctctgtgtgacctgtcctggcagagaatgcagggcagggccggcatcgccactgggcaggctgatgtaggaaaccccatctgcgatggggcagtgggggctgcggcttctctgccctgcgaggaccaccagggctgtgggccagggacacacatgatagctgtttcctgccatgtgatgggaacagcctagagggctcctggtggcacggagcccagagtgtacagtggatgtgccacccatggggccagttttcccatgtaacacaccttgatcccctagaggggaggtgttagctgttgctcagttttccttctagacggatgacccatgatcgaactctcataacttttttttttttttttgagacagtctcactctgtcacccagtctggagtgcaatggcacgatctcggctcactgcaatctccacctcccaggttcaagcgattctcctgcctcagcctcctaagtagctggaattataggcacgcgccaccaccctcggctaatttttgtatttttagtagagacgaggtttcaccatgttggccaggctggtctcaaactcctgacctcaggtgatccgcccgcctcagcctcccaaagtgtcaggattacaggcatgagccaccacgcccagcctctcttaacattttgggcatggacttgcctttagctgcttttttttttttttttttttccccagacgcggtcttactctgttgctcaggctggagtacagtggcacgatcacagctcactgcagcctggacctcctgggctcaagcaatcatcccacctcagccttctgagtagctgggaccacaggtgtgtgccaccacccccagcgaatttttttgtgttttttggtagagatggggtctcactatgttggccaggctggtcttgaactcctggcctcaagcagtcctcccacctcagcctcccaaagtggtgggattacaggcatgagccacctcgtccagccttagttgctttttgtaaatgacactcacaagttagctgattatttccatgtctatttattgagcgactactgtatgccacagctgagacacagctagtaacgggtcagagaaagccctgtgccctcatgaagctggccgtgtggcaggggcaacagacggtgcagtacgcagtctatcaacagcaataagtgtggatgagaaaacttgtgtggagagaagaggcagtgtgctgtgttggggaggtggggaggggcagtttttagcagggacaggggtggccccacttaaggggactgagtgagggcctggaggtgcctggagcaggcaggagaggcagggactgctgtccaggcaagtgggggccatgccatccaggcctcggaggccacggtcaggatttgttacttatctgtgggctgggagcagaggagggatgtcaccctgggttgggcatctaccccaggggtccaggagggggctgacagcaggagctggagcctgaagggactcccaccaggattgagctgaggggaggggatgggagcaaagtggccaattttagaaatgtttagaaggcagagctgatagtatttgctgccaccctagaggtggtgtgaaaggaagagggtgaggatgatgctagggtcttgtgagatgggggctggtcagggagaccaagattctggattcagggatggagacaaggcaggggtggcattgagtgtcccaacagcaggtgggatatgagtatgaagaggtgggacaggccaggtgcggtgactcactcctggaatcccagtactttgggaggccaaggtgggaggatcacttgagcccaggagttcgagaccaaccttgggaatatagtgagacgccatctctacaaaaaataaaaaaataaaattagctggatatggtggcgcgtgcctgtggtcccagctcctggggaggctggggcaggaggctgaggctgaggcttgagcccgggaggtcgaggctgcagtgagccaagattgcaccactacattccagccaggttgacagagtgaggccctttctcaaaaaacgagggagaggagatttgagacctctgaactaagccaggacttcccccctatcctgtggggaaggagctacaggacggttggggggcctctgttggaaaggtgggcaacagatccagcagggtggccctgggcaaaagctcgggctcacatgtttctggagagtcaggatggagaggatcagggcatttcagagtttcagacaattttcattgaaattctggaagagggctgaagtgggccgggtgcagtggctcacacctgtaatcctagcattttgggaggctgaggtgggcggatcacttgaggccgggagttccagaccagcctggccaacatggtgaaaccctgtctctactaaaaatacaaaaattagccaggcgtggggatgcatgcctgtaatcccagttactcggcaggctgaggcaagagaatcgcttgaacctgggaggtagaggttgcagtgagtcgagatcatgctactgcactccagcctaggcgacagagcaagactctgtctcaaaaaaaaaaaaaaaaaaaagaaagaaagaaattctggaataggggagggttttttgtttgtttgttgtttgtttttttgagacagagtttcgctcttgttgcccaggctggagtacaatgccacgatcttggctcaccacagcctctgcctcctgggttcaagcaattctcctgcctcagcctccggagtagctgggatcacaggcatgtactaccacacccggctaattttgtatttttagtagagacagggtttcaccatgttggtcaggctggtcttgaactcccgacttcaggtgatctgcctcccttggcctcccaaagtgctgggattacaggcatgagccaccgcacctagcctgtttttttttttttttttttttttttttaagagacagggtctcactctgtcgcccaggctggagtgtggtggtgtgatctcagctcactggaacctttgcctcctgggttcaagggattctcctgcctcagcctcatgagtggctgggattacaggcacgagccaccacacccagctaattttttttttgagatggagtctcgctctgtcacccaggctggagtgcggtggcaccatctcagctcactgcaacctctgcctcccaggttcaagcgattctcctgcctcagcctcccgaatagctgggactacaggtgtgtatcaccatgtctggctaattttagtattttagtagagctggggtttcaccatgttggccaggctggtcttgaacttctgacctcaagtgatccacccaccttggcctcccaaagtggtgggattacaggcgtgagccacctcagttggcctccatttcttattgaggtaaaatgtatgtagcttgaaattaggcattttagccaatcacaaaaagacaaatactatgtgattccacttatatgaggttcctacagtcatcccactcatagagacagaaagtgggatggggggtgccagggctgggggaggggaatggggagagactgtttaatggggacagaggactgttccattggggaagaaggagaatgttctggagatggctgctggtgatggttgcacaataatgtgtacttaacaaatggcttagatggtaagtttttgccatataaatcttaacacaattttttttttttttttttgagatggagtttcactcttgctgcccaggctggagtgcagtggtgtgatctcggctcaccacaacctccgcctcccgggtttaagtgatgctcctgcctcagccttcgagtaggtgggattacaggcatgcgccaccatgcccagctaatttttgtatttttagtacagacagggtttcgccatgttggccaggctggtctccaactcctgacctcaggtgatccacctgcctccacctcctggccaaaaattaaccattttaaagcgaacagttcatcagcttttagtccattcacagtgttgttcaaccaccccctctgtctaggtctggaacattatcatcccccacaaaaggaaaccccgtcccattagcagtcactcaccagtcctctcccccagcccctggcagccaccaatctacttcctatctctgtagatttgcctgttctgggcatttcagatcactggagtctcacactgtgtgaccttttgtgtttggcttctcttactcagcatcatgtttttggggttcacccacattgtagcatggatccgtgcttcattctttttcatggctgcatagtattccactgtgtggaggtaacctatctattcttcatccatccactgatgcacattcgggttgtgtctgccttttggttgtgtgctgctgtagacagggacacatgagtatctctttgagtccccgttttccattgtcaggcacacaccctagtggacttgctgggtcatggtgaccgtttgtgtgtacatggccttcagggctgagtgaggagagtggacaaacagtcatgggggccagggatcgctggagagatgtgggcaggagacaacagtgcctggactggggtgggggtggcatgggccaaagaggggaccctggatgggggtcctagtgtaactcggctgcagaaggggccaggccgagatgaaagttgtcgcagaggcggttcatggggcatctggaggcagctgggctgcagggcaggtcaccaaggcaggggccaggaagccgcagatggaggctggagggtctgtcttgggggtctgcagaaagggagtggccagagaacagggagcaacccagagagttccaggttggtgtgggcagagcacagcatggcttcccgcctttttttgttgtttgtttgtttgtttgttttgttttgagacagggtctggctgtgtctcccaggctggagtgcagtggcaacatcttagttcctgccaccacctctgcctcccttcaggactcaagtgatcctcccacctcagcctcccgagtagctgggaccacaggcgcccaccaccacacccggctaattttttgtatttttagtagagacggggtttcactgtgttaaccaggatggtcttgatctcctgaccttgtgatccgcccgcctcggcctcccaaagtgctgggattacaggcgtgagccactgcgcccggccccagctaatttttatatatttttttgcagagacagcgtctcaccatgttgtccaggctggtctcgaactcctggactcaagcaactctcctgcctcggcctctcaaaatgctgggattacaggcatgagccaccgtgcccgtccagagcatagcccttgaatttggtgtctggcagcctctggggatgtggctgaggagaggaggaggtggacgtggtggggtgggctggtgtgtcacccatcacctgagcgtggtggtcaggtgcaccaggaggcaggaggaggggaaggtgaggcaggacccgcttggcgggagaccctgcgcttggtggcatggtgtgcccgggcatggcaagactccgtgggcagccgcatctgtcagggccagggatttgcagggagtgggcccaggacacccgcaaggcagggctctgttaaagacaggaagaggccgggcgcagcggctcacgcccgtaatcccagcactttgggaggccgaggcgggcggatcacaaggtcaggagttcaagaccagcctggccaacatgatgacaccctgtctctactgaaaaaaaaaaaaattagccaggcatggtggtgggtgcctgtaatcccagctacttggcatgctgaggcaggagaatcacttgaaccccggatatggaggttgcagtgagccgagatcccgccactgcactccagcctgggctacagagcaagactccatctcaaaaaaaaaaaaaaaaaaaaaaaaaacgagaaggggcgctgggctgggtgaggtggctcatccctgtaaccccagcactttgggaggccaaggcaggaggattgcttgagcccaggagttcgagatcaccctgggcaacatggcaacacaaaaattaaaaaagaaataaattatctaggcatggttatgggtgcctgtggtcccagctactcaggaggctgaggtgggaggatcacttgagcccaggaggtcgaggctgcagtgaactatgatcacaccactgcactccagcatgggccacagaacaagccaactctaaaactatatataaaacattttaaatgtatataatgataataatgtgtctatattagttcagcatttgtagcaaatataccacttaaagccagggaaatggaaatctgtgggtatgttggggcagaagaaagaaaggaactttctgtcctatctgctcaattttcctagaaacccaaaactcttcctaaaataaaaatccctgctggccgggcacggtggctcacgcctgtaatcccagcactttgggaggccgaggcaggtggatcacctgagatcaggagttcaagtccagtctgtccaacatggcaaaagcccatctctactaaaaatacaaaaaaattagccgggcatggtgtccagcgcctgtaatcccagctactctggaggctgaggcaggagaattgcttgaacctgggaggtggaggttgcagtgagctgagatcgtgccgctgcactccagtctggtgacagaacgagactctgtctcaaaaaaaaaaaaaaaaaaaaaaagacggctgggcggggtggctcacgcctgtaatcccagaactttgggaggccgaggcaggtgaatcatgaggtcaggagatcgagaccatcctgggtaacacagtgaaaccccgtctctactaaaaatacaaaaaattagccgggcttggtggcatgcacctgtagtcctagctactcaggaggctgaagcaggagaatcgtttgaacccaggatgtggagctgagatcatgccactgcactccagcctgggcgacagagggagactccgtctcaaagaaaaaaaaaaaaaaatagaattgggaatggaaagccagcagtcagacacgcatggttacctgggtactgggaggacacgtgtggcttggagggtgtcaccgggtcatggaggcgatcgtctagaggcttcgcagggccctgactgtgagatttggctctccccagactggacgccgggcatggcagtgccacgggacattgcagccgcctacctgctccagggaagcttctatggccactccatctacgctacgctatacatggacacctggcgcaaggactcggtggtcatgctgctccaccacgtggtcactctcatcctcatcgtctcctcctacgccttccggtaaggacaggatcgggtggcagggggccgaggcacagcccacacagagtgcggaggctgatgttgcggcggggcacagaggaggccgtggaggggatcacatcaggtcggagtgctcagggttccaaggtcagagtgctcaggggtccgacgaggggacagaccagaggcaggaaggctgaggaggggatgtgggcccggagattcctgagggagattccgctgggatggggtgaaacaggcccagagagccatagccaccccaccccactcacccacccagctcttcagacgctgcccttgaccagccaggtcacacacccaggagttcctgagcacctgccacgcccaagcaatgggggcatggctgtgaacgcagctgacacaccctgatgttctagagccaaccacagccgtcagtgagcctttcagatggagtctgtccaaacctcaccatgctgtgtgcataaaacccacccggcttcaaagccttcacatacaaacgagtgaaaatatcttatccacccttttatttctctctctcttttttttttgagacaaggtctcactctgtcacccaggctggagtgcagtggcgtgaccattgctcactgcagcctggacctcctgggctcaagtgatcctcccacctcagctccccgaagtgtggggattacaggtgtgcgccaccacgcctggccttgttatctcgactccatattgaaatgacaatattttggatatactgaattaattagaatgcattattaaaattaatattacctgttcttttctctttcttgttaaatgtggccaatagaaactttaaaatgaaatacactgctcatatactattcctacgggactagctgctctagctgcgataatagggtagccacgccccacaaatatagagcaacaaagaggtggccctttcaactttaattagacttaaataaaactccaggagcagtagctcatgcctgtagtcccccagctacttagaaggctgagtcaggaggattgcttgaacccagaagtttgagttcaacctaggcaacgtagggagaccctgtctctaataaataaatttttaggctgagtgcggtggctcacgcctgtaatcccaccactttgcgaggccgaggcgagcggatcatgaggtcaggagatcgagaccatcctggctaacacagtgaaaccgtgtctctactaaaaatacaaaaattagctgggcgtggtggtgggcgcctgtagtcccagctactcaggaggctgagacaggagaatggcatgaacccgggaggcggaggttgcagtgagccgagatcatgccactgcactccagcctgggcgacagagcgagactccgtctcaaaaataaacaaacacgtacataaatacatttttaaaattactttatcttatttatttacttacttatttttttgagacagagtctcgctctgtcgcccaggctggagtgcagtgccatgacattggcttactgcaacctccggctcccaggttcaagcaatcctcccgcctcgcctcagcctcccaagtagctgggattacaggggtatgacatcacaccggctaattattatatttttagtagagatggggtttcaccatgttggccaggctggactcgaactcctgacctcaagtgatccacctgcctcggcctcccaaagtgctgggattacaggtgtgagccaccacgtctggttagtttaaaaaataattttaaaaagcccctattccattcctcagccacacaagccacagttcaagggctcagtggccacaagtggctggtggctcccatgttggacagtacaggtttagaacattcccatagttctagaaagttctataattcaaggctctctagagggcagaatcagatgatagaaccaaaaaggaaggaaggaacagttcatttgaaggtgataagaattatggagaaaaggccaggtgcagtggctcatgcctgtaatcccagcactttgggaggccgaggtgggtggatcacctgaggtcaggagtttgagaacagcctggccaacatggtgaaaccctgtgtctgctaaaaataaaaaaattagctgggcatggtgatgagtgcctgtagtccaagctactcaagaggctgaggtgggagaatcgcttgaacccgggaggcagaggtggctgtgagccgaggcattccagcctgggcaacagagtgaggctgtgtctccaaaaaaaaattgtggctgcaggtgttaggtgttagttggtctgggggtgacagatgagcagatgagcagagactgaaaggagtgaagggaggtgctgaatgccaggcactggcatgctgggtcatggggacagcacgtgcaaaggacctgtggcaggagcccaggagctgtcaggagacagagcaaggaacagggacttggtgagagacacttccccacgtccagggtgaatccaggaccctcgggcagctcatctgtcagatggagactctgtggaaggacaggggatggccttcgggcttattaagatcctaatggggccgggcacggtggctcacacctgtaatcccagcacttcgggaggccaaggcgggtgggtcacatgaggttgggaattcgagatcagcgggaccaacatggtgaaaccccgtctctactaaaaatacaaaattaactgggcgtggtggcacatacctgtaatgccagctacttgggaaggctgaggcaggagaattgcttgaacccgggaggtggaggttgcggtgagctgagatcgtgccattgcgctccagcctgggcaacaagagcaagactctgtctcaaaaaaaaaaaaaaattaaaaaaaaaaaggatcctgatgggctgcggcagaggcctttcctgcagcgatggccaggctgcacgtacagacctggaagtctcatcatggtggtggtgtccaaagtgagggacaagctcatggaggatctggacacagagtaccccaggcctgtgagagtcgggggtcatagagggtcagaggtcaccaagatgaggaggggccagcaaggaacttccaagaccgggcacagtggctcgcgcctgtaatcccagcactttgggaggccaaggtgagaagatcgcttgagcccaggagtttgaggccattctgggcaacatagcaagacccagtctctactaaaaattaaaaaaattagccgtgtgtggtgttgctttcctgtagtcccagcttctccgggggctgaggtgggaggatcacttgagcctaggagtttgaggctgcagtgggcccgatcacaccactgcaccccagcctgggccacagagcaagaccctgtctcaaaagaaaaataaacttccagggagctccctgggccacatggggacactgaggcagggaagatgagggtctggttgggggtgcacggctaagtgggggacagtgaggaaagggcatcctgggaagtggagatgggcagggcaggcgaggcaggaagggtggctttgaagaggcccacggggagcctgaggtgtagcccagggactctgctgggggccttagtgcagagtggaggtcccccaatgtgagctgccctctcctctctgcctgctgctcccccaggtaccacaatgtgggcatccttgtgctcttcctgcacgatatcagtgacgtgcagcttgagttcaccaagctcaacatttacttcaagtcccgcggcggctcctaccatcggctgcatgccttggcagcagacttgggctgcctcagcttcggcttcagctggtgagtggtagggagtgctgggcagggagggaggtgtggcctggtgaggtgggtgtgtccagaaaaggggcgggaccaggcagggaaggaggcggggcccggtgaggtgggtgtgtggcatgacaggggaggggcctcatgatttgggtgggactgaaggggcggggctatacaggaaaggagtaggacaagggtggggccaactgagctaggagtggggctgggcagaaaaggataagccaggtgaggtgggtggatccaggaaggggaggggcctggtgagataggttgggccaggcatggaaggggaagagctagactaatacagagcaagccaggggtggggccaagcagggttggggtagggctaggcagagaaagaggtagggctttggtgtggtggggaagacctggcagagaaagggaggcgctgtgcagggaaggaggtgggggcttggtgaggtgggcggggcctggcagagaaggggagggactgggcagggaaggaggtggggccttggtgaggtgggtggggcctggcaggaaaggggagggactgggcagggaaggaggtggggtttggtgaggtaggtggggcctagcagagaaggggagggactgggaaggggaggaggtggggccttggcgaggtgggtgaggcctggcagggaagtggggggccaggcggggaaggatgtggggccttggcgaggtgggcggggcatggcaggggaggggaaggacagagcagtagtagaaacaggtgggcagaggtgggcaaggatgggataagggggcaagggtgggtctaggacgggataggacagggactgggtagggcaccgtccccctccacccacggcctcctgactcctcccaccgcaggttctggttccgcctctactggttcccgctcaaggtcctgtatgccaccagtcactgcagtctgcgcacggtgcctgacatccccttctacttcttcttcaatgcgctcctgctgctgctcacccttatgaacctctactggttcctggtgagtcggccccggctctcctccacagtggcggtcccgtcctcgtcccaatccctgtcccctcctcaggcagtcccggggaggggcacgttaggtggcagacagcccgtgtggagggcccgggacaggagcacatggctgtcagcagggcagtggcgtgggggctttcttctcactggcacctcccctcccctctcgcagtacatcgtggcgtttgcagccaaggtgttgacaggccaggtgcacgagctgaaggacctgcgggagtatgacacagccgaggcccagagcctgaagcccagcaaagccgagtgagtgtggaggggcccgcaccccgcgttccctcctttagtgtcacccgtccaagcgtgttcgtgggcaggcccccaagacccagcagcagatgaggccgacgcggatgctgccccccaagcctactccaaaacagagactgcaataaaggcgtggacgatgtggccagtaccctgaaggacaggacagtgaggaaggggagggagaggctggggaggggcaggcagggcgacaggcagggtctcagcggtagggacactgagggccaggcctagtggctggtgtggcgggagtggcgagccagggccctgtgggtggtgaggagtagttgctggccagcctggatgacgacctctgacccatgtcgccactggagctggtggcagtggggctggggaggaaggaacgccaagggccacagagagaacccaggctccatctgggccgagacatcctggcctctgagtttgacaggggagcccactgcccggccaaacaggagctggggctgggagctcagactcagtccagcccaggtgggagtcctggggaaggagatagcccacgagcctcaccagccctgggtgacagccagatggtgtccgaagccccaggcctggggcaggcagggggtgtctgggccagggatgaacggaggccaaactgggtaacaagcagagtcgggtgtgcagtgtctcataggcaacgtgaggagtgtttgagcaggagccggggcaggaggttgtggaaggccctggaaggtgccgaccagccaggccctctgatttggccggtgggggccatcggtgacgtgggaacgatggtttcagggaagcagtggctcagagctccgtgacgttttttggaacgggaggtgcgagatgcagacatttaacacatccggggctgtagccaggcagaggagcgtcagaccccccaccctgtttggaagggagaacccatcagattcgccttgggtgtagatgaaacagaaataaaagaatcaaagacgactcaagacttttggctcgagctggtattgactgagatgggattggggcagagggtcacatgggttctggcagatgcggcgttaggagcctccttttgagggtgttagattgcgctgtcctttgagcatgagtcaagaattcttttttttttttttttttgagacagggtctcactctgtcgtccaggctggagtgtgcagtggcacgatctcggctcgctgcaaccgccgcctcccaggcccaggaagtgatcctcctgcctcagcctcccaagtagctgggcccacaggcatgcaccaccatgctgtgctaacttttgtattttttgtagagctggggtttcctcatgttgctcaggctggtctcaaacacctgggctcaagtggtccacatgccttagcctcccaaagctgctgggattacaggcatgagccactgcagccggcctgagtcgggaattctccagagatcagctaggtctctccaaggagtcttccaaaggtggcgatggctaaagggggcaccagtttggccacatctagacaccaggaaggtcctcttgctgtagaacagtgagctcatggtggggacatcctcggaggtgcagaacccagaacaagaggaagccagacctcccagccccaccagtgtctggctctgtccccgctgaggatgtctcatcagaacacagggtaagagctggcatgtcctctaggacagcaaagcatgcaccctgtacagaagtgccagagagtatcagggaacaccctgtgatgattgatcccataggcaccaccagcagaattcgattctccaaggacagccggagttagtgcagttgggtataaaacaggatgggacgaaggcagtcaggctgagagacgtcttccaaaagagcccgtcaggatgcccagaaactgtcaagatcatgggaatcagggaaagaccgaggaacaatccagggtcagaggagaccaaggagacagatgccacctgcagcatgggctcctggaccaggaaagggaccttcaccaagaagctggtgaattcaaatcatgtggagagtttagttaatagcaaagcaccaatgtcggtttctttagctgcaacccatgtgccatggaaatgtaagctgtaatgtcaggggagctggatggaggtgacaggagctccctctactccctttgtagcatctctgtaaatctaaaattaatctaaaataaaaaagtttggccaggcgtggtggctcacgtctgtaatcccagcactttgggaggccaaggcaggaggatggcttgaggccaggtgttcaagaccagcctgggcaatatagggatatgcagttcctacacacacacacacacacacacacacacacaacccaatcaaaacaaaacaaaacaaaaaacagccatgtgttgtggcacacacctatagtcccagctactcaggaggctgaggtgggaggatcacttaagccagggagctgcagtgagccgtgatcacaccactatactccagagcaacagagcaagaccctgtctcaaaacaaagaaaaaagacaaaccaaaacaaacaaaaaagtttattttaaaaacaggtatgagagaccatcaaaaatggcattgaagaccaggcgcggtggctcacgcctgtaatcccagcactttgggaggccaaggcaggtggatcacttgaagtcaggagttggaaaccagcctggctaacatggtgaaaccccatctctactaaaaatacgaaaaattatccaggcatgatggcgcacgcctgcaatcccagctactcaggaggctgaggcaggagaatcgcttgaactcgggaggcagaggttgcagtgaaaaaaaggcattgaatgttactttcccaggaactctataacaaaaggaacacaagcttgtgacttaaaaccacaggaacttattctctaatatttctggatgacagatgttcaaaatcaaggtcagctgggcggtgctccctctgggaactctaagcgaggatcccctccttgcctcttgggcttctggtggctccaggcatttcttgttttatggctgcattgctccagtctcagtctccgtcttcccagggctttctcttcttcttttctgtctctcttctctctcataaggacacttatcatggtgaagcaggtcagggtcactggtcttgttgtctaaggtgttgtctgagcttgtggtctcatgaccaagaaaattaaggaacgtggccacaaaggccgaggttggagcaaaagtttaataaaagaaagctctccacagcagagagaggattccaggtggattaccgttttaacagttgaatccaaaagcttcttttttttttttttttgagacagtgtctcgctctgtcgcccaggctggagtgcagtggtgtgatctcagctcactgcaacctccgcctcccaggttcaagtaattctcctgcctcagcctcctgagtagctgggactacaggcgtgtgtcaccagacccagctaatttttgtatttttacaaatggggtttcaccatgttggccaggctggtcttgaactcctgacctcaagtgttcctcctgcctcagcctcccaaattgttgggattataggcgtgagccaccgcgcccagcctgtttctttctttctttttttttttttttagagacggtcccactctgtcgcccacgctggagcgcactggctcaatcatagtccactgcagcctcaacctcctgggcttaagtgatcctgccgcctcagcctcccaagtagctggaaccacaggcacccaccatcatatccagctaattttaaagtgtttttgtagagacgagatctcactatattacccagtttggtctcaaactcatggcctcaagcaatcctcccacctcagcctcccaaagtgctggcattacaggcatgagccactttgcctggttccgaaaattcaatcaggattggaacccttcagaaaaccaagaccgagaaccacttttaggtaactcaggaggcgtgaagcaaatcagagagcaattaattggcttgatctcttcctcaccccatctcaccccattgctgcttcttgagcagcctcacctccagggtcccctcatctgtaccccttcccctgaattccctgtcctcctcatggccctcaggggacccctggtgatgtgggtagccagtacccttctctcctacactgacgcccgtagcttccttgtggtcactcccatgtccttgtcatgactcagcccctctgtccaaagtccccattgccctctcaggggctgccgggaccggccatccgttgagacactctcacctctctctggatctggtgacctgcactcaatgctccgtaaatcccattttcacctctgctgcacctgccactgcccctgcagcagttctaaagaactgggctgggcacggtgactcacacctgtaatcccagcactttgggaggccgaggctggaggatggcttgagcccaggaggtcaaggctgcagtgagccatgactgcaccactgcaccccagctgcggtaacagagcaagaccctgtctcaaaaaataaaaatagaaaactgtgaacttcagcacctacatctggcccatgtaggagcatcttctctcctgagggttcctgggcaccagctgtccccatcatcatcatctcctgcactgataatctggccaacatgtccccaagaaagcagaagtggccgggtgaggatgtccagctgctgctacagtggacaacagtccctctctctgaggctagggatgttcacccagcttgcctattcaaggacatttcaacccaggagagaacgtgctctctgctcttctccaccactggcctcatcagcctgttttccctcccttgtagcagaattcctagatcctcctgggtcctcctcaaacccagctgtgccccatcttcctccccccatcccgaagaccactcctgtccagctcccatgtggctctcttggtgctaaccccagagagtcccctccccttcttcttctttttttttttttttcgagacagagtctcgctctgtcacccaggctggagtacagtggtgagatctcggctcactgcaacctccgccttccaggttcaagcgattctcctgcctcagcctcccgagtagctgggattacaggcgtgtacaccacacctggctaatagttgtattttttttagtagagatgaggtttcacaatgttggcccaggctggtcttgaacacctgacctcaggtgatccacccatcttggcctcccaaagtgctaggattacaggtatcagccaccatgcttggccccggctaatttttaaaatttttgtagagatggggtctcactgtgttgcccaggctgatctcaaactcctagggtcaggtgatccacctgactcagcctcccaaagtgctgggattacaggcgtgagccactgcgcctggcccttgaagccctttatttactctgcactcctgctctgtctctctggcctcctggctggcctccttctcttctggggccctttctctacccacacttaatccacaccgactcctacatttctctcctagccacgcagctcccctgagtgccattctccatctcccgtgtttgacatttccagcatcttctaaaatatctcaaatcagcccccaatttcaccccagactccctctctagtgatagactagtgtcaacactagtctatcggtgttgacagcaatttggggcaaaacccttgcaagagcccagggggtcttgtctcctctgtctccctctcctcctcatctatgaagaaacatctagaaagtgcctgcatcatccttctctctctgcacactcgctctggctcttttcaccacagtggtggatagaagccaaaaggtgtccatcagagtaaggccatctcggcccggcatggtggctcacgcccataaatcccagcactttgagaggctgaggcggatggatcacctgaggtcaggagttcgagaccaacctggccaacgtggtgaaatcccatctctactaaaaatataaaaattagccaggcgcggcgctcacgcctgtaatcccagcactttggaggctgaggcgggtggatcacctgaggtcaggagttctagaccagcctggccaacatggtaaaaccgcatctctactaaaaatacaaaaattatctgggcgtggtggcaggcgcctgtaatcccagctacttggggggctgaggcaggagaatcacttgaacccaggatgcagaggttgcagtgagccaagatcgtgccaccgcattcccgcctgggggacaagagcgagacttcgtctcaaaaaaaaaaaaaaaaattaccccgggcatggtgttgcatgcctgtagtcccagctactggggaggctgaggcaggagaatcccgtgaacctgggaggcagaggttgcagtgagccaagattgcgccactgcactccagcctgggcgacagagcgagactccatctcaaaaaaaaacaaaacaagaaaaaaagataacagagaaaagctatctcccccaaggtgggtacaccgccacccacacctcaaaaggcaaatactgacagctgtttctgagtgggtagagaacactttgaagcttttgcagaaaaaacaaacaagaatcagcaggaaagctctgataaaaagccccagggcgggggcacccatcaccgaggatgctaaactttaccattagaggaatctatactctctgtgggaactgagtggagaaactaacctaagaccttaaaacctttagcaaatactaaagaccatcctggagggcaggaatggaaagcacggggaccctctggaaaacacagtgagggtgtgtctttgtttcccataagccttagggcaaacccccaccttataccaaaggtgtcgatgcagaaatggaatccctggagtcatcccagagccaaaaggggacagtgtgtcacggaggtttgtttatgggaagaatcgagaagccacaagggtggatgaagaaacgccactcacggtctcaaggatcacaggcaaaatcagaagacaagtgacagatgggaggtccaagcaaggcttatctcctctcagataaagaccaacagtccttggatggggacagccagttggctgtgaaatgcatgcagagaagctgagcttcagcctaagagaagagcgaattaaagtgacagaagccctttgggaggcggaggagggctgactgcttgagcccaggagtttgagaccagcctggacaacatagcaacctcacctctacaacatagcgacctcatctcaacaaacaataaaaaaagttagctggggccaggcacggtggctcacgcctgtaatcccagcactttgggaggccaaggtgggcggatcacctgaggtcaggagttcaagaccagcttgggtgatatggtgaaaccctgtctctactaaaaatacaaaaattagctgggtgtggtggcaggtgccaccacactactcaggaggctgaggcaggagaatcgcttgaactcaggaggcagaggttccagtgagctgagattgtgccaccacactccagactaggcaacagagcaagattctgtctcaaaaaaaaaaaaaaaaaaaaattgctgggagtggtggcgtgcccctgtaatcccagctactctggaggctgaggtgggaggatccattgagccttggaggttgtgccacagctctagcctggaccacagagtaagaccaaaaaaaaaaaaggaaaataaaagaacatggaagggaagtaggtggagacagcagatgccagccagggccactggagtcaaggactagccttcgtggggtgggtggcagaggagaggaggatgtgcagggtcccactgtggaggcggtggagttgtcaggcccaggccggtacgtgggttttgccctccagcggcctggagaggcagggaggaggggaagaggaaggtttaattggagagggggaagcaaggaggaagtgccagggtgccaggggggacatacgtgcctacggggcaggttgaaggaggggcagggtgaaggcaaggaggggcagggtgaaggcgaggaggaagccacaaggcgaggcccgggcctggccgggtaaaaggagccagggggtgtgaaacggccagagaagaagcgggaaagagggccaggcggccgcgtggggctcccaggctaacctgcgccggttctgacccccaggaagccactgaggaacggcctggtgaaggacaagcgcttctgaacccctcggccccgcccccgtggacccggccccaccccgaataccccggccacgctccccgtccttggccgcccctccaccccctccaactctgctcctctagggccgccgccacctcccctgggaccccgccccctcatcctgcctccagttcccggccacgccccccaggacccctgcccctccggggacaccggccccgccctcagcccactggtcccgggccgccgcggaccctgcgcactctctggtcatcgcctgggaggaagatgccaccgccgcagcaaggtccctgcggccaccacctcctcctcctcctggccctgctgctgccctcgctgcccctgacccgcgcccccgtgcccccaggcccagccgccgccctgctccaggctctaggactgcgcgatgagccccagggtgcccccaggctccggccggttcccccggtcatgtggcgcctgtttcgacgccgggacccccaggagaccaggtctggctcgcggcggacgtccccaggggtcaccctgcaaccgtgccacgtggaggagctgggggtcgccggaaacatcgtgcgccacatcccggaccgcggtgagtggggctttcgctggggacactggtcctggaggccagacctcgcagggcgagcctcgagagtggcccggggatgcccgagcagctccgagggtccccacccgccctgtccaggctactagcaacttcggccaccgcacctcaccctttcctcgtcatctgctgcacgccggggacacatgtcagggggttcccaagaccagtccttctgcttgatgctgaagccctgtccccaccccatgcccacccccacctcttgacactaatgccttcctgcagatgccatccccacaccctagcatggcttccccaggggcccaggttctggctcatgtctcccacttcggccacccctcctcctatgccccccgccgagggcagcccaccccccccgccgcaccccgcagggcgccttccttggaactcatgccctgcccccactccatcagcccaccccgccgcttcacacccttcccacagacggtgcgccccgagccccagcgttcaccttcctccctgtccctaaccgagaccccatgggcaggccggggacgcagcgcgagccgagttcctgttcctacctccccaggtgcgcccacccgggcctcggagcctgcctcggccgcggggcattgccctgagtggacagtcgtcttcgacctgtcggctgtggaacccgctgagcgcccgagccgggcccgcctggagctgcgtttcgcggcggcggcggcggcagccccggagggcggctgggagctgagcgtggcgcaagcgggccagggcgcgggcgcggaccccgggccggtgctgctccgccagttggtgcccgccctggggccgccagtgcgcgcggagctgctgggcgccgcttgggctcgcaacgcctcatggccgcgcagcctccgcctggcgctggcgctacgcccccgggcccctgccgcctgcgcgcgcctggccgaggcctcgctgctgctggtgaccctcgacccgcgcctgtgccaccccctggcccggccgcggcgcgacgccgaacccgtgttgggcggcggccccgggggcgcttgtcgcgcgcggcggctgtacgtgagcttccgcgaggtgggctggcaccgctgggtcatcgcgccgcgcggcttcctggccaactactgccagggtcagtgcgcgctgcccgtcgcgctgtcggggtccggggggccgccggcgctcaaccacgctgtgctgcgcgcgctcatgcacgcggccgccccgggagccgccgacctgccctgctgcgtgcccgcgcgcctgtcgcccatctccgtgctcttctttgacaacagcgacaacgtggtgctgcggcagtatgaggacatggtggtggacgagtgcggctgccgctaacccggggcgggcagggacgcgggcccaacaataaatgccgcgtggtctgc

SEQ ID NO: 835 - DNA, 32744 bp, Homo sapiens; identical to SEQ ID NO: 645
  source 1..32744: mol_type = other DNA

SEQ ID NO: 836 - DNA, 32744 bp, Homo sapiens; identical to SEQ ID NO: 646
  source 1..32744: mol_type = other DNA

SEQ ID NO: 837 - DNA, 3019 bp, Homo sapiens
  source 1..3019: mol_type = other DNA
aaaccaggggcgggttctaagcggcgacgcgcgggtgctgggaggccttagaacgccgtggcgtgccgcaggacgcgacggctgcagaacatccgccgcaccgctgggggccaacgttgtcggaccgaggagtccgaggtggcgactgagtgagatacccagctgtgcggagctaggacgcggaacatcccagaggccagcatcaacatgtcagtaccgcacccttcccatttgctgcctgtaggtccaccccgcgcgtgcggtccccaagtggccatgccaccctgcacgccctccccgcgtcagtcgttcgtttccagaccatgccgagccacacctgcccacagagtcgagctctcgaagtcctcattcccaaaagctccacagcctgtgacccactaggagggagggggaaaccgaggcccgggagagacggagaagccactctctgaggaccccggagccccgcccacagtgggtggggtcggcactgaaggggttaaggccgcggggaagccccgggctcagccctaggggcggatcctggggcttcctccctctagaccaaagggtgcggctgctgcagaggtggctgatgcaggtgaggggcttacagccctgtgaatggtgtgggaggtgaggggaggggggtgcctgttactgaccagtgtttaattggcctcaagctcaggagaggtaaggggagccaggaggccccctctggagcaggtgagtagaaggagggggctcagctgcccgcccacgactagaaaacccccagcatagacctgccggacggcaggaccttggttaagatgggaaaacagtagggtttgggcacaggaggtctgggcccccaacctggtgaccgttggacaccctgtggatataggaaggaagctgtggtccttatctagggtgcctgcgaaactcaagccagtggggaaccaagcctgcagaggcaatactgctgtgtgactgtgggccaggcccagtgctggtgctgctggggccccatctgaggagacagttgggtctatatccaaagtgtcctgagatgggcagagttgggaagggggccatgggctccaggtggggaaggcagtcaagacaggccaaagctcagcctgatgggtgcatgagtggggccccaggatccactaaggcagtgggcatagcccaggtagttgaaaaggctgggagctggaggagactcggaacatagggagaagaaagggacaggaagactcccgggcagtttttcctatggagggaaccttgggtaggtttgagcagggggtatagtgtctgctttgcatcttctatcccatgccctagtggtggactaggaggactactggaagacagaaggccagcaagtagattgggtcggctgttttatagacctggtggttacagaccccctgtgaggggaggtcctgaggaggacaaatttgtagccagagcaggctggggccaggactcctaggttctgccccagccttaagcagctcatccatcactcccagcctccctccaatgtggggtagacacctggatctatctgccctgctctataggggatgggtctcttccaggtcacctgtgctatcaggtgagtgtgggacaaagtgcagcccaccactccccagttccagtatgcatggtcccccctgcactctgtcagcccttccctgctccaaccccaccctccctcctggcacagcccagcatggctgttatctacaggaggagagccactgtggtctgaagagatgctactgcctggagactggggtcttaacctccagcctggcactgagccacctgcaacctagcagcaggtgaccttggctcccagcctgactcagctgaacctggatcctgtgcataggcaagagctgactctgagccctggcccagccaagctgacccctacactagaccctacacaccggatggagctgatcctgagtaccagcccagctgagctgactctggatcctgcgtgccagccaaagctgcccctggattccacatgccaaccagagatgaccttcaatcctggtccaactgagcttaccctggatcctgaacaccagccagaggagaccccagctcctagcctggctgagttgaccctggagcctgtgcaccgccgacccgagctcctggatgcttgtgctgacctcatcaatgatcagtggccccgcagccgcacctcccgcctgcactccctgggccagtcctcagatgccttccccctctgcctgatgctgctaagcccccaccccacacttgaagcagcacccgttgtggtgggccatgcccgcctgtcacgggtgctgaaccagccccagagcctcttagtggagacagtggtggtggcccgggccctgaggggccgtggctttggccgccgcctcatggagggcctggaggtctttgctcgggcccggggcttccgcaagctgcatctcaccacccatgaccaggtgcacttctatacccacctgggctaccagctgggtgagcctgtgcagggcctggtcttcaccagcagacggctgcctgccaccctgcttaatgccttccccacagccccctctccccggccacccaggaaggccccaaacctgactgcccaagctgccccaaggggtcccaagggacctccattgccaccaccccctcccctacctgagtgcctgaccatctcacccccagttccatcagggcccccttcaaaaagcctgctggagacacaatatcaaaatgtgagggggcgccccatattctggatggaaaaagacatctgaggccatccagggcaaggaactgtctttctggttcaatagactgccccgacagtctacaagcctcagcccactgaccatacctcagcccctagcccctggggggcagctttaacctgggcatgtttcctgggtaccagtggggccaggaggtggctctggctcagagccgtcagtgtggctgaataaaggctctcttgggt

SEQ ID NO: 838 - DNA, 8253 bp, Homo sapiens; identical to SEQ ID NO: 647
  source 1..8253: mol_type = other DNA

SEQ ID NO: 839 - DNA, 32746 bp, Homo sapiens; identical to SEQ ID NO: 648
  source 1..32746: mol_type = other DNA

SEQ ID NO: 840 - DNA, 32742 bp, Homo sapiens
  source 1..32742: mol_type = other DNA
cggccagagggaggagagaaccggggctcgccgcgagccttcgagagcagcggccgcggaggaggcggcggcggcgggcgggagcagcggcggcggcggcacaggctcggggccagccgggcgcgcatccccgggcgccctgcgcggtggagagcttggcgggctgcgggtgccgcaggacaggagtggacaaagcaagatggcagggatcttagcctggttctggaacgagaggttttggctcccgcacaatgtcacctgggcggacctgaagaacacggaggaggccaccttcccgcaggctgaggacctctatctcgcttttcccctggccttctgtatcttcatggtgcggctcatcttcgagaggtaagaagggctgaagcccctcctcccctccccctgcgcacacacacgcgcgcacacactcgcgcgctctctggcgcacgcccccgcgcccccaacgctcgcgttcacgcctcccaacctttgtgttcggggaggggttgctgacccccctgccccgctggctttctgggagccagaaagggtctggcttgccacggatttcctcccgggcgccggggaggagccgcggagcgttagggtcgccccctgccctcctcctgggccctgctctcctcccggcaagggcaggcgaacaaaggtgagcggtggtcgggctcaggacccgccgcattccgcggggctcgcccctctccgccggcgcgccacgcaaggctgccaggcagggcttcccgccggggcccgcgccacccacctgacagccaggaacgttccggacgcgcggcccggagggaggaggaaccgcgcacacttcaatctttatgctccggcacacggattgtaggggttgtgcttcaaaagaattcgccagggacttcctggcttctggtcgctgtttggtttttatccgtgaaactatcaggcccacagtcctggcaaataggggataatagcatttcaggttatcagcggtttctttaaaagaggatgtgacaggacgggtccacatcctgcaaaatggtgatattaaactgataaccctgtcctgtgaataatcataaacttcttttttggtactcgaaggcacttaaaattttgaggaattgtcatgcaattgtatagttcctcggtttggttggatatctccattgtgtcacatacaaacttgtgttattctcatggaattcgttttcgtcgcgaaactagattgtgcctgccatgcattctctgggtgctactgaaagaaaaccaggacagcagcacactttttttttcgtaacagaaaatattatcttcccctttcttgtaccctccccttcctctgcccaattcatcagtaaaggctgaatttcttagatcacaaagtagagtttagattgcatttctcgcttccactccgcctttcttccccgccttcaactcaccttggttttgtttcttaagcttttgctggtacctcatttgctgttcctctttgcctgaaaacgactgttgagggtggcagaacgcgtcttttgagtcatttgctgctggacgaggcaacaaagcttcatggggacaaaaagtatcttttgtctcaggaaggtatatttttcaccggacagtattgttgcttgaaaacgaagtcagctgttcgcctgcagaaattgacatgcacaaagcaacagactttaagacctatgtttaaattattggaatctaatacagatgtgtcattgatcctatacaaaaaaggatcaaaaaagtcacagcagtgctgtgaaaaaatgggtgtgtttgcaggtgtagagttacctctagagcaaatgtttggttacagaaaatatgaactctatacagttttgcaggctctccaaaaacaagcagactcagggatagcaggtttgctctatgttggcacatagtaggggatctacacacaattgctgaattatgataaattgtgtctgataaattctggctgggctcacttttagatagataatgcatttgaaagagatgtgcagtcttatgtgttggagaacaaaagcatgatctgtgcacaaacagccgaattttcctgacatcctccttctctatgctgattccaggctgttcactgtgtttaaaaaaattaagttgttagaatggagatggctttgtacttagattgtctctgcctctaaaaagataaacactaatgtgatagttgaaaactggaagttcatttttcctctttctaaacattttttattttctttctttttttccataatcccatgactcgacttagagtttacatagaggggtgagctgctttcaattgtcagtcacagcaaatgtcctcatattgatataaagtgagttggtcagtttccttcaggccattgatctaagtagaagagatttaatggcctgtatggaaagtgaaagtttatggttaatgttcagaataataatccaatatggcacatatgtcacagaatgctactgacttttggaagactatctactttgtttcttcctatgatagctctgtctttaaccattcagaccttctcaattctctgaaaatccacaatttagttgtatctagagttagaagttctgcatgtttctcctcttctcaaacctaaatgacatattctgggatccaacctgtgaccttcatctcagtagcatccatcaagggcctgaatcaataaaacagaaccattcagtattatcactgctacaactcacattcaatggccttctagcattttgtatatacatccttttcttttgcagtattctataatgtatacgatgattttaaaagcctgttgtgaatccctttgtagaatgaaatgcttttgtaataggaataattctctcaagattcttctctttgtatgctttgtcatttatttcaaagctgagaccatacctaagaaatacccgattatccaagtctttattttacattaagtgaagtcagtaatgtccttgttgaggctaaaatcgtgaatttgaatgccttcttctcagtcttaggtatttctctctactaagagaaacatcaaagaattgactgaaatgggctttgcccagttaaacagtcctttctttttattttcatcccggctgttgtggtgtggatagtggaggcattggtagccagaacatgtcactttatgacagcatatggacagcaatatggaagcccagcatggttggtaaaaaatggggcagcctaaggtcaatgacttttggctgagtctgtgaagatctcaaagcttggtggtttttagcatagcctttataccatacttaactccgggtaaggaccaggaccactgtagcgaccaattgattgacagagtaaagtatgtgggtttttttttttcccccaactgggctgattctcttagaataaaaattgtataccattatattatgttaacttgatcacaaagaacaaaatgttatttattaataatatagcattgtcatctgtttgatgaattttcttgatttaatgcttgtttagattcagtaagccattctcaggaactataataaatgcttcttccaacttcactttttcaaaaatgtgttttgctgtggtatttataaatgtggaaattgtgctgaatctctttagaaataaaaattctttgagttattgttacaaatgttaactttaatgctgtggatttaggagagatgcaggaagtatagatcgggaatcagaacactcaaattctagtcaaaacttacactggggcagcctcctaatttatctctgtttattttctcatttatgtgttgaggcaaatggcctttgtaacttattgttttcaccctcctgattctttgattcctgtggatcatctgtgcttgaaaattactaattattatctgatgaaactttgaagcggctgaatgtcttttttttttcttttctttttttttgagacatgttctccctccatcacccatgctggagtgcagtggcatgatcatggctcactgcaacctccacctcctgggctcaagcagtcctctcacctcagcctcacgagtagctaggaccacaggtgcatgctaccaggcctagctaattttttgtaattttttgtagagatggggtctccctgtgtttcccaggcttgtctcaaactcctgagctcaagtgacccgcccaccttggcctcccaaagtgctgggattataggtgtgagcccctgcacctggtcaagagattttttttttccacagaaatattgtagtcaatggttttgtttcttgtatttttcagctgtgttttgagtcaaaagaatcatttgggctgttatcatttatgctccaaaaagctacagtatttcagaataaccaacaaagattctatagagaaagcaattgttccgtttccttagacctcttttaggtagaacccagagtaggcctggcacctcttgtgatgactgggtaagaatgagaagctaattcctgccagattggctctcaaaatgctaggctatgtgaggagtgtcatcctttgggaggctgacagcaaagtctggcttcactcactcagcccaagaatgatctgctgtcccaaaccttcaagaaacgacagggtctcagttgtgtctgagggaatgtctggccagcaggctttttcttttagatttattgtccactagccttgggtgaggccttctaggatagttgagagagcgagagagagagagagtgtgagagcgtgttcctggttgctggtacttagggggaaaggaggggagtgagtgaatgactactaggaaacagtgggggtatcaggtgaggttcattactgaaggaatttgttcctcagtgttcctatagtgtaccttgtaatgaagagactgatctgatatattttaaaagactgtttgggaacaacttgcatacaaccatggttttctcatgcaatcagtgctggatgttaaaccctataagtgttccttatttagcttgttaagttatatggcaatattcacattaaaactatggatacctgctttgccagagactagtgtgtgaggcaagagtgggcttcaggccgggtgcagtggcttatgtgggaggatcacatgggcccagggaggctgaggctgcagtgagctgtgattgcgctactacactctagcctgggcaacagagtgagaccctgtctcaaaaaaaaaaaaaaaaaaaaaagtggtctgcagacataaatagcttctcatagtttctgaatgacagtggatgttttgttggagaacaacctaaaatcagagggttggcattctttgcagaacttagtacagttttctcatctagtaaaataaaaagttttgaatttacacagtgaagtagtttggctatttgttataggttaatttatgggtaaaaggcataacattactgttaaggggcagtgccttagaatggtggaggaggtaggtgagataactttaaattatcaccatgatgtaatgtcatctaggattatgaaattaataccctgagttcacttatgacttctctgttgaaaatatttgaattctctatggacagggctagttttctcttggattcctggttgtaaagtgtttcagaagtggttgctcttctgtgatggggaaggacaggtggcagcagagggaaaatgggatttcaggtgagtttcctccatcagcataccagttccatggctttgtcagacattgctgcaccatcctcaggctgccctcttgtattttactaacttgattaaaccttgttggtgaacactagaacctaggcccatgttgtatattaaaagtttcaaatgttattgcatacacttacatttcttcctcttaccaccaggtgaaaccagattttttatttatttcttacatagtcgggactttcaaaattttattattttttttccttgctcatcttcttttgattaatttcttaaacacttttgaatcagaatactggagttccagattgtatgtctagttgtgtcacttaatttttcttaggaaccattttttcatttcgttttttttaaaggtaaacaggattgcctcgtatagcacagtgatcctttcatattagcaatgccttgagaatctttattcttaggattttattctttggtttcttccccctggccaccttttaaaaatgatttcataagttttttttggtctctctttcctgacaccataatctttattgacatctatactgtagcatgattgaacacaaaaggatgattcttttatttatttacttgttttttgggacagggcttcactccgttgtccaggcttgagtgcagtgccataaccttagctcactacagccttgaggctcaaacaaccctcctacctcatcctcccagtagctaggactacaggtgggtgccaccatgcctggctaatttttaatttttttttggtagagatggggtcttgctttgttgtccaggctagtctcctggcctcaagtgatcctcccatttcgacctcccaaagcactgggattacatgtgtgagtcactgcagctggtcagggtgattcttgcaatgtctttttggggtttcttgttactaatgctgtggatgattggatgcatggtctgaagctatgacttggtgcttaccatttattttgtttgatgtttgactattttgaatgactgccatttttaatgaacaacttttaaaattttgaaaacaatagtaacaactaatatttattccttaatgagttttttactttacgtggttactttatttaatcctctgtcaggccctgtaaggtggatactaatttttccccattttatggatgaaatttaggattgagaatttaggaaatacacttaactttatataacttaaaatagcagtgtaggaatttggaactaggtttcttgatctaacaattttggtgtctcctattttaaagtaaatatcattcaatcatactgtatatatatggttttatatttagccttttgccatttaatgatataatctgaatactttccatgtaattgaacttattcaaaaatatttttaatgactataagctattctacactgtggttataccataatttacttaaccagtgttcatgtttttgttcgatatttaggccatttccagtttatataagtcttttaattcttgatgatttcctaaggaatgtttcctagaggtggcatttctgagcccaaaaggataaatgttttagtgttcttgatggatacaaattgccaaattgttgtccagaaagattatacccattcgtatttccttatcagaatatagattattatcattggaaaaaatctggaggctgagcacagtggctcatgcctgtaatcccagcactttgggaggctgaggaggttggattgcttgagcccaggaatttgagaccagctgcggcaacatggcaaaaccccgtctttacaaaaaaatacaaaaattaactaggtgtggtgttgctcacctgtagtcctagctacctgggaggctgaggtgggaggatcactcgagcttgggaagtggaggttgtagtgagctgagatcacgccactgcactccaatctgggcgccagaccaagatcctgtctcaaaacaaaaaaattttttgctttgaattgaaagaaatgttactgttataatgtgtgttcttatattgcttatgataaacttatttcagatattaataattggtatttaattttctgtgaattcaggtatattttcatatggggatgaggagatgtagtttttatcttttttctgtaagaaattggtggccttcaggttttttcttacttcttaatgtggagtggtcttatcgtggtctttttctctggtcacatatttatactttttgtgtgtgtgtgtgtgtgtgtgtgtgtgtgtgtgtgtgacaagggtctcactctgttccccaggctggagtgcagtggtgtgatctcagctactgcaacctctgactcccaggttcaagtgattctcatgcctcagccccccaagtagctgggattatgtatttttaatagagatggggtttcaccatgttggccgggctagtttcgaactcttgatctcaagtgacctgctcgccttggcctcccaaagtgctgggattagaggcataagccaccgcacctggccttatactcttttatttatttcttcctcccgactcttccccacatgctaagtcactatcatcaggaagggagcttctcagattttaaatagtggaaggaatacactcaagaggatgatgaagtaactgatattaacactttattatggagagtgaggcagagagaaagggctgggaggaagactgaggcatcaagattgaatgggtctttatgagggaaagagggatagagcctaaattaaaaaaaaaaaaaactactctactcctgtaatggattatctaaattctgggtgagtgagaccccatgtcaaaaaaaccaaacaaacaaaaaaagacttattattagactaatcactagggaactacaaatcaaaaccactatgagatacgcattaggatggctgctatcaaaacaaagaaacaaacagaataacacgtgttggctagggtgaggacaaattggatctgttgtgcactgttggtgggaatgtaaaatggtgcaactgctatggaggttcctcgaaaaattaaaaatagaattgccatatgatacagcaattttacctctaggggtgtacacccaaaagatttgaagtcagggtctcagagatatatttgtacacccatgttcatcattcacaatagccaaaaggtgggagcaaccaaagtgtctattgatatgtgaacagctaaacaaaatgtggcatatacatatgtctccatttgtttgggctggtacaacaaaatactgtagactggataattcataagcaagagaaatttattgctcacagttttggaggctggagagtccaagatcaaggtgtgaacagatttactatctggttagggcccactttctgggtcacagatggcactttcttactgtattctcacatcacggaaggggcgaggtggctctggggccacttcactaaggtcactaatcctattcatgagggttcaacccttgtgacctaatcacctcccacaggccccacctcctaacaccatcacacttagttattaggtttcaacgtgaattttggggggacacaaacattcagaccatagcaacatacaatagaatattattcatcttttaaaaggaaggaatttctgctacagcatgaatgagctttgaagacatgcttagtgaaataagacagtcacaaaaagacaaatactgtaggatcctacttatataaggtacctagagtagtcagattcatagacacaggtagtggagtgatgactgcaaggtgctggaggttggtgcagagtttcagttttgcaagatggaaagagtcctgcatggtggtcttggttgcacaacaatgtgaatgtacttaatgacatagaacagtgcacttaacaatggttatgatggtaagtgttatgctatgtgtattttaccacaattaaaaaaaatagaagatttgctgacttgaaaggtcactagaaattactgccttcattttcttggcttgacatttttctagttaggaacaaacatcccagttctgtttatctcagtttcatcaagcactgcttttttttttttttaactgcttaattcccctcaaatctaggagagcgcctcttctttccagaatcgtctggcataggtgggtgggaggtgaggggtgatagaaggaaggtttttaaacccagagagctcttaagtatcccgtttttttagaaggcacttgaactgagcatatcatttcaagtccatttgttaatatgacaacttaataatagtaaactggctgcatgtgtagaagaggagagcaaagtgtctgtagaaaagcacattgcatagtttcggaggagtctaggattaaagtcaagtcaccctggtaagtacacaatccatttaaagcaaaccaggataatgagataaaactctccttagcagcctaggccacaggtatatcctatggaagctctgggtgagtgaagatcagatttcatcttcctccctagctttcagtttaattttccatgcattttacaagcaaatgattcaaacacttgagtatttaaagatgatttttctcaaatgctgcatattataaaaacaatctgattagaagcagtcaggtacatattattcaacagtagtttttgaagtttaatgtttggtcattgtacaaaatactgttttccgtaattcatctgtaagaatgttttgggcagtgctgtttttcttctttcttcttttaaagaagaacttcctttttctctctactggtcttcaaagtgggcttctcttggaccactcctgccttctattcctacttttgcttttactattataacttagaattcggttgtggggcttgtttttgacaaggctgaggttagagatacacaaatggtttttaattgcaggagagatgcattccttcactaggtaaccttttgcacacagtgacctaagaataacatttgtttgtaactcgccattgtctacataaatgtcacatcttatctttgaggttttcaggttacaaagctactgttgctctcctgaagctgtgattaagattgtattttctttctttcctttcctcgattcctcccccaccttccttccctctcttcttcctttgtcacttcctcctttcttattattactgatacagaccctttcttaaagacacggggaagtctttgagagaagaggagcagcatagagttaagagtgggggagggtgtttagaaaaccatctaaaatcttgtccagggacacagtttggcaagtatcagagtaaaagctgccagctagtctaagtggctctgtagatcttgttttaatagctcaccatttcaaagcagaataaagtgacttggtggtttaagcagtggcagttttgcacacaatagcttgagtgaagaaaaactgagaatgaagcaatcagtcatttgggcattatggaaaatgggagactaaaagggctttgtatgtcagtgggtgtgtgtacatctttgcatggatagacttgataacagtatatttaaattgtgttgctcttttgtatatctattgcaattaatagacatgtatatttatttctagctagaattgaaaggaaaatgggtgggatatcagaaagattacagaattcaggtttaaattcaaacagtgctgtttatcacctgtgcagtaatagacaacatattctctcaaatttggtgtcctctcttgtaaaatggagaatatgccactttgcagtattgagcactctctgcaaaaatgtacataaggggattcaatgaaacctggttcgtaaaaatacacgttgtgtagaaaataattgataccagagtacagtattgagtacctgcttgagaaatactgttctgtaatttgattttctaaaataaaataaatgggtatatgtgtgggggggcccaaggacatggggtcatggtacaacttgtggaagcagtagggcctgtttacatagttgatgctggacctggaggatttacttgttctattgaagagtaaatatttagagttttagacaggccctgaaaccccaatcttttcagcattgtgccagtttagggagggaggatgcttttaagccttttcttctcaacagttaatgatgtgggttgtatactggggacctgtggaaaaccatttctaatggtggagtgttaaacaagtggggggccgctgtgtgccactgagagcctggcctctgctctggcttctgtgcctttggagagagacccccatccccaaagatggtctccctctgggtggagttttctctggaagctgcctttcagtgatatgcagatatctccacctacttcccctggtctagccccagtgatagttgtttattgcacgcagtctcaagggaaaattgattgggtatttgaccactggtaagggcacacatcaagtttggcatttatattgacttaagacctgggctgtgttttggccctgccacttgctagctactggtctaggggcaaattacttaacctctgcaagctcagttttcatgtgaaactcatagggttgctgtgaggattaaatgagataatatttgcattgtgtttagggcaatgcctagctcagtgaaatagtgattacttgttcttcaggtttattcacacacacaatcactttctgagtgtttgttgaaactcttattttcagaaatgggacttcactggccttacctttacatcatagacatttaccatagacctctttcctgcatagatccccattttccctagttagggctgtctgtgtacagagttttactttccctattctcttttcccttctctctctttttttcctctgaggaagatgttgattcttcttcttgtagctggcagaaaacacccctagcagcttagtgaggaatggggctttgtccacttcacactcatgtaatcactttgctgagggtgtacattaatatttagacagctcagaaacatttttcctaataagagcctcccagaaataggacagcctcaagacagacatttattgatttctttcagaattttaagcctagtggattatcttaatttgatccttaagaaaaaagaaattcagtctagtgacattgggatcacatttatgaaaatggaaacattcaaaattagctgaaaataatatatgtatgtattttttttctttaagagaaataaacctgcacccccaaattggaacttccattggtgtgaatgtgacgaacctaggctgactaaattaattcagaaggaatttgcacctgctttcaactataggcacttttccagctctgcatagtttaaatataatttgtaagtagttagccatgtaaataatttaacaaacctgctcatttcttaaggctttgttagagacatcttagggtgatgaaaggggacatttgtggtgggttgtctattaaatgaggaagtaaggcaaagatgaaaccacaatgctgtataacgacaaattaccaaaaattgcccctgttttaattcagtcatcatttagggtcatagactttctactgaaaatggaaattgaaacttagtgattcagagatctacaagtccactgtgggtcagacaacagtggtgtcctgaagtggggaatggtgggagtgatctgctttgggtacacgcagtaaggtgatgtattagctgtagagaattaaaaaaaattggttaaaagttagtcttttattggcaccatgtgaagccagttattaacacagaattgatagaagtgataaaatactcctccctaccagggtacactgttcctacccacccccacaactgcaataccactgtcagacactgtttcatggcacaggtgaccagaagaccacactttgagaaatactggcagagataaaaatactactccacctcccactttggatatgaagatacgcagcctaaagagatgaatgaagtgacttgtgctctgccactcactcaggtcctggcagagcctggctgacctggaaccctagcagtgccattatagagtaaccatttcatcctgatttgagattgtctcaggaaatgccatttcagggaaaattgaaacagctggtcactctacctgactgctcagcctattaaacccatcctgaggtcaggacagtaactcatgcctgtaatctcagcactttgggaggactgcttgagcctgggagtttgagaccaacctgagcaacctagtgagaccctgccaactctaccaaaaaaaaaaaaaaaaaaaaattagctgggcgtggtggtatgcacctggagccccagctaccccagaggctgagatgggaggatcgcttgagctcaggaggtccaggctgcaatgaactatgattgcaccataagaaatggcttctctgtctcgccctaagggtgacttagagtgtttgtgggaagaagcttccttggtgactgaggggtgttgcctgcccccactgtccctgtgccacatttcatggctttttaaaaaggtgattaaaaggctccccattaagtgtgggttggagcttctgagggcagaactgtgtctgtagatagccagggtcagttcctggtgtgctaattcatccttagcatgcctgtgttactgagaccataaacttttttgttttccttctgccttcacccagtgtgtgttaagtcttgcttgttaagctcccacacttaaatggctgcttgcagaattgcaaagggactagggagagaacaaaaacagatatgcaggtggtggttgttaaccagacaggatttctaaggagggttcaggcagtcaagtggttttgtgtatgtgttttatgttcatagttttgagttttacaatgtgtgaagcttacttttgctagcattaggtatagtttatttgaaagaatgaggctcctgaaataaacatgccagtaaactatatcttagagtttaatgagaacagtgctaggaaattccagctcctcccaaggctgcctcgctcagaggcaggcgttagctgtgggtctctaagctttaaacaggcttaccagtgtcaatacttgtgatgtccctgccccaggctgtccacacctggttagtgtcaagccatctaagattgggcagaaggcaagtaaaccaatttaggaccatggcttaccgcttatttgactgctgaatcctatttgcctagtgctttcacatcttcttaccttcccctctttgccagaacctactctgtcttaaaaatgtcctgggtaaaaggaatctcctcattgggaaggggatcccttttaccttttggccctgagccctggttaccagatggtctgttgttctcacatttcccagggtaataatgaatttggggcaaatccacttgcatatataataagagctttcacctcaacttttgctacactttcaatgttatttattacatactactttttagttttttggcatttaaaaactatgtaatagcataaaataaatgttctttctgttctcaaagataacgtcatggttttaggctgtttttctgatttctaaaaaggaaataaatttgagttatttggttccacaatttaaaacaactgtttattttttggtaagctgtttccccctttttcagagttaaagatgagacaaaaatactgcatttaaagcagaaccagacctgggtagccgctctctccgtcaatcgccattccacttgccagccaataactaattctttattcaggggtcaaatataaggaatttctttcctttcagattgtctaaagcttttctaaattgaatgcgcttagctgctagaaacttccaccttactttaaaagccaatctaagagtccggctgctgctctgaatgagaactgccaaagtaagtaaatagtatatgattatatattttgggtgttgagaagaggttacacttatctttgcaggtaaagttgaacatagtctttttgtttctgaggcccagttcgaatctgtggagagagggagagatgtagatgagagtgtgagtgcagacgctgattgacccatgtgtgcacaatgaaagggagcatagattcctgagttgggcttaaaattccatcttggagaaacgctgattcagtcaccattataccctagtgggtattagctctaaaccccagcactcaaacttgcttagcaaatgttcatatggcattgttagaaaaatgctatttttttctaaagcagactttttattctccctgtatagcattcatactgaaacacgcataaaagtataccttcttgtacagctcattgaattatcacagcaaagtgaatacaccatgtgttcattaatcagaacagagatcaaggatcagaacattactggtaccccagaagctttaaaaaccgtttgcagtatgaagaggaaaggcctaatttatgcagcaaaactcactattccacttaaggaatagtaggttccttatagaggacgacagaagctctggtacttgtcattaccaatagaaccttctttctttgtgttaagtctgtgctcatgcttagatatgtgtgtgtgtgtttatgtacaaaatctgattggtatttggccatcgaatttaataaagaaattactgaaaaaggaatgggaagaggatgtcagaatgtgagaaagtaagagaaaggccatagtcagaacatccattttcttttccaccttatttgattaatatactgttttataaggataggcgctagtaaagagacaaaaatacagtatctttacatctttttctttttaaaagataaacagattaaggatgttaaataggataggtgtataagtttgttgacaaactggatcttgttccttgaatatagatggtctcactcaatttgtcatttgagacaatggaaacaaaggtatccgatactttggatttgaaaaaaccagatattttgaacacaaaatattggtttgtgacattggaatactttgttttgcaaataatgtctttaaaacttgcagtgcttgcatttgaaacattatgctcaccttaaaaacgtatcttttcatctcaatttttcttatttaagctttttgttctgtctttggatctatcttttgttccttttatccttctcttcttcaggaatatcagttatacatatgttagatttcctttgtctgcctttcatgtctatcatcttgtctataatcattttaatattattagttttttccatgtggttttattaatttttttcacacctgcctaccatgtatcttttcactcatgtttgtttaagttttttcttttgttcttaatgtttctgtaatcttaaaaaaatttacccttttattgtgctgctatctctgtttgcatttttttcagttttataatcactttactaagtcctagtatctctacaaaaagggcacaacaacattcttccaaattattcatgtttaagatgattgttttttcaggctacttttaaatggaaattctgaattcttttcggttttcctagaaatgtaatgacacaatatataataaatcttagtgcattattgtgtcagcagtaaccgtttgttagtttctagggcattaattttaatttgtggattaaaaaatgtttcattatctaacattaatgctacaaaattgtgtttgaaatatttagaatatgatacctcttgatttaacagttattttaaaaattactaatgatatgtctatagtctcattaggaaactccccatacacgaaaaaaataaaaaaataaaaaaacacacagccagttctccattttcactgtttcttctatctcactttcttccctgatgtgtccagtattagtagttgatatacatgtccttttggacctttttcaatgatttgtctacatatgtatgtatatggaaagataaagtttgtttaaaacatgaatgatgccaggtgtggtggcacgcacctgtagtcccagctactcaagaggctgaggcaggaggactgtttgaggctaggagttgaaagctgcagtgagctatgattgcacctgtgaatctgtactccagcttgatcaacacagcaagatcatgtctctcaaaaaaacaaaagaaaatatgaatggtatattctgagtcttgctctgaaacttatttgtcttttttccacgtaaggccatgtcttggggattttccaatgttggtgaatgtagagccattttctttttaatgtgatggcacagcatcccgttatgtgggtgtttcctagttgatttaacggcttttccataaatgctataggaaacaatgcagtaacttcattcctatacagacttctttgcatttaggtgtttttgcatttaggtgtttttccctaaactgacataaagaagtagaattgctggatcagagaatgtgcagagttaaaattttgataaatgcattgaaaacctttcaagaaaaattataccaattgacatccctaccaacgcagtatgaggaaatgcattcctcgtgtcctcccaaccatgacttatcctgcagcaaatagaatgtaattttggtaaacttaatctataaagaaaacaactattttaacatgatgacttttccaaagaacagaaggttgggatgctggttaggaaggaaatttaataataccataacaagacattttgccactctttctttaaagaaatgggaatgataatcataaaatacagtgagaaattcaagtttatactttgaactttgcaacatctattgcaaacatttatttaacaaacatatttcacccttcccaactcattgccttagggttacttagctaacaggaatggtgagtgttgtgttatattcctttacaacaaataaaagtcaaccataagttaccttgaacaagaaatcagtaatgaagaatatctgtccttgtatggggcttcctaataatttattatcagaagaattaccttatgattaagctattctgatggtagaaacattttcattcagcatgtaaacaagcaacaagtaaccaagattcagcaacaactatgaactgagaactcaaaaagactttaaatctagaactacgttgttcttcagtacagttgattgcctgtcccaccctaccttttagtcatcatattatctcatcgtgcttgtctacttgggaaaagttatttttttataccaataggatggcatgtattaacattttttgacttttatgaaaatgttcaaatatagagaaaagctaaaaaaaagtgccacgaacactcatattcttgccaccagaattcaatgattattaacattttatcatattttttctgtagcatgcaaagtaaatcgcagctattatgacgcatcaccaatgagtagttgagcacggatctttaaaaagccatcctagactgtctctaagaataaagacattctaggatggctttttaaaagtaactttttgaaaagcaattttatatcgtgggatttattttttctcataaaaatgtacagcttcaaagtggtagagaacttactgcgtatggatttggtgaaatgacagggtagaatcaatgattaaatttaatggatgtataaacaataaggctagcagtaatagtttagtgaaaaaggagtgattatatataatatttttattggtattttatggaaattgtatccaagggtttgaattgggaaaccgttaagtttactagaagtagctagtttcttaataatatttcttggttttagaaaattgatataaagcacattggctcataggtcaggctgttaggcttagttacagcaggcaaactttctcaagattattggctcctgccccagtgtggtagtgtttgtgttctgtgggtcgtgtttggtcttgcaacatggtggcttcaaggcttagaatcagacatttgttaatgtcgaatacaactaccctctcacatgcaagtccgggctcactgtttttgttagctaggtaagcctaaggcactaagttggaaaaggttcaaatatatgacatatgtttatgaaataaatgatcacaatagatgaagggttcaaaattacaaactaaaataaacttgtgtattattactattgtttctctttctgaggtacagagaaagagttgcaaaagaggttagcctatcttctcaaaccagttgttggacagaacaaggaatggcagcttccagccagtacattaattatgctcctctctggcatcctcttttttttttttaatcacccttttatcaccttgctctgtgtaattctttgagaaggaagctaataaagaaaaaaaaatcaatgcatgcatattgtaaaaaagtatcaaacaataaaatagggtataccatgaaagataaaactctctcctcagagacaaccatttgcaactgccttctggaatattttctatgcatgttcaagtatatatgtcttagggttgtgtcttagggttctccagagaaaaccaataggatggatggatagatagatgatagatagataaatatgttagatagattagataggagatttattagaggaattggctcacatgatcttggtggctgagacgtcctgcaataggctgtctgtaagctggagtccctgcagcatcagtaccttggctcagtctaagtgaaaaggcctgagaacgtagtagggactgcttttgtaagtcctggagtcccaaggctggagagcctggggtcctgatgtccagaggcgggaggagaagagtgtgtgctagctccaggagagacaggaaatccttttcctctgttttttttctatccaagaccccaggcaattggatagtgtctgcccatattgagggcagatcttccccatttaatttgctcagagtcacatactaatctcctctggaaacacagtcatatacataccccaaaataatgctttaccagttctctaggtatgccttaatccagtgaagttgacacccaaaattaaccatcacaggttgctatgacaaaataccatagactggtggcgtaaacaacagaaatttatttttcatggttctggagacaagcctaagatcaaggcaccagcagatgcagtgtctggtgaggcacctcttcctggtttgcagaggctctttgtctttttttttgtatactcacatggtagagtgagggaggaaaggaatgagggagagacagagagagagagagagagagagagagagagagagagagagagagagtctcatagggcactaattccattcatggttggttccacccttgtaattgcttctcaaggccctacaccctagttccatcacactggggttgtaggcctcaacatgcaagtttggggggacataaacattcagtccatagccatgtgtctctacattttatttaacacaactatataagctcatttgcactttgtttttcacttactatatcttgaacatctttttatggaaatattgaaaagtcaacttttttctagtaaatggttgtgcagaatttttaacattttatatagcatataaaatgcatatatttatcataatttaaccactcccctatcagtgcttcttgagatcatttccaatcatatgctattaaaagcaatgtcacagtggcaacttttgtacgtctttctttctttccatgtgaattaccttaaatttctattagtgtgaagtggctgggtctgtttgaattttgatagatattggagaattgtccccttaggggattgtacgtgtttatatatttctgctcactgaaggaaagtttctaacagtatgattgaacttgcaaacgcttgccaattgactgtgtgaaaaatggtattattttaacttgcgctttttaaaagtgaagttaagcacatttttatatgttttaaagccacttgtatttagttttccacgaattaatgtttttgtcttttttgggagtgtttattgttttataaaggcttcctatgcaaaaagaaagaaatatgctctttttcatgtatactgagaatatttgcttatgtgctttgtcttttgacttcatgatatttttccctggctgaaggtttcaagttttatgtagtctgatcattcagggtttttttttttgtttgtttgctttgttttgttttttccttagagtactttctcttgaactagtcagtttccccagagaacagcttttctctagcctgcttgatggttataagcctgctgccactgttctgagagctgagcagtgagatgaagatttatcttaatcctgttttggtcactgtactcagtgtcccaaaagccaggtcctctgtgattcaaccttcccaggagtaaaccacccctctctgctggggctggggagagcagtcacctggtttcggggacccaatctggaggtgttcatgttccttgtacagactttggaccagtatcctgttccagctgaactttacaccctgacctccagaggtatctggtgcctacagttgtcaaacatttctggcattctctagtctaaagcctctctactcaaagtgtgaaccatagaccatcagcctctgccccatcaccagggagcttgttagaaatgcagcacttcaggctccaccccagatctgttgacttggaatctgggcatcaccaggtgattctcgtgcatgtgaaagtgtaagacatctttctttgatttccatccctggagacttttatcactggagctggttaggcttcagctatctccacttggcttaatcagttaccctggcccttctgtcttgggtgacatctcttatttgttatcatcatcattagtccttttagaattttaccctgtttaatttaatctttagtgacttaggtctcaagaggtcttggagataaaaacatttactttatttattatgtttaacaaaaattctctctgaatatttcattatgttttttgttaaatttttgagccatcttgaattaattttggtgtgagagatgagaacttcgttaattttggtgtcagaaatgggaactccagattttgttttcttcccccagttggctggcaaatagtcctaacatcatttactaaataatccatatttttttctctgatttgaagtgctacctcgatcatattctaaatttctaccatatgatgacaattttaattattgtaactttataatttatcttactagttagtactaatttctattcatttttagagacagagtttaaaactctgagttaaaataaatgacttctgtatttcccatttattttcatctgtatttttatttattccattttatgtttacttgttcaaaatgatagggtcattgacatattttcatttctaactagatttttaaatatagcaagtagatatgcatgtgtgtgtgtatatataatgtttaaattacagactttattttcttttttcacatatgacaaatttgaagccattcctaggagaatccatttctttctatcttttgggaagggcacaatgtaagtactgttaaatgcaatagaaagtttaatgcatgcttatggtatggcaggcaggttgagtgttgcgatcacttgtgcccaagcctgagatgttaaataccctttcttttttattttgttttgttttttgagacagagttttgctcttgttgcccaggctggagtgcaatggcgcgatctcggctcactgcaacctcctcctcctgtgtttaagtgattctcctgcctcagcctcctgagtagctgggattacaggcatgtgccaccacacccagctaattttgtattttcagtagagacggggtttctccatgttggtcaggctggtctcgaacttccgacctaaggtgatctgcccgcctcggtctcccaaagttctgagattacaggcatgagccacgaatcccggccttaataccttttctggtctttactagcgtgcctgtcctaagcaaaggtcttacatttgaattcttccaccaccatttgttagagctgtgatgctgggtaagctaaagaaccactctgatcctgtgaaatggtgatcattttttcctttcaaatagtgaggattggaattaaggcagtaaagtgcttaactggatccctggcccatagtaggtagcagcgactgggttttgcttctttaaacttgtgagagaaatggatatggatgagtctttgagtcctttaatcagcagggcactaagttgttcatctagatatgccagtggagtaaaagtatagggagtcttccccaatgtctttgccttagcatacgtaattgactttcagttgtccacacaaatggagaggagaaatggcagagtaaataacaatagataatgtgttaaacctttatatgtctttatatgtctaggaattaatctgacaaatacttttgcagaatataataataaaatttcatagctggaagagaactttgaaattataaaacctcttaatgttagagatgaaaaaaacagacctagagagttaatgactcatccaagatcatacagtggtgtgatcttagtggcagagctagcatcagaaacgcatatgttaattccaagttccgggttctttatttaccgtttaaggttatgtttgctttaagtgcatatctagagccactaatgtgtctgagaactggcatctgggacctcagcctagtgtaggaaaaagaacatatgagcttggaggaatagaaatgcttttgaacttctgctgagtttttttgaagccagatattagggtttgagccactaaatttagggtgaaaacctagaactggggaaagttatgtgaaatagagtagacatatatctaagtcagaataagagggaaatgttggaaccctcagacaagccagagtctgttgaggacataaattgtggatagaagtcttgagtagcatggggagtccatgttagaaagatagccgggaattaggggcacgcttctatcatgggctagaagtccaggcttactggtgctatgtagagaaagcatgcaggaaatgaaacatcactctgaaagttgctgggcaccaacctgggcttgactcgcagagaggcatctgcagaggatccttgaggagcttgtggtttgaaagagggacagttggccaggctggccgggcgcagtggctcacgcctgtaatcccaacactttgggaggctgaggtgggcggatcatgaagtcaggagatcgagaccatcctggctaacatggtgtaaccccgtctcaactaaaaatacaaaaaatttgtcaggcgtggtggctggcacctgtagtcccacctactctggaggctgaggcaggagaatgatgtgaacctggaggcggagcttgcagtgagctgagactgtgccactgcactccagcctgggcaacagagggagactccgtctcaaaaaaaaacggacagttacaggtcatcagccgcaagctgactttgcaactgagcaacttttttttgcctgtgctcagaaagtttctgatttcctggtcaagtcggatcatttgcagctgattggggcttctaggtgtaaacactgaatagagtgaataaagtaattgctgggtaattcctgacccgtcttcattagctccagatctgaagctggcctttagaatatcataaagctcttcaatgcccaatgtttcttttgactttagtattgagaaataaatgcttaatctgttatgtaagtaggaataacgttgaaatcatggcttagctgaaagaccagttgtttctcccaaatgtgggtttacttattgagctaagaaatcattcctatgtaaatatgaacatctattatcctcttgtgtcttgatgaatttgaaatagtaccagcatgaatacatttgatttaggagtagttttggtttagaagttatttccctttagaaaacagcaatttaagcttaggttgaatttttgaataacttcagaggaaatctttaaaaacatttttcaaagactttcaacagttctgttatggaacccttataaatccagtaaatatgaacaattttgatttgtagaatttgtagttagagcacaagtgctgaaataaattatggcatttaaacttgaatcatagtcttttagggaaaaaattaaatgaggttttaaatttggacttggatgaatcttgaatgatgatggttagtggaccttagaaactaaaataggttttcttgagtttatcttgatttaattgaaatgaatttaaatgcatgctaatttcccatttactagctggattaaaatcagttatggtggactagatcaatggacttggaagttcgtggaacaaagccactaaaagacaagtgagtgagtctgtgcagttgttgaagccattagctcttgtgggttgtgtagccatagaagctaaagtaacctctcaccatgtgcctctcacctagttcaggaatgttggcttcccagaaaatgcacagtacaagttgtgccttcagctttctcacacaatgaggcatattatgagtggtcttgcttctgttctgctgtagtgcataattcatgcaaaaaatttgatttcaactgcgtcagcttcaaagggctgcaatcaggcatctatctggaaggatttgctaagagaaaagtttctgttttccatttatacaactgggggactcacattatctttgattagtgcagtggcacggagctgaaggcagtttttcagtttgcaggcttatttttaagccttttgttttccttgaatttctagaagctctgcaggatgaaggctgtgtacatttgatagaattattgggtttatctttgtaagagctcatctctaaatcgaaataaaaactaagtgtctaatgattggaatagctgctaataaaatagccatctcttaagtactggtggtttaatctcttgtaaattccatcatagcccaaaagataatgagttcatgtctcttgcatgtgatagtctggacagtataaaaagtctgaaggcaggagtaaagagaaacagtaataggtttaaaaatgcccagttgataatggcagtagtgttttaatagctgtagtggtggtggtgtcagtatcaaagattatggttaacatttattgtagctgtgctactgccactcactattcttagagccttacatagactatctcatttaatcctcacataaagtctgtgaagtaggtactatttttacttctttttttatagatgtggagattaggctcatggaggtataataactcgtccacgattacatagctattttttttttttctgaagacgcttatagcactttgcttggagtgtagagtggaagctctgtgtgcttattggttgactcatcttggactggatactggttactggttactcaaaattccgagtttcagctttcttctgtgcaaaatgggaggttgagggagggccaatctctttctagagggagtctttgaattttttgtttttaaccgagaaaacagacttggttcagagttggcatcaaatatgtgtctttttcctgacttaaaggaagacttgaatgtcctgcccttgcatggtagggaagcagggatcaagagatgaaatacttaactagctgttctaatattatgagcacgaggagctccctggagccagacttcaccaaaaatttagtccagtcaactttgaatccctggggattgaagtaacgcttcatattctctcacagtggaatagaatgcaccttctttgtaaaaataaatgaataactaggcgtattggaacttaatgagaaaatatttatgaacatctcgaacagtggctcttaaatttcactgggcatcagagtcacctggagagctcatgagaccagaaggctgggtcccacctccagaatttctgaatcagtagatttggatttgaattgcatttttaacaagttccctggttatgctgatgttgctagtccagggaccacactttgagaactactggtatagaatatctctgtgtattcaaaatattgtaccagtatgttcaaagctaaaaggtagactgtgcttattaaaagcacaatcaagaggaagttctacatgtcactgaatacaacaaaaatgctgttgtttttagtacctatttttttctttttctttttcttttttctgtttttttttttttttttttttttttttttttgagacggagcttcactcctgttgcccaggctaaaggacaatggcgtgatctcagcttaccacagcctccacctcccgggttcaagtaattctcctgcctcagcctcccgagtagctgggattataggcattcacctccatgcccggctaattttgtatttttagtagagacggggtttctccatgttggtcaggctggtctcgaactcccgacctcaggtgatccacttgccttggcctcccaaagtgttgggattacaggcgttgagccactgtgcttcgctttgttttttttttccaaatcttgaggagggaagaaagtaactgtctactgtaaccacactggtaaggtgacatgtaccttcatagacacataatcattaagtgtcctgaactgagtgctcttcctgtttaacagctggaaatgctgaactgcttgttgatggtgttttgtagggagaatttatgctcacttgtgttttaacgtaagtatgtatgggtttttttcccttcagattagaacaggggctttagtgtctttttcattccaaatttttctcattagaggcatttagcatttaagtcctgatatgttggtattttcagccttgtgaatactcattggaagctgccctgggtccagctttaaggggatgtgaagagggctgtttccacaggtaaatccctggggactgaaataacgcttcatattctctcatagtggaacagaatgtaccttctttatgaaaataaacaaatgaataactaggcatattggaagttaatgagaaaagaaggcatagaaaatgtaggcaggctctcattaggtggttttctatttcagctgtttgcctcataatacagttcaggcttatgaaattggagaaaatgaaaatgtcctttggtgccatttaaaaatcttgacccttaagtaagatacaaaaacacaaaaggtgacacactgccttgcttttttttttttttaagaagagttaatagattattgttttaatcagttgtaggtttacaggaacatgaatggcaagtacagagtttccacattactcccctacactcacattttcttttttattaacatcttttattagtgtacttttgttgcagttgatgagccaaatggatacattattattaactaaagttcatagtttacataagtattcactctttgtgttgtacgttccatgagttttgcaaatgtatagtgaggtatatccatcattacactatcagaatagttctactgccctaaaaaccttctgttctccatctatttatccctttatgcctccccccacactgaacttttggaactactgatctttttaccatatctatggttttgtcttttccagaatttcatttagttggaatcatacagtgtgtaaccttttcagatttccttctttcactttagcaatatgcatttaaggttctcccatgttttttcatccattgataattcattttgtatggctgagtaatattccaccttatagataaacaagtcacagtttattcacctattaaaggacgtcttggttgtgtccaagttttggcaattatgaatgaagctgctataaatgtttgtgtgtaggtttttgtgaacataagttttcaaaccatttgggttaatacctagcatgatttggcaatcatgcagcttgattgccagatcatataataagagtatgtttagtctcatcagaaactgcaaaactgttttccaaactggttgtaccattttgtatttccaccaacagtgcatgagtttccattgcttgtcattgtcaccagcattttttgttttagtattttagatcttagcttattaggtgtgctgtggtatcttatcaatttaatttgcattttcttaatgacatatgatattgaacatcttttcatatgcttaccatttgtatgtcctttttggcaaggtgtctgtttagattttttgcccattctttctttaactaggttgttttcttattattaagagttctttgcatattttggataccaggtagtcttttatcaggtacttgttttgcaaagattttctctcttgtccttttattctcttttgcataacaaaggttttaaattttaatgaagatcagcttactgatttttttctttcttggattatgcttttggtcttgtatattttaaatagtcaaagccaaactcaggatcatgtagattttctgttatcttccaggagttttatagtttttgcattctatgtttggatctgtgatccattttgagctgatttttgttaaaggtgtctagatttggttttgttttttttttttttgcctatggctgtttaattgttccggaaccatttgttgaaaagacaatcgtttttccacggaattgcctttgctctttggtcaaagatcagttgactgtatttgtgtgggtctgtttctagactctatactgccttactttttaactgcaaatttgtagtacttgctttgggttcctcctgtgttgatcctccttatcttaataatataggtcagtgcttatacccatgactactgaaggtttcttcttgtttgtgtagttagcatttcactcctccaaacattccttgtgacacagtgaaaggaaggaccagcatttcacatctccttgtccttatccacttattcattgctagctttcaccgctaatgtcaaacctattttagtaaatgaatttaataaattccatatagtccacttaatgatttttttttcagtgtgacttccaggaatgaactgcatcataaaggtgaggggtgctatattgataaagcactttttgtctgtctgttgcctcatttataaaatagaaataatattcctcttacctgcagcagaatgattttgtttttgtttttaaatcacatcacaaaatgtatgttaaaacacacaaggtgaggaagggtattgatgatccacttgtactgcagggtgcagttcttttctatgtcttcattttattctttctccttatttatctattcctatagttttaactataactgcagttttcattgaagactctgatccatgggtcttagacaactgatgaatttccattgtagaattttccttcccttgcttaatctccttgtctctctcctctactattttaaagaaatgactggcagagaggtggagtgcctccaaggctgcaatttcatagagagaatatttgggtcaaaatattaattggaaggacatctgtcaggtataacccccaaaacattattttcatcaaggtgtaagactcagtgatccatttaatgctattgctaatctttataagtctcatacaattataagaggcttatctgtatactgtataaccttatgcttactttaggcttgcttacccaaaatctacatttagttgcttctgaaaatatatttttttcttaagctacttttatgtgttttccttagtattctctaaaccacataagctattacttttgattttttaattttaatttttattaagagacaggatctcattctgtcacctaggctggagcacaatcatagctcagccaatcatcctgccttaaactcctgggttcaaccagtcctcctgcctcagcctccaggtagctgggcgacgtgtgtgccatgacatccagttaatttttaaatttttttttgtagagacagggtgttgccatgttgcccaggttggtcttgaactcctggcctcaagtgatcttcccaccttggcctcccaaagtactgggattacaggcattaaccactgccctggcccagttgtaactgttagtgaggatgccatgccattcctaaagcttatacaatcctgtgtatataggaatttagcacctttgtcaaacatgcagtgttttagatctatttgctatattttgcttttgtttttaaaataactgttgcattatattgtcttagatggtaagttcataaagtgaagggatatgttgatatattttataaattgttgatgaacacagcttaatactctggtaatgtttttctgagtaaagaaggaatagccactatgtataaatatgttagcatagaggaatgaaaaattgggaaaaacaagaataggattttggatgaaattaatatagccaatctatatattaatgtattaatagatttattttgattattatatgacgtagtttcttcatcctttacttttaatctgtgtaggacttgtatttaaaatgggtttcttgtaggcagcatatagttggttcttgtaattttgaaaaatcttttttcatgggtgtgtttagatcatttttgtttaatatagttagtgacatgattggatttagacacaccattttgttatttgttttccgtgtattccctcagttatttgtttcttccccctttttctgtcttttgggttatttgaatctttttagcattccctcttaatattccatattagctattttgctatctttaaaaaaatttttttttggtgaatgctctgggagttataatataatacaccaaaactttcacactctactcaagagttaatgttatattctttaagtaaaatgtagactctttatgatagagtttcctttatccttccccacttacctgtaggttataatcatgatgtatattacatctacatacattgaaaccccaccagtgttacacattttgctttcagcaatcatataaattttaaagaacttaagggaaagtagtcttctatatttaccgagatatt

SEQ ID NO: 841 - DNA, 32744 bp, Homo sapiens; identical to SEQ ID NO: 649
  source 1..32744: mol_type = other DNA

SEQ ID NO: 842 - DNA, 19985 bp, Homo sapiens; identical to SEQ ID NO: 651
  source 1..19985: mol_type = other DNA

SEQ ID NO: 843 - DNA, 32744 bp, Homo sapiens; identical to SEQ ID NO: 650
  source 1..32744: mol_type = other DNA

SEQ ID NO: 844 - DNA, 29839 bp, Homo sapiens; identical to SEQ ID NO: 638
  source 1..29839: mol_type = other DNA

SEQ ID NO: 845 - DNA, 32744 bp, Homo sapiens; identical to SEQ ID NO: 639
  source 1..32744: mol_type = other DNA

SEQ ID NO: 846 - DNA, 16038 bp, Homo sapiens; identical to SEQ ID NO: 640
  source 1..16038: mol_type = other DNA

SEQ ID NO: 847 - DNA, 32744 bp, Homo sapiens; identical to SEQ ID NO: 641
  source 1..32744: mol_type = other DNA

SEQ ID NO: 848 - DNA, 32744 bp, Homo sapiens; identical to SEQ ID NO: 643
  source 1..32744: mol_type = other DNA

SEQ ID NO: 849 - DNA, 32744 bp, Homo sapiens; identical to SEQ ID NO: 642
  source 1..32744: mol_type = other DNA

SEQ ID NO: 850 - DNA, 32744 bp, Homo sapiens; identical to SEQ ID NO: 644
  source 1..32744: mol_type = other DNA

SEQ ID NO: 851 - DNA, 5327 bp, Homo sapiens; identical to SEQ ID NO: 635
  source 1..5327: mol_type = other DNA

SEQ ID NO: 852 - DNA, 28106 bp, Homo sapiens
  source 1..28106: mol_type = other DNA
agaataaacttaccatttatataaaagggctactggactgatacacagctgaaaaccctcagttctggactgaactcccagcaggtaaacatttattcattaatataatacatttcaagtcatagtttataattgcagaaagggatgggaaaaatagagaagagatgaaatccaaccttatacagaacgaatacattgtaattaggtttcaaggaaagatatattttgttttgtttcttggcgtgtttttgtttggggtttttttaactcctaaattttgatatgaggaaaatttttactcttaaattttgatgtgaggaaaataagtattaccaagtataaatttgtttgcattgtgatatgggcacaactagagcaacctctctgaacaaaaatcctaacatatgaaaaataattactagcattggattccaagtgcttaaaaaaatgtatttcctcattaacaaatgcccaccattatattgtaaatattgtattacattacaaaaacagagatcttatgttttattgcttataagacttaaaagtctcccaggagagtgtcatgctttcattgttatgataaatattaatgaataaaatattttagatgcttgctctgtgcttataaacactcaaatgcccccaaagaaacttcagtttctaaaacttacatgagcataattctttttcttgacaaatactttcaaacagtgagtctattggttataatttggttaaaggagttaccaacctttaacttccaattccagaacatactgattatggacagtactaatcaagtggtaaggatatgacattctgctcttgtagctttcagagttaatcgtcattatgactctctaacatgttacaaaaatgtgtagaaaatattttctgcatcaatgagaatttctgctctaccttgtggcattaaaaaaatttctatttaatgaaagatccttatgaaatgaatcactgtttactgaaagggtattgtcaaatgtagattaattgtagtgtcctctctgcatgaacccatgggggaatgtctctgattttagtttgtcaccctgagtaatttgtgagttgcatgagtatagtctagaagggtaagttgaagccaattaagtagaggttttgctattaagaagctggaggccaggcagggtggctcacacctgtaatcccagcactttggggggccaaggcaggtggatcacatgaggtcaggagtttgagatcagcctagccaacatggtgaaaccccccatctctactaaaaatataaaaaaaactagccaggcgttggtggtgtgtatcgcgggagctggccagcagcccgcaatgcaacggggctctctctttgttcctaggtggattggcaggtcgagaaataagagactcacacaagatagtgaaagcaggtcccgcggtgccgccaatgcactgactataccagcatttattattaagtttagtgagggcagcggtaggttagtgagggatttagggtcatttgattatgaggtgagatggtcacatggggatgaagtaattctttaacataatatctgtatgcagaagtacagtatacagagataagaatttacaatatagtgtgtgcatcagtaatttctaacagagccttaaaacagaaacacagtctttccataacctatgattagcaggatattaatcagcagtaacagttgcagcaaaagctggttacaaacaatccatagaaacaggatgtgaagctagacaactagttagaccagaaatcctcagaaggaaatatgtcttaaccctaaagaggcctagaagagctgtggcaagatgagcgtgttatagccctatcttatccatatggacaggcacccctcattcgtccatttataggctatccacaagggtcgcattccattcccagagctatgaacatctgcttttctgggataggaatcttggtgatgtgaaacctccctgaatgcacatccattcataggctgtctgcagggggaagcacatcacgtgctattggttcattctggcagtccaacctggcattgtctttacacaatcctgcatgcaattttgtatttacaataatcaggagcatttcatcttttactccatagcaatagtttcagggggtctccctacatctcctccttttctctgatttaaatgaaccatagcaatcatagcttggcactgatcatgattggattgaagaatattttttccaattttgtatatgaacaataaaccaatagcacaaattatacatagaacaaaattaacaatagtggatcctcccaaggattttacccattgaatggggttgagattagataacccctcagatacaccgtctaaaacttcagcactgggtaaagcagttaagtgtgcttgacaggcctcaaaaatctgtgcttttagcttgcttatgtctaaacttaaattatcttcacttccttgtaaatggcattttactgattcccaattgtgaacagactcattacattgaaacggatttatagaaaatcagaagtattccaatcacattgcatttgaaatctatgttctaaacttataattcttataattctatctcccatccagataacagtttgtcaggttattaatttgattggccaatttttgatcaatacctgactgagaattccacatccaagtagaatctttttgccatttatccacaaaatgaacagtttgaatagattgatgtaatgcaactccagcagtagcagcagtcacagtaacagcaatcaaaccattattactgcaattaatgtaaaaataaataatttactccttttaataattttctgtagaatattattaataacatggatagaaggggaagattcccaaggcctatgtaaggctacgggaagccaaataccttctctggctctgactactaaaatactatgatattgattaaaggatgagtcaatccaagcatacaagtaacaactaacacatgtaattatgttggtttttgaactaatatgcatctttcctactaataacatatatggtggtttaacacaacttttaagtggtatagttttattggactccatatagatagtatatttattttgggatggtactctttttgtgaatgcatggtggggggaataggttgtatgagaggtggtgtggggacattagcaaagggggggatataagtcctcatcatctttactgtcccatctttgaattgaccttttgacgattgccatagtgatatttttggctgtgtgaaaatagtagtgtaaatcaatctgttgtcttagttttcgaggtgacaaggtggatttacttataacactttctccagcccaaactctcataccagtcatatctatggttaatctccataattctgaatgttcaggtcctaagtggggaacaatgagccttggctttggaggggcaacccctgcccctttccacttaaaaggaaaaaaggagttaaatatatgatataataggggagggttgtcactacttttttgataagtaatatcatagagaaagtgttgacaatctctgtgaccttgagagcaatcattagtaatatgacctttaggagcccaatcaacaatggtatagtgagaagaattaaataacacactccttctgaactaacacaatccttccacattaatttgtcagcatttgaagacaagttgataggacacacaggtcctaaaggcttatattgggatgtgtgaatataatcagagattcatgttttgatctgtcttagaggttttaatgagatccctgataccaagtgtcctaaagagtgaccagatggtagtgtgactgcccaaatttgaatatctaatgagagacatccatttgtgggtcccaggcacaaaggtggatacctaaaacctaaagtgatattgaaaggagttccttcttctgaaggttgggcaggacaacgatcgtctacagaaccaggcatccaaatactatcattaacatagacctcgataggagcgtccatccacgtcatggctcgaataagaagaagaaaaggaatataggcccaatattcgtagtttttaacagtctgtggggtgacagagggtaaaaggatcagtgtaatcaggaggaggcagaggttgagccagacctggatcgctggaggcaagttgttcaggatggctgactggattgtctgttgtaaaggagttagcatggttattttttttcttttctttttttctttttctttttttttttttgacggttggatgtgttagttgttttttgctgtggtgttttttcagcaaatttctctgtctcattgttgcatgcatcttcaggacaaaatttcaggtgtctagcaggaatccaaacaggagattgatattcacctggggaaacacaagcatagcctctaccccacgttaaaatagagccttttgaccgtatattagattgaacatctttccaccatacttcccttccttggtttactgtgggacagttaccagagaaatgtttttcggcagcagtaacagaactagatttaggaatattaagaaaatttaatgtgagcaatgcaaagtttaattgtatgtgaggggtagacaactccttatccccctgtttttgtttaagtaattgtaattttaaggttctgttacttttttctacaataccttggccttgtgggttataaggaatatgagtaatatgtttaatatgccactgatgaaaaaaatttttaatagctttactgcaataggctggatcattgtctgttttgcgctcactaagaattcccataaccgcaaaacatgaaaacatatgttttttaacatgagaagtggcttctccagtttgacaggtagcccagatgaaattggaaaaggtgtcaactgtgaaatgcacataagctaattttctaaaagaaggaacatgagtaacatccatttgccaaatagcattaggagaaaggcctcggggattaactccgagagattgtgtggttaagacaagaacctgacatcgagaacagtgttgtacaatttgtttagcttttttccaactgagagaatatttatgtttaagacctgaggcattagtatgagtgagttgatgaaattgttctgcatctataatggctagagaaactagagtatcaactttatgattaccactggataaaggtccaggtacgttagtatgagaacgaatgtgagtgatgaaaaaagggtggtttcagtttctgacagttttttgtaacaaagagaacaaggaaaatagattagtgtcagtaatatttttgatggtagctgtttctattgccttagtggcatggactacataagctgagtcagagacaatattaagaggctgactaaaatcctgtaatgcagagataacagcaaacaactcggctttttgagcagaagtgtatggagtagaaatgactttatcttttggtcctacataacctgcctttccattactggatccatcagtaaaaatggtaacggctgcctctcatcatgatgaatgagtaagttctggtagaatccaggaagtatttcctagaaattgaaagaattttgacttaggcaaatgattatcaatagtgccaacgaagtcagccagattagtctgccagcacaaagatgtagaaaaggcattttaaacttcattttttgacaaagggaccacaataatgtttggatcaaagccagaaattttagtgacacactgacatcctaacccaatcaaagtggccatttgatcaagatatattgaaagagtcttagaggctgaattaggaagaaatacccattcaactagagaattattttgtactataagtcccgtaggagagtggatggaaggaaaaactaaaaattgtaaaggcaaatttgggtcaatacgagagacttgtgcctctctcactcgttgttctacaaaagacaactcttgttttgctggttcagttagagaacgaggactgtttagatctgtatttcctgataaagtagcaaatagatgagataatgcataagcagggatgcctatggttggtctgagataattgatgtcacctagtaatttttgaaaatcatttaaggtgtttaaattgtcagtacaaagttggacttttgggggcttaatggagtgagcttctagctgcattcctaagtacagaaaaggagtggcttgttgaattttatcaggagcaatgtggagtcctgcattggcaacagctaattttaaagaggtaaaacattgaattaattcatctttagtgggggcagcaattagtatatcaaccatataatgaagaatgtaattatttttaaaagtctgtcagataggttgtaacacagtaccgacaaacaactgacaaatagtaggactctttatcattccttgaggtaaaactttccattgatatctagctgcaggagctgaattgttgatggaaggtatagtgaaagcaaatttttcacagtctgacttgtcaaaaggaatatgaaaaaagcagtctttaaggtcaatgataattaaaggccattccttagcaatcatggagggggagggcataccagattgtaatgcccccataggtttaataactgcattaacagctcttaaatctgttaccatcctccattttcctgacttttttttgtacaacaaacacaggcgagttccatggagacaaggacggctcaatagtgtttgcttgtagtaaatcattaacaatttaaattaaagcctccaatttgtgtttggaaagtggccactgctctacccaaacaggtgactcacacatctattgtgaaggggcaggggaaaagaaggagagtgagggcaccaggacgtggactgggggaaaacaggattctaagcctctgaaagaaggggtcccggagtgttgaaagaaacagtaggcttagaataggggagaggtccaaaaggatgatgggaatgagaaacatgccattcagatgaatgccacacatcctcctctggcagagggggcaacggcttagtagaagaagagttaacatatacaggttccaagataggaggcagagggtggggatcatcatcaggttccttctcttgggaagaaaccaaggagagatcaaattctccctcatcatcagaaggaggactagtaggggggtcagctacccaaggtaaagggagcagttcatcatccacgttaacttgtggcagttgaagaggatcaccagatggaaaaggaagtaaagcaacatgaataagagcccagtcagtccaaacagaaataggaagtaaaacaccatctctcatgagctggtggagagtggcaccaactctatcccagtctaacaggtccatagaatctttgtcagggaaccaaggacaatatttttcaatagtctgaaataaaagaataaggttagtggaatcagccttgattccaccctgtttaagaagaagtttaataaaagacagataagcctggtgtttagactgtgattgtcgcataatagccctggaataatactcatcgacaaacctgaaaagaggggagagttggaaaagcatacccagggaccttactgtcaagactgaagaccagtcgtcatgaacctgcattcggagtgcactgagccgaggaacaaagaaggccaccttgggcgccagatattgagggatctagctagcagcctgcaatgcaatgggactctctctttgttcccagacagatcggcaggttgaaaaattaaatagacacacacaagatagtgaaagctgagtccaggggggtcaccaccttctggtcctgcagtgccaccaatgcactgaatataccagcatttcttattaagtttagtgagggcgggggtaggttagtgaggaatttagggtcatttgattatgaggtgagatggtcacatggggatgaagtaattctttaacataatatctgtatgcagaagtacagtatacagagataagaatttacaatatagcgtgtgcatcagtaatttctaacagagctttaaaacagaaacacagggaggctgaggcgggtggatcgcaaggtcaggagatcaagaccatcctggctaacatggtgaaaccccgtctctactaaaaatttaaaaaattagccgggtgtggtggcgggcgcctgtagtcccagctactcgggaggctgaggcaggagaatggcgtgaacccgggaggcagagcttgcactgagccgagatcgcaccactgcattccagcctgggcgacacagtgagactccctctcaaacaacaataacaacaacaacaacaacaacaaaaaccagaaacacagtctttccataacctatgattagcaagatattaatcagcagtaacagttgaagcaaaagctggttacaaacaatccatagaaacaggatgtgaagctagacaactggttagaccagaaatcttcagaagggagtatgccttaaccctaaagaggcctagaagagctgtgcaagatgagggcattacagccctatcttatccatatggacaggtgcccctcatgcatccgtttataggctctccacaacggtcgcattcctttcccagagctatgaatatctgcttttctgggataggaatcttggtgacgtgaaacctccctgaatgcatgtcccttcataggctctctgcaggggaagcacatcacgtgctgttggctcattctggcagtccaacctggcattgtctttacacaatcctgcatgcaattttgtatttacaataatcaggagcatttcatcttttgttccatagcaatagtttcagggggtctgcctacaggtgtgtgcttgtaatcccagctactcaggaggctgagacaggagaattgcttgaacctgggaggtggaggttgcagtgagccaagatcatgccactgcactccaacctgggcaacagagcgagactgtgtcaaaaataataataataataaattaataataaataaaaataagctagagtattggactttagagatggcataagtgaaaaacaagtaaatgttagaagaaagagtgtaaggaggataattttctgggcaaactgaatcatgaaactaatcatatttgtttctctttatgttagaaagtttagtgtcaaaagtggactctcacctgctgcaagtacaattgattctcattgtggtagttattttcaataaaataccagacactgacttagtcaatactgaaacattgttccaagtagaaatacagttaggttcctgtcagcctctggttatggtattttcatcagcaggtcaatagtaaccttgttttatatgtgttttgttgaaagacacattaatatatattgttgattcaagagcattgtaactcatgtccaaacgaaacttacctaacacgtgtatttcctccattattcacatcacagcatttttgcacttagaaacaccagtacaaccaataagtgctatgcttttggtccatttttaaacagcaaaatcaacacaaagcacaaaaacttgaaaaacttagcactaaacagaccatgaaaagggcacttgtttacaatatgagaacaaacaagaagacagagcattccctgttcaaccttagctggaaacatgtgagttaggaaacccagttctttttgctgctctatgcatgactgcaaatgactgtaaaagtgccacgagtattgaattgggaattacaaataaattttagcaagcaggtaaattttcaaatatgaaattcatgattaaggatgatcaattgtatacataggattatgttccatgctccatactttgcatattaacctcacttttgactccatattactttgtccctctatttctcctttgccaaattttaatttaaacttaattatttttcttgatatattttacgtattttctttctctttctttctttctttctttctttctttctttctttctttctttctttctttctctttctttccttccttcctttatttcatttatttatttatttatttttttgacggagttttgcacttgttgcccaggctggagtgcaatggcatgatcttggctcaccacaacctcgcaacctccgcctcccaggttcaagcgattctcctacctcagcctccctagtagctgggattacaggcatgtgccaccacacctggctaattttgtatttttagtagagacagggtttctccatgttggtcaggctggtctcgaactcctgacctcaggtgatccacccgcctcggccttccaaagtgctgggattacaggcatgagacaccacgcccagcctaagtattttcataaatggctttagatccttcagggaacaaaccaggtaataaaggagcaaattatcaacaaatgttctaattcgtactcttttcatttgctacttcagtattcaggcataaaaagatctctagacatcaaacctaattaagaggttcacattccactgccctttgaaataattttgtttcgttttctatcaggatatattgaattcgaataaataaatgtatttcaaataagtatctattacaaagttaaaattgtatttagagatgacacaaatgagtgaaaagttaagcagatgaaaaagtgaagagatgatggctgtacttctttctttgccatcctgaagtctggaaactagatcttttcaaagtttctaatattggtccagactgggattcaaaagcctcttaatgttcgggtgctgccctggcccctgcaatctcttctgactcctgcagagagcacagacacctcaagtgtaccactcagtgaactagagcccacagggcttgatcatatgctttccagaggttcaggctcacataaacctcatgatagaattttacaggagattttaggtagattacaattgaatattcagggtatcttgtaatcacaggggtatgccacatagagaaattgagtagaattttctttacctggaaaatacgttgtaaaggaataatcccagctctccaccacaaccccagaggcaccatgttctcctgtctagctgagttctctttgccatcctagtgcctgtctgccagatgtaagttgataagctctgctacattgaatgtaggaaatattttttttctttaattcagtccatccctgattggaatgccagaaaaagttttcttgggaacaaagcaggcgaggtgaagcccccaaatctaaaaaaaatctaattgcatgagaacagatgactttgcatacattacatttaggcccttcttttttctttaattttatcaggctaaaatgagtgtcagcctttgaccacttctgattcttcatcttcaatctaggtatttctctccagtttttcctcataacgacccgacccactcaagtctttctctagtctttgccccacattgtgaaaaagatgttttccaacttagctcgaggttcttaccctgagcttcatattttccattcatcaactatttagaatgtccctactgtgtgccaggtcctttggcaggtgctgtggatacagtggagcacaaagaaggcatcggtcctaccttcatacagcttataggttactcaggatggatttagatcaaataaaacacaaataaatacaaaattacaactgttatacatgctctgaagacagagtttagagtacaatcaatgtatataatagacttaaccaaggatagatactcacatctgtttgggattaggtcattaacacttcccatgtattctccggtttacccatcccagtgcctccccatcttcccttttccctcttcagggggagcaatggcagtcagaattatacccaatgaaaatagaattacaagaaaactcctaaatagatccaaatattaacaggcaaaaattaaatgcctaccttcaagtttctaattaggtgtggagttgcaagagctctggaaaagatgttggtgctaaactgttctaccaaattactgatactggagaaaatgttgaagagttgctttcctgaatcactcaaggtaccataaaattaataattttattttatttctttattgtgttaatctgtaaaataatgtcaaacttgtggctattttcctttttttctgataataagactctctaggagcacttgttaaacatacagcttcccagctccctcctgctagagacagattgaatagactgtggataaggcccagggaattacacttttctttttttttttttctttcttttttttttttttttaactttaagttctgggatgcatgtgctgaatgtgcagatttgttacataagtatacatgtgccatggtggtttgctgcacctatcaacccatcatctaggttttaagccctacatgcattaggtatttgtcctaatgctctccctcccctttcctctcaccccctggaaactacacttttcatagtcacctggatgactcctaaggaaatttaggtaatttctagattatttctaaataaatttgagttctaaagtattttaaatagcagaagggtatggactaggtggcactgcagttaagaacataatctagttaaaataataaaactgaggtttagatcttgttataaatgcagtgaaattgcctttaagagctgaatttcttgagcaaggagactgccctatgcctggttttcaaatgtgagtggcatgcaaatcacccatgagatacataacaaataagaatttgtgaacacagagacttgcatttttaccaaagaccctatttaatccttatgtacattaaaatttgaacaaaagtgatctagaaggagtcctctaatgcactatactgtgtgaattaaatctggccatcttgccttattgatcatgcttaaactgtatgtggtaacgaaaatatgaataagaatttggaatcatttggctaaaaaataaaatgtaccaaattgacaatccaacccaaattttcccaagatcaatgctgacactgaagtgaattaatggaatgaaatggtaggctactttgctttaataatatgtccaaataattatttttccagagataatgaaaaaaatttcagtgacctttacaggataataaaaggtgttagagaattaaaatattaaagaaaatacagtttcatttatttaaacttcctccattttttggagtttttggctatggattttgtaacctcagcttagtttttaagtgattaaatatccttccaaagttccttcataagttctcatctcattcccccagcacattgatatccttctagccacaccccctcaactcaacattcaccctttgaataaatagctattggaagagtttgtatttaaccagtgtcaaatatttcagttggttccaaatcctatacaaataagttatgttttttctttctgaatctgaatattgaaagggtttttgccttttaagatgctgagcattccaatcatatttaggttacattcttgagtaagaatgtatagtttcctcatgtgaaacttattaataaacattactctgtatatgcaagatgagcagccacataatttaatgattaacagaacaaacatgacccttccaggttactttagatcttgaattttcactaagggtgatccatgttacacaataatataagccgaacccaatttggaaagactccttctatgaggatatgtgaatgaggtccagattgggtaatatagaagaaagttgtacaattctaggcattgaagaaaatgagtgatttagattacaatagtgataaagtcaggtgcagtagcaagcttgtagtcccatctactcggaaagcagaggcagtaggttcatttgagcccaggagttcaaggccagcaaggtcccctttctttaaaaaagttgtttttaattaaacaaaaaagtgataagggaggtaaatgtaggttccaatgtccttataaacaaaacaaagcaaaacaaagtccattgaaatctaacacatgctagctacaaagtgcacacaatttaattatgaaatttaattaatgaattttcataaagcaaatgcctacataacatccactactacagagaaagaaaattacttttgacgtcactccttcccacctgcaatgcccctttccaaccgctacctctccctgttccctaaaagtgaccactatcctgacttccaaagccataatttagttgtgcctgttttgaatgtaacataaattggatcacacagtaagtatctttttcgtatctaacttcttttgctcaacattatgtttgtgaaattaatttcattgctgttttgtaatctacagtaccaatgtgcgacaatgtacttattcatttcactgttgatgaacatgaatggtggtaaaaaggattcctatagttcagcagtctttgttaccaccaactttgtccagcttctacaagcatacatgtgacatatgcaagctattttgtaggacagtcatctttcttagtagataaaaatatgtggctgcatatggtggctcatgcctgtaatttcaatactttggaaggccaaggtgggaggatcacttgaacccaggagttcgagacctgcctgggcaacataatgagaccgcatctctacaaaaaaaatttttttaattatccaggtgtggtggtgcttgccttagttccagctactcaggaggctggggtgggagaattgtttgaacccaggaggcggaggttgcagtgagcagagatagcgccactgaactccagcctgggtgacagagcgagactgaggagttcaaggctgcagtgatctgtgattgccccataacactccagcctggatgacagagtgagatactgtcgcaaaataataataataataaaagaagggcaaactttaaagaaagaaaataaaaaatgtgaaaggccacagaaagaattataatattattccagtttggttgagtcaccaagcattcaatcatctatgtcaggctccgtggacataataatgaatgagacatcattatagccctcagggaatgcttatagagccttgctccatcaaatctaaagtacagtttttgtttgtttgtttgttttaatttgagttggtgtcaccctctaatgatgtctaattgtaatttagggttgaagaagtagtcgcatttcacaggttattttcaagtagtatactgggcttgaaaagaagctgagcatcaaaattatttgcagaaatttttaaatatgcatgaaccctaagagcatatgttatcctgattcattcagcaagtatttactgctgacctatgtgccaagtacccacctagtaagcctatgaatttggtacctctcactgctatcctataaaaaactaggtttggaaagagtttttataggatttcatagactttttacaagttttcaagtgcactgataaaataatagaaaaattaatatacgtgtctattatgtgtctgaatgtatgtatatatatatttataatttcccctcttgtggacatgattacacagtagaacaagaggtaaagacgataatatgtgagtgaaacagctaatagtatgattggcttgtctctgggttatctgactcaggtttacggagcggtgatgaacataaatcgtgggaacccctttcaaaaggaagtggtgttggattcatggccggatttcaaagctgttatcacccgacgacaaagagaggtacagttttgaaaggtaaaaagtttaaaaataataagaattggaaagaaaaagtaggtaatggtattttataatcatagtagccatttacattagcttacaacactgtttcaccattcatttcttttctttctttctttcccttctttccttccctccctccctccctcccctccctctctccctccctctctctctctctctcattctgtcacccagactagagtgcagtggcatgatctcagctcattgtaatctccacttcccaggttgaaccgattctcctgcctccgcctcctgagtagttgggattataggcacccaccaccatgcctggctaatttttgtatttttagtagacactttagtagagatgggatttcaccatgttggccaggctgatctcgaactcctgacctcaggtgatccgtctacctcgggctcccaaagtgctgggattacaggcatgagtcactatgcccagcctcagcattagtttctaatttgactggcttcagagtgtcaggaacttgaaaaacctctagtccaaacatgttcaataaagtggttccttagtgtttcatgatctctagaaggatgaagcacaaatggctgacttacagatactagctttttccctgggtgaatgattccttatgactgatgactttggtcatgtgggtatttggaagaagagtgaagacaacatctgccccgagaccaaggagaagctcatgtggccaaagaggtaccgtcctgaccacattaggaagattctgagagttgtaattcttggaggtgaatccactgagttatataccctctttatttttataaataaacaaaatcctagaaaaatgtgaaatagatgtcttaaaaccttcctagccagatgtggtggcttgtgcctgtagtcccacctacttgagaggctgaggcagggggtttgcttgagccccagagtccgagactacagtcagctatgatttcaccactgcactccagcctgggcaacaaagcaagaccctgttgctaaaaaataaaaaataatttttaaaatttttaaacaaaacaaaacctttcctaatcccagaagaaagaatcaagaaaaaatcagctgagcgcggtggctcatgcctgtaatgccaacactttgggaggcctaggcgggcggatcatgaggtcaggagatcaagaccatcctggccaacacggtgaaaccccatctctactaaaaatacaaaaaatagctgggtgtggtggcgtgcacctgtaatctcagctacttaggaggctgaagcaggagaatcacttgaactggctcactgcaatctccgcctccccagttcaagtgattctcctgcactccagccttgcaacagagtgagactctgtctaaaaaaaaaaaaaagaaaagaaagaaagacaaagaaaaactctttcctaatcccagaagaaagaatcaagcaaaagctacacaacttcattttcccctcactacagcatattagccccattcccatttagccattgctttataggggtctaattttgttagccacctataaaaattagctagacatgtccagctaacggtatctaatctacctaagatttggattatccagataatacgtttatgtttttgtgattatgtcttctgtcctaggctgagacagataaccttgatcattatactaatgcctatgctgtgttctacaaggatgtcagggcttatcgacagctattggaagaatgtgatgtttttaactgggaccaagtttttcaaatacaaggtgaggtcaagtgcaagacttatattacacagtcttttttttcctccttagcatatatccagatagttatagatatttcatatatatgaaaatatatagattatctatacacacctgtatgtataaatacatacacatacattttatgcatttaccatttctatattctagtgttgtaagaacactcatttgtcacttctaatgaggcatgcatggccttcagggtaaaaagagaccatttaaatggagctgttcttaggtgacatgttttttctactattactgtaatatggatggatatcagtgagaatcagagaatatttttccttattggttttaatccttttctatcacatttttaaaataactataatttaggtcttagccaataggtaggccttttattttttctgaagcagatgattctggaaagaaataatcgattgatctgcataaaatgtcctcaaatgactgttttttttctgagtcaaggtcttgctctgcaacctaggctggatgcagtggtgtgatcatacctcactgcagccttgaactcctgggctcaaggatcctctctcctcagcttcctgagtagctaggactacaggtggcaccattcagggcccttttttgttgttgttgttgttgttgagacaggatctcaccatattgactaagctgctaaagtgattttatacagaaagagtttatatgagctgtgaggagataacggcatggccatcagggcttggggcagaactttatgccaggagagaagaagattaagggtttctgatagtttagatgaatagtttccgcgtcagtgtacacttactcttccagcttttcataatgattaggtgttggcacaggcaataatgttgttgtttatgattgttccagtgaaatgagttccttgatcatttaacaggaaagtagggaacctcatattggaaatctaaagtctagtattttttttcaactacagaaagctgaggtcctccaataaggaaaagcttctatccacctggaaaatttacaagtaatgattaacacatggtcataacccaaagacttcagatgtcatataaaatttattcgtagtcaggtgcggtggctcacacctgtaatcccagcactttaggaggccgaggtgggtagatcgtgaggtcaggagattgagaccattctggctaacacggtgaaaccccgtctctactaaaaatacaaaaaaattagccgggcatggtggcgggcgcctgtagtcccagctactcaggaggctgaggcaggagaatggcgtgaacccaggaggtggagcttgcagtgagccgagatcgcgccactgcactccagcctgggcgacagagcgagactccatctcaaaaaaaaaagaaaaaaattattcgtaaatgcgcaaaaagaccttatgcaagaagctctaaactatctctcacctttacagatttgccccagtcacgctggttagaaatgagacatgattctatcacttccacagccaatttagaaaaaaatgttctgaccggtattactttaacatggaaatgaataaatttcctcattggtgtgaaaaatcatggtaataattggatggatcttggtgctagaggcctattatcactaaatcacctcaatccatcattatatagaaaaaagttatataatttccaatatctttttcagaaggctgagctgatagttgtaagttatagtcatctaaattgacccaatcattctttctgaaggtttggtggggacaaatgtgaattagtatcacctaatatagctggagtagtaacggtccctcatttagcacataagtcagcctggacattaccttcggcttctcctgtggtattttgactacagacttctgtggtaatagctgtaatgttcttggaatactgaataccttctaagaagtcattggtatgtttactattcttaattggagtatccaaaaaggtcataaatcctctctgtttccataacacaattcaaaaagcctacctactggccatatacatgatcaacatttgccacagtgcaggctccagtcacagatactagtttggctactgggtagatcaagcattaggtggtggagctgcttcaggacttgatgtccagaggaatgacatatcctgcataggaatgcctttgtcatttttaatctgagagccattaatgaacaatattaaatcatgtttaacccaacaagctacccagagtagctaaacccctttagtttgccatatgaaagcaggaagtgaaaaagtatacagctacccacacaggccaggctcttctgctcactactggttgcactgacgtgaaaaagataatctacatgtgtactaacctgagagtttcagaatcctgcttattggtaactagtctaataaatgtcctgaattctggcttatccagttagccactcttctcatagaaggtaggtagaaagaggcagagcaagatgggaagttcctttcatttgtgggaaaggagaaaatcatttgttaaaagtcgtaacttgtaaagaagacaaaaggacatgatcaagaacaccatgaagaggcaatcaacaaaatccaagactgtgaaaactgcacagcaaacacctcggtgttttaaacaaataaactgaaagaatcaaagagtgggggtagggattgaaggaaaacaggtagattaaaaaatttgagaccaaaattaaactatagtgtgtttaagaacacacacttgaaaagtaggcactgcctccttttttctcatagtcttttgaatcacttagatggaattcagtgttataatatgagatactagccacagcatctgtaattttaataacattaactcaaaagcctacttatcttttctgaggcttaactccctgagggaggagccaaggctccgataccacactgtgttcaatacaccttcccactcatgcattcttcaagaagtcccaggcccacactgaagagccttaccagtggggaagaaacaagccattagtcatgggaagaggggaagtcagtttgcagagaattcaatccaacaggacacaggctggaaaggatggagtagatggggatttggaaaggtggagaaaggaatcatactataacctctctaagaacaaagaccaggaagggccaggcatggtggattatgcctgtaatccaagcgctttgggagaccaaggcaggaggatcacttgaggccaggagtttgagaccaacctggacttatagggagaccccatctctacaaaaacaaaacaaaacaaaacttaaaaaataaatcagccaagtggtggcatgcactcaggaggctgaaagagggggatcatttgagcccaggagttcatggttatagtaagctatgatcattccactgcactctaacctgggcaagagagcaagaccctgtttctaaataaaataaagaaaagaaaccataccatttttgtgtaccactatgaacattgtctagtacagtactttatatatatacaacacctactgaatcaagatttatcaaataactatgacaagtggaatctgggtgaggtaagttcagggtaaatctcaccaacactgagttacaccttgagttctgtaatggcgaggtgtaatagagagtctttgaagttggtttgccacgccaaacaaatctaagctcttgtatacttcatagacttttagagctctaaaatgtcatcctttatttcgtggagcttaaggttagtccgagagtccaaagtatcaatattctcccaagaaattctaaagtcccgtgagatattcccatcataagtttctatgaagatcgtgatgagtggtcccaatgggcaacatcatgggaatttgaaacgcctacaaaaatttgaaacttagacaatagctgtaataatttagatgtaagtatacagtggttaggataatacaaggtggcaaactgctagtattgatgattctcagtataaaattactgcaacaaatttcctttttgctttttcaactaaaatgcccacatattaaattatgtctttctatacacagggctgcagagtgagttatatgatgtttccaaagcggttgccaattcaaagcagttgaatataaagctaacttccttcaaggctgttcatttttctcctgtttcatctctgccagataccagtttcctgtatgtaaaccaagtttttgcatttggggcaggacttactgctatagaagtacacgtagcagtaactggggtacttagtatcactatggaatatccaggcactctggatttcaaccattgagcacaaacgggagtatgtgtgtgagtgtgtgtgtgtgtttactcttctcctctctcctgtgcttgactgctcataatttcattgaaaatcaaatcagtatatttgtccatagttataaatgaactcagaattcctgtgttttcatagtatccatggaaaaagcattccttggtgtccttatccctcaaataattctaaataatatatactgtctgagtccaaagttgttattgattttgctgtttcagggatgggggtatatagctgacttatgttgcgctcttatgtgtcagggactacatatcttaaatatattatcccattagttctttccacaaccctgtgaagtaggactattattattgcccctcccacccccacacacctttttaaacagagatgaagtaacacacaagggcaaattatagagccaagaaagaatcccaagtccaactccagatgcaatctttcaaaacactcattagtttgtatctgcatttattcttcttttggagtccctgctctgtcatttactaattacctttctgagtctcaatttcttctgaattcgttcctttaagtgttttttaaattaatatcattttaaatcaacaaataataattgtacacattcatggggtacaatgtgatgtcttgataaatgtatatactgtagaatgattaaaccaagccagttaatattaaaaaaagttgtaatattttcctgacacgttgttttgcaagagactgaagcaagatagttaaaaatcacccacctcaacgaatgttaattttctttactcctacagtgaatgttgaagaaattgttgagcaaaacagcactaaaccttaagaatgtacattttaagtcataggaaagcaactggattttcttttattgtatttctaattatgaaaatttcaaacacacataaatgtttaaaggatagtataaagaacctcccaccaatacatagctgaccttatttaattcatacaactatatattctttccacttcctggattattttgaagaaaatgtcccagacattatccttaaatattttaatatgtaactctaaaaaatgagtcttaaaaaaaaaacacccactatacggatattactcctgtgtccgaggtccccaagaacacccacaggttctatggttcactatattgacatacaggactcagcaaatatactcacggctatgattgattacaatgaagagataaaatgcaaaatcaacaaagggaaagggagcattgtgtaaagtccagaggaagccaggcacaagcttccaagagttctctctcagtggagtcacacagaatgtgctcagtccctaagcaatgacctgtaatgatatgtgtaaaacgtttcaaactcctggcctcaagcaatcctcctgtcagggcctccccaaatgatgggattacaggcatgagccaccgtgctctgctaaaagttgtctaccacggaaacttattattagacactcagtgcccaggattttattggcagcatcctctgcctagcacagactgatttcctagactcgcagaaggaaagccaatgttcagcaaaacccacactgtttgcacaacttaatcacagtgagccatttatgtgagtcctggaaatggtagcccccctccagatccatgttctcagacaccaaccaagggtcaaccttgcaattcggcctttttaagggcgatggcctcaagccttctatgttagtcttttctgcacattcccttaaaatactgttaacatatttccttaaagtaaaataacattattcatatttccgatattgtcgtaatatttttaagcttgttttgaatcaacatctaaacaaggttcatacatagacctctttaatacatctgaagtttcctttgacttataagttccccttcatctttattttttgcattacttttctgttgaagaaaccaagttatttgttctttgaagtatcccataatctgtttactattgtatgcctgaggtattattttaaaatttcctctgtccagtcaagccttttgaaatggggttttaacttgaactcttctgcatacagttagacattttgtcttttttttttttttcttaacttcccacacaacactgatgcaaacaatttgcctttaacacctaagtcattactcaactgcgtgaactctattttgaacacccagccctttggaaacaaggtcagagtctctaacacaactactcctgaaacacttgccttagcaatgattttatttgcagtgatatttctgcctgctttaaagttcattttcaaaaactcaattgaaaattccattaggccagctaattttttccccctgcttagtggatagatgactggcccagttccatagctgataatatgcctgaaatgtgcaataacactacacacctctaattaaaagaaaacacaaatttttactttataaaaatgatgacaagaacattatctcttaccggtcactggggatagtcttatgatattaatagctttaagactgagagcaaattctgaggcactgtcagcctcataggctttcaactaagtaatccatttcagttttgagaaattgcagcaattctttttctttatcttaatatcaggggctttatatagtaaactaataaaaactttcataccattagaataaatacagtgaaagctagtggcctatacaaatactgccaatggaaaagttgaaggttggtactatttaacctagaaaacagcaggccgaggagacagttttaaagaacaaatatggccaggtgcagtggctcacacctgtaatcccagcacttgccgaggcgggtagatcaccctgaggtcaggaattcgagaccagcctggccaacatggcaaaactccatatctactgaaaataaaaaaattagctgggcatgttggcacgcgcctgtcatcccagctgcttgggaggctaaggcaggagaatcgcttgaactcagggggcagaggttgcagtgagccactgcactccagcctgggcaacaatgcgagactccctctcaaaaaaaaaaaaaaaaaaaaaaagaacaaacatttctaaagcatgcacatatgcttggcatattaagagattttatttcttttttggccatggatgcataaccacagaagttctattctaaaacattttttttttttttttattgagcaaaagattagggcttcaagaatctggacttaccaaggcctcagagaggatttcagcagagtcaggactaaataaaagcaattctgagggtttttgttgttgttgttgttgtttacagaaagtgttaaaagaaaaactttagacagattaaatttagcaacgttggtctgggtgcagtggctcacacctgtaataatcccaacactttgggaggtctaggatgttggatcactggagtgcagcagttggaggccagcctagccaaaatggtgaaaccttgtctctactaaaaatacaaaaattagccaggcgtggtggcacacctgtaatcccacacgcacgtgaggctgagatacgagaatcgcttgaaccggggaggtggaggttgcagtgagccgagattgcaccaccgcaactccaaactgagagacagagcaaggctctcaaaaaaaaaaaaaaaaaaaaaaaaaaaaaaaaaaattcagcaacgtttatttgagcaaagaacagttcatgaatctggcagcactcagaatgagaagttcagagttatacccaccagtgggagattttatacgccagacacagaagcaaagtaggtaaatcctctgattggcaacagttaggtatatttgggcatggtctgctcacttacctgcctgtgattgacttgtataacaaactcagctgtgcattatagttctagggttggttttgtgtcaagttaggttgcagttcaacacgcggggactcaaggtatggagggagctgcaggccaaacttaatttatttaacaacagaaacactttccttaacctgtgctgaaggcaaaagcaagtgaacataaaattagaagcaacgacttaaatttgatgtaataagtgttttgtcttctcagaaatgaaacccggaaaggtgttggtaaatcgggaatggtggattctaactcactgaaaatcttaggtgccctctcagggatggtttctcagtttgaaccaatatgaaaagagtagttataggtcgggcatggtggctcacgcctataatctcagctctttgggaggccgggaggggtgaatcacgaggtcaggagttcgagaacagcctggccaacatcgtgaaatcccgtctctactaaaaatacaaaaattagctgggatggtgacgggtgcctgtaatcccagctacttgggaggctgaggcaggagaattgcttgaacccgggaggcagaggttgcagtgagcagagatcacgccactgcactccagcctgggcgacagagcaagactgtgtctcgaaaaaaaaaatgtgtagttatgtataaccacatgagtctgaggtcctatttgtttttgtgtcattctggtctagcaaggggccttccccacgactaacctacctgagtgttgccaatgcggatctactcaaccggacttggtcccggggaggcaatgaacaatgtctccggtacatcgccaacctcatctcctgcttccctagtgtgtgtgtccgggatgagaagggaaacccggtctcctggtccatcacagaccagtttgccaccatgtgccatggctacaccctgccagaacatcgcaggaaaggttacagccggctggtggccctcacgctggccaggaagttgcaaagccggggattcccctctcaggggaacgtcctggatgacaacacggcgtctataagcctcctgaagagtctccatgctgagttcttgccttgtcgcttccacaggcttattctcacccctgcgactttctctggcctgcctcacctctagcccagtaaaaaactgcagtggttttattactttccctgagcatacacacactcttggctgccaacgaggggagagttaaaatgggaatcaggggactcttgagttgttggaaagggtctggagaatatatacaggatccacttgagaagccttaatttttcgtatctcaggtttctccagtaaatagctgtgggggtgaagagtagctgtggctgaagactgaggacgattgtcctcctgtaggatccactgtaggagaataggttctaaagccagcagttttagtgtactaggagaaattactgcatgagaacaaatgatttaacagaggaccacgtggctactgctttttgattgctgcttggacctctgctctgtattcttaaagccacaccgcttccctactgccatcatattcccctgtccccactgctatgtctcatcaacctctgttcctaacacctctgccaccaagttctctgtagagtaacctcctttttcccctttaattacttgctctttacttctgcctaggactctagcctatagttcactgccctgggaatgttcaaatatagtggttcttacattttagtgtttatcagaatcacccagagggcaggttgcaacacacatcactaggcctctccttctacgaggtagggcccaaaatttgcatttctaacagcttcccactgcttatttgccttggatgaatgacaatatgggcattttgatgctataaacaaatgctgtcaccatagaactagactttacctataacctatttcagcccccttatttatagtctactttcccatataaaactaagatttatatataggggtgtttgggggtatgcaaatgaatatataacatatatgcatacacatatatatacattctcttcatttcttttatatgtataggtatatactcatagaattttgataagataataaattttaaccctttgattacatatgaaaaatttgaggaccagagaaaataaatgactttttcaagattatattctttataatcagtactggaggcaaagccagaatgctgccattttaattccaatctgttattttcactaaatcatgtatccttttttataatgaaaattaaaatgcttacataatta

SEQ ID NO: 853 - DNA, 32744 bp, Homo sapiens; identical to SEQ ID NO: 636
  source 1..32744: mol_type = other DNA

SEQ ID NO: 854 - DNA, 831 bp, Homo sapiens
  source 1..831: mol_type = other DNA
ctggactcagtgacttcagacacagaagtctgtccatggctccttatcacatccgcaaataccaggagagcgaccgcaagtaggtcgtgggcttgctctcccgggggatggccgaacacgccccagccaccttccggcgattactgaagctgcctcgaaccctcatactcttacttgggggggcccttgccctactcctggtctctggctcctggattctggccctcgtgttcagcctcagcctccttcctgccctgtggttccttgccaaaaaaccctggacgcggtatgtagacatagcattgcgcacagacatgtctgacatcaccaaatcctacctgagtgagtgtggctcctgcttctgggtgggtgaatctgaagagaaggtggtgggcacagtaggagctctgcccgttgatgatcccaccttgagggagaagcggttgcagctgtttcatctctctgtggacaatgagcaccgtggtcaggggatagcaaaagccctggtcaggactgtcctccagtttgcccgggactagggctacagtgaagttgtcctggacaccagcaacatccagctctctgccatgggcctctaccagagcttgggcttcaagaagacgggccagtccttcttccacgtgtgggccaggctggtggatcttcatacagttcatttcatctatcacctcccttctgctcaggcagggcgtctatgatttctttccttctgtattggtcagaatagaatccattcggctgtagcagcaagcaatccccaacctctgactgcaatgacctttctgtgcaataaaagcttattgtccatta

SEQ ID NO: 855 - DNA, 32744 bp, Homo sapiens; identical to SEQ ID NO: 637
  source 1..32744: mol_type = other DNA

SEQ ID NO: 856 - DNA, 32744 bp, Homo sapiens; identical to SEQ ID NO: 630
  source 1..32744: mol_type = other DNA

SEQ ID NO: 857 - DNA, 32744 bp, Homo sapiens; identical to SEQ ID NO: 631
  source 1..32744: mol_type = other DNA

SEQ ID NO: 858 - DNA, 29445 bp, Homo sapiens
  source 1..29445: mol_type = other DNA
gttttttctcactgcttgcttggcaatgcagctctagcttctaatgcccttttttaaccctttaggtatctgatcgctttgccaattttgcgttactgggcaggctaagagatcttcttttaattcagcctgcttaagacgggaactgataactgtagtgtatcctctgccttttttcttatctattggaggaagctcaggtaagacctccttttcctctctgttaattccgcctggtgattagggcccagggaagacgaggtgataaggcaggtaatgtttcctcttcctgcccctttttaggcttttccgtgtgtgactgagccagggctgctctagttaaagcccataacgttaaagctgttactgggacttgctgcctttgcaactgatgtttttaagatctctccccacttgtttcccggagctctatgtctagcgttccttcttctgggaaccatggactttgggatttaacagtttgcattacagcaatttgtctagcatgcatgattaggtgccttaattgagcctgtgaaactgaagctccactagccttaagcagctgttgtaatacttttatataatgtttctgctgtgctaataactgttgtcccatgatgaaatctcagcttgaaccaactttccccagaacttggtaaccttgagtgggcaccaatgacttactagttactcactgacttgaccacgcggtttttcttcacctttgtttcctgggggcccgtcgcattcctcaggcttcctttgcagctttcctcatgaaagcggtccttacacttccttcatagcttgccttacaaggggctccaactgcggaaggtctgtttctgcagacccctgactgtcctcacacagctctcctcacatggggcaccaattgaggtattgcttctcacaacagggcagtagctacctgtgtctgcccgcagaccctgacccaaacgacggatgaataaaatgtacactgacacacagataatctgttttgccagtcatgctgagtgtctgaccgcctgtaaaccaaaagaggtttgtcactgcagcttgccctgagtagctcagactctaggagtttatttagtgtagaattaacaacagaagatttgagtaaacacacttgtggataattaacatggttaagagagtagttctaggaatgattaaaactcaggtaccctggtttaaagtaaataccattagggggcaatatccttggtcaaactacccccaagagggccatctgtctcaaaggttacttaatggaggtagggtaaacagatctaactggggaagcctgtgttgtccctagtatttaccctatgacctaatgctctaaggtaagaaatggctgccttcagcctgttcaattattacaagctttataacctttcaacctttcaaaaaggtttgtgactattccctataactttccctaatattttcctttaatacttctgccaccatcctgtgtgaatcccaacaatccagcacaatggtgaatagaatctgccagagcagacattcttgacttttttctagtcttgggaatgcattcagtcctatcccattaagtatgatgttacctctaagtttttcataagtgttcttcatgagatttaagaagttcccttttattcctaggttgctgatattcttattagaaatagatatcagctttaccaaactcttcttctatgtctattgagatgattctatgtatatatagaaattttaattattctaattggcttattacagtgatataattttcaaaagttaaaccaaccttgcataactggtatttacctgttagttcttgcatttatctttatattggcctgcagttttctttttttgtaatgtttcacccgtatattatagagctaatttttccctattgctgagccaaacttctttttggtattgtactcaatgccccccaaattatgatgtttttttctaggtctgacaggaacagcaatattcccagctctgtaagacctccagggattgttccttctactctttttagttagctggtttctcagacctaggtaatttcctcacatgcatgtgcagatcactactcatctaaagactcatggggaccctctctgtacagtcctctcctgcccttcgaaagctaaactcattggcttccctgaactcatttccttttcctcaactcagttgcaaatgagctttgcctggattctttcacctgcatcatggcctagagcctctcttcaggcagtaagctggggcagtcttagagtctggatcatttctttgtgtttctcaaggatcactgtccttctttgactaatgctcaatgtcttggaagccattttgaatattttgtttatttctccaggtttttcaggcaggagtgcaaattagttctctgttattccatggtggccagagtagaagctcaggatgctgctttaaaaaaaaatttttttccaaagtctttagttttaattagtggaaataatgtgctataaagggcttactttatcttggctgcccctattactatcaaatatataagtataaacataccagaaggtttcttaggcagattaagggcaacttcaaaatctcacaaggaacataatgtgaaataatgaatcgttataagtatttcctttacaatgaggaagaatacaggagtgctcacaattactgcctttatttagctggtaaataaaatttattttagccaatgcagtgtgataagaaaaattagtaaaagataatatttgaggattgaaaagaagggaacaaagcatattcatgaaatatccacagataatatcattacctatttttgaaactaaaaagatttatagataaaatattagaatgagtttaaagtagtaaacgggctaggtttaagaatgatatttacaaaacattggatttagcttagtcaacaatatcagaaaatgtaataccccccaaattgttttataatgcctagaaaaatattatttacctagaaataaatgtaaaaatgatttgttaaccttttatggagaaaattattttgttgaagacacaaaaatgtgacataagtcaatgacaaggtatactaatgagtaggaaatctcaaaattaagacagtagttggtgaatatacagaaaaatataccattggaacagaacagagagagtagagacagactcacgaattataagaaaatatctttgtattagtttgtgctatggtgtgaatctttgcatcccccacaattcatatgtttaaatcctaatctccatggtgatggcattaagagatgggtctttgttgaatgattagatcatgagggctctacattatgtattttgttagaaaagttcagactagacagactattaggggtaataatgtaccacagactatatggcctacacaactgaaatgcattatctcatcgttctggaggttctaagtccaaggtcaagatgtcagcagagttggaacctgttggtgctgtgagggaaagatctgttccaggactctctccttgatttgtagttggccatgtttttcctatgggtctttgcgtcatcttccctctgtgtctgtctctatgtctaaattttccccttttctaaggatatcaggggtattggattaggggcccatcctactgcagtgtgatcacattttaactaagtttatcaagaagaaatgtatatcccgataaggtcacattttgaggtactaggggttaggactataacatgtgaattatgaggggacacagttcaacccataacaatcttatgttgcaaacctggcagtacagatcagtggagaaaaaatgaacaattcagtcagcatcactggagtaatttcttatctatatgcaaaaaatagaaagtgatacctacttcaagctatatacaaaaaattattccagattacatacttgaatggtaaaagcaaacatttgcaatttttagaaaacaacagaatacatcctttgaaagatgttgtaatgacataaaaagattaataaacttgacaacaataaaatgaacaactcctgttctttatgacacctgagaataaaaaatcaagaagaaactcagaatacatgtttaacacgtatgatgaataagcaatttatgtctacaatattaaattacttctagaattaatactaaaaagaaaaataatccagtagaaaaatttgcaaaacactttggaaggcagaggcaggcaaatcaggaggtcaggtgttccagaccagactgtccaatatggtgaaatcccatctctagtaaaacagtacaaaaattagccaggcgtggtggcatgcacctgtagtcctagctacttgggaggctgaggtgggaaaatcacttgaacccgggatgtggaggttgcagtgaaccgagatcacaccactgcactccagcctaggggacagaagagaccccttctcaaaaaaaaaaaaaaaaaaaaaaagacataaacattttagagcctgaagcatgaaaaaggaaaaagggttcaattccattagtaattagaaaactactgttgaaaccctcaataagatgccctattacacccacagaattggcaaacattaaaatatggataataccaagcttcaagctttgatgaagacatagaataatgagaactctcatttctcactggttgaggtgcaaggtggtacaaccattttgtaaaataatagggcaatatctattataataagggagattatgcattttcttcttcttgttctactattgcctcatgttttcaaatatttattgctcaaatctatttctgaagttgagcatttccacttttacatctacacttgagagacacccctgcatatgtgcaccaggaaacatattcaaagatattcatagaaaaacttgccactgcttttagcagaaaacccctgaatgtgcataagcagttgattcttcagtgaattctctctaactgtaaaagtggatagagaatttcatcaactacaatgaacctcaaaaaagtagtgcaaatcacagaagaacaaattcagctggatgtgtttatataaaatcaaaccaagcaaaacaaaagtttactatttatacctttactacatatatatgtctctaaataagtgtaagacactactaattttaaaacaaatttagacttagtggttgtccttgagaatgagaaagggagataagatgaaggagggacacactgtatgcctctaatgatttgtagtgtgctattttttaagttgggaaagagatacatggatgtttattatatgaaatattggctgtcataaattgcttttgaatgtagaatatgtttcatagttttttaaaaacacagtgtataagaggtaaaggaagaacctgagaagtattcacaggatactagcttgggtagtcaaatggataatgacaccattgtcagattcagaaacacaggaagaggggcacaattaaattttatgactctggttttgaaggggttaagagtgaaatgcctctgacatatccaagagtagatgtcaaagaggcaacaaaatattaatatctggaggttagatgagaggtcagtgctgcggagatagatttgagcaataaatatttgaaaacatgaggtgacgggagagcatcaagataaaaaggaaatcactattcctataatctcagctcattccattgtacctacctactaaatgatccaagcccagctgtccctcctgattttactccctccaggcttattcctctatttatatagattagatccaatacttcaggcttcacaatgatttccttctgagttatgaatatgtattatttttctgattatttttagtcatctatctgggttgtcttatagctcaccaagctattcaatgacaattattttaaattcattatgagacagttcataaactattatttttttaggttcagctattggttattttttttttcctttggtggtatcatttttctctgattgttcttgatcttgatttttaggcagtgcattagtgtctgcacatttgaaaaacaagaaacttattctagttcttgcataccggctttatctggaaaaaccctttcctagtcatccagcaactctttgtagggtgtctagtgtggtctgcaggtgaacttgttgccaaagtcctcaggcaggctggcctggtgcctgtgttagcagatggtaggcctgtttcctgggtctgtagagttgggcctgaagcctggatcaactggggtggatcttttcattgggtatgtggggatgaacgtaaagccaatttctataagggcaggtacagaggctgttaacagtaggtgctggactgagcatgggtccacaggggctaacatggctctgaggcgtgcattgagcctgtgtctgcaggggctggccagattttggaatgagcatagtgtctgagtctgctgggataagcctggcatctgagtccatggggactggcctggtactggtgcaggactggagccggaatctggagaaatgggcctgggatcttggtagacgggggcagacctggagcctgagtcttcagagatggtcctagagactttgtccatgatggccagcctagcaacagggtctaatgaagtcggcctgtaccctgggtctgctagagcacagctgggccctgagtttgttggatgctgggttacaaaaaccagcctggagtctgatgctggcctagggctgtggtgagatggggccagtctaaagtttgagaccataggtgctagactggtgcttgtagccacaggggtgggccaagaattgtggaatggcctggaggctggttgtgtgagatctgtcctagaaccaacatattcagaagtgggcatggacactagggccacaaagggtggcttgggtcctagggctgtaggaactggactggaacctaagtccacagaggcagtactagatactgggtctgtaggcacctgcccaatactggagtcaactgtgatgggcctggaccctgggtctgctagaggatgggaccataggaactggcctggagagtggggtggcagaaactggcttaggcctcgggaggcctggagcctgggtctgcagatgcttgccagatacctgactaaggcctagggctagggctgccaacctggaaatggggtgggcctgaatcctggattggtgtgagccaatctagttctgggccggtctggaacctagggtggacttggagtctgcgaccacaggggctagccttgtgctaggcagtcctcgagcctgtatccacaggggccagattaggggttggatatatggacactggcatggtgactagagttgcaggagctagcctggtcctggggctggcttgaaacctggagttgtcgaggccggccttgttctgggagcagtctggagcctggagtcactggggctggcctggtcccaaagactgtctgacatccaaggcactggggtagacctggcatgaggatatacccagaaaccaagtccaccaggcaagcctggagcctgggctgtgtgatctggtctggcttagtgtgcaggtactagcctggagtttcgggcaatagtcgcatacccattactggattttactgaagcaggctctgcgttggagtccaaggcaaagttcagtgctcacttcacttttcttcttcgacacagagattgcctctctctgtgccctgctgcctggtgttgtgggaggggtgacacaggaaatgaaaaattgttcttcctatgctcttcaattaatcttttcttatttctctgctacacaacatttctgtaacctttcacctggttttcttagctcttctgaaggtattttcatgcatagatagttgtttaaattgatgtttctgtgtgaggataaatgctagaaagtcccattctgacattttgctgatgtccagtttcacggcatccaatcagatttctatataacgattgtcaaagtggctcagcagcatcagagacaggtctcctgctaatttggaaagaaagattgcagatcttatgttaaatgatcttatcaaacacacacatatatacacacaataataataataaatagagctgtcaaaactttaggaggtgatgaatatgtttatggcttttgttgttgtgatagtttcatgagtatgtatgtattcacctctatattcatcaaggtttatatattaaacacatacagctttttgtatgtcaattatacctccataaagtagttctacaaaaaaataaataaacaccatagaggaaaaatacttttggcctctttctccatgaagtatgacttctatttcaggtttctggtggttactgaacttccagattttctgatgataagtataataagagaaataatatgttaggctagaaaagacaaaaatgcaggatttgaggatgaatcaatcaaattttttcataacataataggacttattgttcaacatattcaagccagtaccaggctagagtgagagaaagtttccagatcaaatatttgtgtaaactaattcaactaaagtctcaagaggaagagattcatgatgagatatctggagtcacaatgtgcaaaattcatcacaaagtggaaaccagcatcttacaatacaaagaacaatggcttgggattctgagcatctgggttctggtcttggttttgcacatgcaatcatgtgtccacttcccaggacttagtttcttgaaactagacaatctctactaaacctcctatctgattttcctccctttcaggaagttaggcaggtgctcagatcagctttttggtcacaaaggatgaaggaagaaggcaggtgtctttcttaaccacagttttgggacatggctttagagaatgcattagcagggactaagcaaataatgaaagctgaatttggggtagaaaaatggggaacaggagacgaaagaatcagaaagaaaatattaaggagcaacaaagagtcccctattgatttgtagtatagccaaagttttgtttttctcttccttagactcttagaggactagaagacatcagagagttttaaaatgttctaggatgccaaagccaagaaagcatgtcctgtggatccgacaccttctcagttccctgatctagctaaaaccaaataccacttgctgatttctccggaggcactgaaacctcatcaccaacccagaacagtttagcatgacttgttctctccatgaagtccctaaacatcccccttcttcctctctaaaagcttcaagaatccactttcatgtcaagtttttctacagaggcagattgttgtttatatcaaactccagaaaccctcatccttttctgatatttatttaagttggtgctgtcagtcttttctaccataaagaacctgtgtttacttggctcttctgtgtcttgccaccagccaccagtcagttaaaacagctttcttttgctacagagaggtgcagccacatctaaagccaccagcagtgcaaggtcctctgactgctttaacaacccctccctgagtgtccagatatgaagaatctgctcaatcaccaaagctcctgaattaagagttaggatgctcctttggaccttcaggaggaacttcattaggaattctgagatagagcaagcattgctggggaaccacaggtcccagtgtcctcctgtcatctcagaagccagtaaagaaaccttcttccctagaaagacttctggagagaaaaaaattccccaagatttgagagcatgagagtctcatggtgaggtccctggtgaacagaaatcagaaaagtactagtacacagaagagatgtacaagcatctagtcactgcctcaaagtaactttgaatttattatgacttagattgagatagagtgattctttgactgttcggtccgtgcctgaaacaaacatgattaatatccataatcttattaattttattatccctaggaggcaaagtctccaaagttttccaaatgatcttgcaaaggcaactctcctcagattccctaggaagttttcagattttatgaataggtgccaacagctatcagatgtcttccaacgatggctgctgcatcccagtttcacattgctaagggttaaagaaggacattgatatgaaagaagcatcccagagacccttgacacattgtgagagtacacagagggtggggctccatcaacctcccacagacactcagccatactattcccattccctgccatgagcaagagtttcagggcctcacaggggttcaaaggtggccaaatcattgccactctttgtagtatgaagtacaccaacacgtaaaggtaggctaaacattgataatataatagctttaaatgtgtataaatgtatgcttacaacctcaaaaatgccatgcaatattattgttctacttacaagatcagtgcaggaattataaagcattaattcagagtggactcttggcagtgtgtaatttatggtgcatgtgttctccattctgtctgtgtttctgtaccattgggtgataacactagaatctcaaatttgggaacttttttgaaagtggggccatgcctaaatggtatcctagttgtctcttccaccatgaccccatgatggacctgcaaagtcccaaagatggaagaacattcaggggtagccagctggagagacctagaatcagagatctctcacacagcctgaaaagcccaaagcagatgagcataacctcagcacctgtgaaaccagaattcattgcttccattcagagatcccatgttcatgtcagaatccaagctgccacgagtgtttcatgaagtcacttatgactaatactgagtacaatgggactgatatcagaactaagctaggcccggagagccctgaggttgtgacacataaggctaaacctttgagttttgatccacagagtagatacatcagagaagtggacttggagaatcccctgctggagtcctagagagtaaccactctgtcagatagcatgtgtttctgagaggaaagcacaggggtctagttccagccgtatccctctgcaccccatatgcacgtgctgagttctagagagactccagagctggtctgaaaggctgatgcaaaggagtctgctctggaactgaagtgttataagaaactggcaagctcagcagccctacagataggtgaggagcccagagatgggagaggaagctattctcctggccaaggtcctgattcagtttgccagaatcataggcagacttgaggccgactggagctagcactggcagtggaattgaaacctcccctgtagtcccatagagaattttttttgtataaacatagaaattgacccttctgatcttaatgcttgaaacttttatttgttttatatgaatttcatccttagtaaaggacccctacgtccctcaaaaagtatcaaagaattgaaactcaccagatgatcccatccagacaatgggacaccagacccctcataaattatgattgcttccttaggtcgcctgagttcctgtttttctacacattgttacatttcttcactgctatgaaaactcataattttagttgatcagcaagacggatttgagaccgagcttgcatctcctctgctacagcatccaactcagccttcttccttggcaattggttatattgattggctttctgtgtggtgagctgcaggacctagaccacacccctggtgtttcagtaacagcttttggtttcccgaccaggaacactttggctcagttgccatgggccaggagtctcacagaactactaagcagctgcttacccaattttggctggagagataagtaccctctggggccaccacagctggccccaaccatggtcctgattgccttggaagaactgcctttggaatttcacatcggcatccagataggtgactgtcctttgtgggcccagacagaaagatctgctcctctcagtttgggaaatttttaaaggaatttccacttgcgggttgaataagcccaactgacgaagagaggaaaataccctgactgtttcagtatggacattcttgggggcttgtttgtcattgtgtgtgtgtccaggcaagtgagtgtcttttgtgggtactagatagtgggatcagctcctctccatttgagaaattctgaaggaattttgatttgcaggttgattgagcccaaccaatggagagaggaatcaccccaactgtttcagtttgtagacttttggggcttgtttgatgctgcaacagttggattgttttagtgattgtttgcaagtgtctgatatagtcatcagaaatcagaatttaataaactgacactcttttgtaacactgtttgaccccagtatagtttggaatctggtatttgcccttgaatgggaaagtgggttggagttccatgtatccaggcttttgtgctgctgctgttgggccaagttagtatgtgatattctcctgtggtgctgtttgaccccagtgttctttggagtctggagaactttggactttaaaaattaaactgccacggaaactgttttactgaaaattttggttcacagccttcactggattacctatcaaggctaacaaagttcagccatgtgaacatgtttgcagactgatgagtttctatttcaatagctagagttccaaggtaaaagctattggatctttgggtgtatgtatgtctagatgtgtctttgggtgtatgtatgtctagatgtgttaatgtgtaggcatatgtattacgttaaatgttgtgactacccaattggattataaataaaagagtgctcatagattaagtaaacaagtccaaagtatttttcatgttcatgctacttaagtaaatctttagcaagctagcattaaaattttgtaaaataaaactagaaatgtcatcatagttgtcagcatacatttttgtctgggttttgtatttgtttctgctagatattttgaggtatgagagtttggcacagaagtttataaagttgtcaccaggagttggagataagcctgggaaacagagaccccctcccccatctctataaaataaaaattaaacaattagccaagcacagtgattcatgcttgtagttccagctactcaggagactgagattggaggattgcttgagcctgaatgatcaaggcttcagtgagtcttgattcagccactgcactccaacctaggtgaaagagcgagaccctgtcaaaaagacaaatagaggcagagaatgacaatggggcacagaagcattgcagggagactaggggaggagtagtaattttttttattattattacactttaagttttagggtacatgtgcacaatgtgcaggttagttacatatgtatacatgtgccatgctggtgtgctgcacccattaactcgtcatttagcattaggtatatctcctaatgctatccctcccccctccccccaccccacaacagtccccagagtgtgatgttccccttcctgtgtccacgtgttctcattgttcaattcccatctatgagtgagaacatgcggtgtttggttttttgtccttgtgatagtttactgagaatgatgatttctagtttcatccatgtccctacaaaggacatgaactcgtcattttttatggctgcatagtattccatggtgtatatatgtgccacattttcttaatccagtctatcatttctggacatttgggttggttccaagtctttgctattgtgaatagtgccgcaataaacatacgtgtgcatgtgtctttatagcagcatgatttatagccatcccattactgggtatatacccaaaggggaggagtagtaatttttaataggatggccaaaggaggccttattgagcaggtggcttttaggtgaagacttaaagaaggtaatagagtttttataggtctaataagaaaacagaatgcaggcagaagaaaaagaacagccaagtgcctgaagcagagaggccaaagagagtgaggtctaggacctgactggacagatgtcagggaggtgactggagtctaacttagagaactgttataaacaatttgtacctctttctctaaatgagattgggagttgctgcaggagttgcacaaagacatgacaaaatctggcttttgttttaaaaggagcatcctcatttgttattgacggaagactaaaggcattctccatccagaaaagactgctaagaactgtgaagcatataaaagtttaccctacttggggcaatgtttcatgaatgctgacagataacacaagctttctgggtcaaagacagagttttatgactcattcaacagggagaatgatttttgtgtttgtgtcagtcatccttgctccacaagtcctacagaggaaatacagaaaggcagattaatgttgcaagtgcaacagatgtgtgttgaagccaaggaaccctgaatttaggtcacctggatgttttataatgaactgcaagcaaacctgtctgaactttgctccagagggggacattatctttcttatactgatcagtaagcagacctaccctctgcttcagaagaaagcaatatctctagcttccaagctgtcctctttagaaacatccttgaaaagatagtcaggagaaaaggctgtcaatgtctctgctcataagacatacagaaatgtgagaggccatgaagaattttctcccagccagaattagcaggatgtcataatggattggatgtaaagtgggaggggaaaagatacttaagaataactccaagaatttttctttgaacaggtgaagaaatggagttgccatcaactaagttgagaaagactacaggtgaagtaggctgggtggagagggtggataagaagattgatttgagacataatgagtttgagatggctattggaaggaatccaagagatgtcaaacaggccgttagatacatatgccttgagtttggaaaaaatttgagtagtaatttaaatgtattagtcattggcaggtagattgattttaaagctatgggaccagatgggatcaccgggaactctgaagtgatccaaaattaagaaactggggaggaaagaagggtccacagatgagactgagaaaaagtagtcagtaaagttaaagaaaaaacaagagagtgtgttgtcttggaaaccaagtccattaaaggatgatctattaagatgagaagcaataattgaccactggatttaataacacagagatccctgatggttttaaaaagtgtttcagtagaatggtagcagcaaaaacccaattagatgaggttaggagggggattggagatagcatgtatagacaatcctttcaataaattttgctacaaactgttgaaacaaactaattacagcctgagaaggactctgtacttcttcatttgagtccttgtgggtaaactgtaacgtagcttaatcatcagacaaaattgaaaacctaatttagtagtgtgcacctgtaacaatactccagtgttggccaatcccagcagccatacttcaactactcatagactgctgaatgttcaaactgtgttcaaataaggcaagcgcccagttgtaaccaatctctttgtttctgtacctgatttctggttcctgtacatcactttaccttttttgtctataaattcattttgaccacgaggcacccccggagcctcggtgaatctgctgtgattttgtaggctgccggattcacaaattgtttgttgcttaatgaaactcctttaagtttaattcagctgaagtttttcttttatcagatggtgtcacaagaaggatctgaagtggagcttctagtatccccaggagcgcgaagtgaacacggaaggtacctgcaggatccaattgtgtccattgatctctcagagtggctgaggataataggtaagctccctctcgcattttggagcttcacacgttggtgttttgagctctctgagttgcttggagcaaatttctgatccaaactgggtttggagtcacaacaggaaacagactgggtctaggaacagatttgatcttggaattaactggcctggatccagttagaggcctcttacatctcactgggtcagaaaggaactggtagtaagcagtaatgttgcaggagttataaaatttggcttttgaaaattcacagggatttttgtgttctacccctttgtttcttttcttttcttttttttttttgtgcgcctaggtaggaaaaaaatcactggctaagttcatcaagagaacctaagaataaagacaatattttagataaaaatgggatccttaatttctgtaaaactgagttccttctggcttatacattaggactgtataccaagtcttacagaaatggcaaaacattactaaagatacttagagtggaacattccaaatgaacaacaatgccaatgcatttaaacaacaatgccaagtacatttataaatgagggctctcagtaaagtctctttgactaaaaacagttttggcactattggatgtcaactgctattctttttggaataatctgccttgcactctttgttgactgctgtgggtgacaggatgaggcatgtacagaattgtggtgaatggggagctttttccttctccctacaaataaagaaacttgatagctgatgggactgtggggaaaaaagaaaaaaatatatagcatttattctgttttcataattctcatatttaactatggttccattgccttccatgtttttttcaatcttgcataaaaataaaaacatctcaatggtacaaactaaaattctcaaataagaaataaatcacacatactttcaccacccaaaaacaattttcatgtttatttattcccttcaagtccttgtccacatgcaaacataatttgggtacatatgtaaaagttatatattttgatatttttacccattattcattataattgcttttctgtagtcttcacagtgaccactgactgtgtgctactcatatttacagactgtcattcacaaatttataatttctctttagtggacattaaacttattttccatatattatgaaaaattattttagttaaggaatgaaattctgatacataatacaacagatgtgaaccttgaaaacattatgctaagtgaaataagccagacccaaatggaccaatatcatcggattccatgatatatgaagtacccagaataggcaaattcctagagaaataaagtaaaagttattttatatacatatataaaatatatatattatatataggggtatatatatatatacccctagccaggggctagggagagagggaatgagtaattgtgatttcatgggtatagttgccatttaggatgacaaaaaggctctggaaatggataagcaccatgaatgtatacaataccgctgcattgtacgcttaaaaatggttaaacggttagttttgtgttatgtgtcctttacaacgatttttttaaagaaggtggggaggggtctccccaggtttttagcagcttcctgatttagaaaagaaatgttgatggtaggaatacaggtagagaacacttttatttgggtagatgttagaagctgaggccagggtggggtcacaagagcaatattaagtatgaggagaggccctcaacaaaggtcattgcaaggggatggagtagggaatgcacaggaggggtattttggacaaagattggcagctgataggtgtgggtattgttctcatgtatcagcccaggatataatgttcccagggcaaatggaacacaagtttttttgcggggagtgatatagcatggtagatcttgaattaaaacttttaaaatcttgaccaaaagctcaaaggagaagacaatagtgaaacacatgggtatgggcaattttagttaaatcaggtgagaaacagagcaaagaaagcacttggagatggggggaagaaaaagaccattttttttttgacagctacaagaacagcagagtcagacaggggataggctcatgtcagagatccagttttatttactaaaagttccttgggtattcaaacattctgaaattatgagatcttgcaaaaggatgcctttgtttaaacattgcttcatctagctacagaacatagtttaactttgaggcctttgaccccagacaagataaaatatgtttcaccttgcctattacttaacacatatttgttaactattttaacttcatggataaaaaatttcaaaaatctgtgttaactgatttgcaaatgattgtttcaaatatctgattcgtgggttccttctcttacattaattttgttgtaagttcttcacatttttaattatttttacatcattgaatataattgctaaatctctatatgacatgttgattaatatgaagtcaattaaaaaaactaacatatattaaaacttgttcttactttattccaggcataatgctatgcattttatacatattacattgtgtaatctcaatcctttggaaaacatgcattctaatttccagttccaaagttgtgagaaaacactttgaggttctgattggttaagcaacttaacaaagaagtatgagatggaactaaaatttgaaatcagcctaagctttgaacctatcagttgtgatgatcaccttctccaagttattgttaaattattggcacatttctaagaattctgaatgatatttcaacaaaagtttacagatatgtgttaaaatttttctatctgtttttaatttttgtaatgaaactgggataagttccaaaatggccgtaggtttgaaatatttggccctgagaaactaaagaaaatctatgcctactcctgctccaagttttttagtcatacctgttcttagagggctgatattttctgttgcagatgaaagaagaattctcaggcatataatgaccaaaatacaggaaaaaacttatgatggtagtggtggagtgttctgttacaggcatttgggaagctcacagaactcttaatattcacttttaattctttccacaagggaggaagggcatgggttttggagacagtcatatatggtttcaaaatctgactctggcatttatctctaagaacttgagaaatttacttagtccctctgagatttggtgtattcagaatgaatatgatactaacagtacctacatcacgagtgttacttgaatggagatgtataaagtgcattttaaattcatttgtttccttaacattttcccttcatttcttatcttttcagagtttcttcttcaaggtctcaaggtctgaagcatcccacagaatgatcctactgaataactcccataagctgctggccctatacaaatccttggccaggagcatccctgagtccctgaaggtcagggaacagtgggaggtcagggtatgggagtaggggtgttgaggatgagaaaatagcaggcttgtgattctagtccttcctgactgtttgcagagggttggagctgggaaacaggatgggactgggggcacaggctgcatatcaagagctgctgcttctctttgggaagaggcagctaggtccactctgcaggttttgccactcatttggagaggcagtggagcatggtggctacgaacatggtttggagcctgtctgaatggatatgcattccaaggctgccattttctagtcagatggctttgtggatgtttctttccctttctctgactttacgtttggtttttccatcaatgagatgggaataacgttagcacctacctcttaaagttgctatggacactgaataaatctatacaatataaatgctaagagcattgccaagtgcccagctagtacacagtagctctttggtatcacaaggacagtcctacctgtgagttctgcctgcttgctggtaacttcacgtccatcagtatggtcctctccaggaccatactgctcatctcaccatcactgacttggtctcagtaccttctcttaatctccatttttctcttcctcttcacaaccagatcctcatctctggggatctcaacctctcctggtccctttcatccctccttcaggtgtatggctctgtgtatcacatcaatcacgggaaccccttcaacatggaggtgctggtggattcctggcctgaatatcagatggttattatccggcctcaaaagcaggtaggcacacagacagggactggtggagccaggcaggtccacagggcctgaggaactgaccagttcagacaccatggctgcttttatagggtgaaaggaaacgtgagtattttaaaacactccttcagtactgggcaccttgcatgagtgccacgtgttcccacccttcgtgtaaagcataggactcttctgggaaagggggtggaggaggaaagggaggaaaaggacaaggctgacactcacagattaagggccctatgaggtggcaggggtcacctgcaggggctgaaaggaggccaatttacagggaaagttgggtgtctgagatattagaacagtggcttagaaacagaaaccaaggcataagtctaccagtaaaattacctctcagggccaggcatggtgtcttctacctgtaatcccagcattttgggaggccaaggcaggaggatcacttgagtccaggagtttgagaccagcctgtacaacatagtgagacctcatctctacagaaaataaacaaaattagcagggcatggtggtgcatgtttatactcctagctactcaggaggctgaggtgggaggatggcttgagccccagaaggtcgaggttgcattgagccaagatcacaccactgtactgaagcctgggcaacagagtgagaccctgttgtttttgttttgtttttcaaaaaaaaaagttacttcttaggaaccagggaagggactcataattactgtgtgtcaactgtgtggaagcacttctctcgttagtgaatgttatcatcagaacaatcttatgaagtgagcattaatatctccaatttacagataaggaaacaacattgagaaatattaagtcatgtagcggctggattcctgatgttaaagcattgcccagtctgaattcaagtgcagtggactctaccacttttactagctatataaccataggcacttctgtgagtttcatcatccgttaaaatggggaaaataagaggatcttcttcagaggattacacaaggtttaaatgagatactgtatgttaaacacttagtacatagcacataactgtaaatagtgtttacaataattagccattattggctgaggacacacaaggaataaatgatggagctgaaatggtaatacaaacctaggtgtatttttttcctaaatacttcccctttgtgtttgtgtgtttcatacacatctggttagtaaactgaagcctcattgccagcccaacttcatgtaggtgtaaacgctgagcccccaaataataataagccacaccaggtcaagactagtttgcaaactgggtcaggattcggatgcagaaagtgacaaagtgaccctagcttgaggaacaaaggggtaaaggggatgggaaccaggctgagcctaacaccttcctcagggatgttcttttgatctcctggcttcctgacaatttgggatcaaagattaatgtttagtttatttaatcaatggtccaatttcttcaaagtgtggtatgctagataactgtaggaagtcaaatagttccttttacttcagtaactttgtagttattatatgtattttagcaacgtaactatagcatcaagccataccttcatgtatgcattgctttgaacaaagttagtttttacagtgagtcaataaacaaaaatatgaaaatataaaagtcccacaccacacatataagaccaaaaaaaaaacaaaaaggaaagaatgaaatacgctgcaatttacttggaagtgcattcacctagtctgattccatagcataccatgtttctttcagtattgaaagtcaatctgattttgaataagagcttttcagggtgggatgcaggagaatttatctagaaaaaaattaattttttcattgttgatttttaatcacaaagataatctatgttgattatacaagtaaaaaaatccaacatgattttaaaaagttaataacctcttacctcccctcccctcctctcctcctttcctaccccttggttgtaatcagtgtccttgcccatattaatacacagaaggaatcccagcactttgggaggccgaggcaggcggatcacgaggtcaggagatcgagaccacggtgaaaccctgtctctactaaaaatacaaaaaaaaaaaaaaaaaaaaaaaaaaaattagccgggcgtggtggcgggcgcctgtagtcccaactacttgggaggctgaggccggagaatggcgtgaaaccgggaggcggagcttgcagtgagctgagatcccgccgctgcactccagccttgggcgacggagcgagactccgtctaaaaaaaaaaaaacaaaaaaataaacagagggatattcactgatgatctcttttgtcatcactcttaatttgcctttaacatatggacatcactttgggtgaatcaatacagcactaaagtattcgttttaataactgcggcatttcatagagtcaatgcaatgctatttagtcaatcattctcctgctgttgggttcaaactgttcatacttctttgccactacaaacaagcttcaataaacatcttcatatacatatctttatatcctggaaatttttctcagtacaactgatttccaaaaggaatatctgcaagttacagtttatcttattctaagcaggcaatgccaaattaccttcccaaaggattccacaattttatttttattagcaatgtatggaagaattgtttccccacattctcacgagcactgaatattatccctcttttaatttatcccaaactggtgggtgaaaaatggcatcttattgtggatttaatttgcatttccctgactagcgatattgaacatattatattttcatgtttctcggtcatttggtgtttacttttgacctgtttatattctttgaccacttttacactggggttttgtgtcattcttaaaattttgtaagtgttttggaaactagggatactaaaaaaaggtgtatgctacaaatttgttgcccaatttataattattttctattttattgatggagattttgacattaagaaattttttattttcatgtaatcaaatatattatctttttcactatgacttctgaggttttgggtttttttagttaataattaggaagatttttgctactcgaagatcatacaactgttttctcattttgtcttacagtgagttaattgttacttttgacattgcaaacttcattctatttggaatatatttttgaatagcatgaattaacattcttttatattaatcttccttatggctggctaattatgttagtaccatttcttaaataagtcattccctactgaaatataaatgtctattttgtcatataacatgttatatatttttgtatctgtttctgtattttttctagtcttttctcatgctatttcattgtttctgtggtaaattttaatatctaataaagcaaatcacccttcaccaatctttttttactttcctatttcttataaacttaatagctatatgaacataaactaattcttccagttccccaccaactatcccaaataactattggagttgtgattggtattggaggagcatttttcgacaattttggaagaattaatatttttgtgacactaaattttttcatcaagaaatatggtctttttctcactttttttcagtttgcattctatgccatctggtaaaatgttagtgttttcctgtgataaactaagtgatttttccattaagtttacccttaggtattttatactatttgttaagattattaaattattttcctgttatatttctgagcattattattttgttattgctttgtgtttgtagtcttgatttccaaatatgtcccactgttgtttaaaatcctgtttgtgtggggcattatttgttttttttttttgtcgaagtctcttggattttctaaatgtgtaatactgtaatctacaaacaaagtaatttgctgctgctttgccagtatttgtatgggtttttagtttcttgcattattgcataatatgcaacctaaggaaacaattccaactaataatagttctatacttgtctcatccctgattttaaatagctataaaagcttacatttggaattacatttgattctgtatttgcaggtttagagcattttcctgttgctcctactttcatagaacttatatttagaatggagggtaaattttatgttatttaatttttgtcttttctatttggcaatttatacactcatgtaatttttttctcctctaatttattacactaaaagaccttccaatcaaagccatcctggcctttctaaaaccaactgttcatattcacattttttgtatatgctactgaatattttattcataatttttgtatctgcatgcataagggaatgttgtcataactctctttttgttatttccttaccagatttggcattaggatcttttcatctgttaccaaagtctactattaaaatcatgtgtttgtttttggcttatgtagaatttaaatgtaaaataatctgattttggctacattttattttttaatttcaacattctttttaaatacgggggtacatgtgcagatttgttacatgggaagattgcatgatgctgattcttggagtatggacagattccatcatcctggtagtgagcatagtacccaataggtagttttctaacccagccccttttactccaccctctggtagtccacactgtctattgttcctacatttatgcccatgtgtggtcaatgcttagctcccagttatgagtgagagcatgtgatatttgattttctgttacagcagtaatttgcttaggattattgcactgtggaaagtagtctggaaatttcttacagaaattaaaacagagttgccatccgatccagcaatgtctttactaggtaaatacccaaaagaaaatgaatcattctaccaacatgacacatgcacttgtatgttcattgctacacagttcacaatagcaaagacagggaatcaacccaggtgatcatcaaaggtagactggataaaaaaaacttgatacatatatttttatggaatactacacagcaatagaaaataataaaatcatgtcctttgtagcaacatggctgaagctggaggccataactcttgtctactttttaaaaggtagatgtttaatttcatttctgatattttctattagtttgttcaggatttctatttttttgcaagtcaatattgatagtttattcttgagggataacatccatttcttttatcagtaaatatcttgccttggagtagtatgtagtcttctattagaagtcttttgttcttttctctgtttcttctgtttctgttctcatagcttacagtctgttttttttttttttttgcttttttctctttctcttgtatttcttttaataaatgccttaccagaagtttatctctctctttcttcttctctctctgtttttgccatttaaaaatgaacttttggctttatatatcctttgcactatgtcttgttctccatttcattatttatagctttcatttttacaaattgttccatttgttattttctagtttactttgatattcttttatatatttccttgactatttacttggctatttttggtcattcttttaaaatcaggtcttttaaaacatctactcttctaaattcactgacgttttgggtttgaccatattcaggaacttgcatttataaaagcaccctgaaattcttgaaggtttctttaaattaattacactattttctctttaactctttagcaatacaatttccaacataatattaatacattcactgctaaaacgctcacacttattgtttatattttcccagagaaacatcctcatcttccaatgaagtttctgtcatgccagaatgggatcacgagtctctttctttcaaacccaagagtctaacaccacataaattacccagagagctaccaaaaaattcagttacatcattctattttgtgggcttctgggtgtaaagccagtgtcacttttcaaataggctgatatcctgtaggcttgagaaaaggcaaggtctcgttagtgtttatattcactaaagtatcttgctcaagccctggacaccgtagattctaggacactattgactctaggtgtctggtgaaacagtaggcactaaaaattagagaaatcacagttaaatttattttgagccaagtttaaggacttaactcttaacaacacaaactcagtacaacccagaatgtgtcccacagtaggttacctggggcacagtatatataacaggagtatccgtttggcacaggtggtaagagaagcagggagagaagcaattgttgcatttttttattctgctgggtgcttggtgatgctatatataaaatagggtatgtgtgcagttgagtgggtagggagaaaggtgaggcatcttaaggcctggtggagggtgactgatttcatcctgtcttagttctgcatgtgataaggaggtttataaccaatacttgtcagtgttaaatatttaacaaactccagttacacaggtaagaggtcagcggtagcttataggcctaggttttattatcgatgtgcccaactgcagccatcatgggccactgttaaaattttcttttgaactttcatttttctgataattgcaaccagtgagaggtgaagaaaaagttcaagggaatgacctgatcttatatcatccaatacaggagatgactgatgacatggattcatacacaaacgtatatcgtatgttctccaaagagcctcaaaaatcagaagaagttttgaaaaattgtgagatcgtaaactggaaacagagactccaaatccaaggtaacgagtctgaagaaatgggcaagcagctgtgcttctcaaattgtgtcttcaactaacagcattagcatcacctgagggctcattagaaatgtaaattcacagaaactctggggactgggagaggtggagcaatctgtggtgtgacaaggactccatctgactgtggtgtaaactcaagtttgagaactactaagcactgaggtattaatcaggtgggagcagtgtaagtagagaactccatgtctgacaagattgctttcttggctttcttcccaggtcttcaagaaagtttaggtgaggggataagagtggctacattttcaaagtcagtgaaagtagagcattcgagagcactcctcttggttacggaagatattctgaagctcaatgcctccagtaaaagcaagcttggaagctgggctgagacaggccacccagatgatgaatttgaaaggtacaaaaacatgtgctgatcatttataattgcgattccttgtacatttttgtaattcacataaatcagttttggaatgaagagaggatgaattcattccttgggatgaataaaggttgtcaaagttcaagatccaaaactttgcaatggtgagtctttaaacaagaagagttcctgggatctctagattgggatggcacctagaaattacaggattggggatgaaagttgttgtctttctttttgttgtctacagtgaaactcccaactttaagtatgcccagctggatgtctcttattctgggctggtaaatgacaactggaagcgagggaagaatgagaggagcctgcattacatcaagcgctgcatagaagacctgccagcagcctgtatgctcggcccagagggagtcccggtctcatgggtaaccatggacccttcttgtgaagtaggaatggcctacagcatggaaaaataccgaaggacaggcaacatggcacgagtgatggtgcgatacatgaaatatctgcgtcagaagaatattccattttacatctctgtgttggaagaaaatgaagactcccgcagatttgtggggcagtttggtttctttgaggcctcctgtgagtggcaccaatggacttgctacccacagaatctagttccattttagacaatgaagctgcttagtaatctctgccaagccatctcttaatattaaagcagacaccacagaatagatttcttcacttacaaatgcatattgggcacttataatacagcaggaactcttctcacctggagccttgatgttaaaagacacagccatgctcttgaggagcttacaatcctggctggaggcaggggagggtatattctttaaatatgcttaagtgttatagggaaagacggggttaccagtaaacatgtaactagaaagccaggctcagttcttacctctgggaatcagaactctttatgcaacttggttaatagaatctactatctggaagataaatgaaggattttaataaaattttcaatagaataaacctaatctgtatggatactttatcaaaaatgaatgtccctgctatttctggatttatgaggcaatggtacactaaagaatggaatcagttcagtgaatagaaaggtatccaaggtgaagcctgagacgaatggctttcccaggctaccttccatcactgttgtacagaaaagaaatccagagaatcaaatggactggccttgggggtctctgctatggaaatgccattttttgtgtctcctttctcctactctttctcacatcctcttcatgattgaagcatggcacaaggcaaggtgttgcctgcgagtctggttgtaagttcagcctttggtgtttgcactactgctatcataaggggtcagggacattccggggagaagtgaccactaaggtgaggattagagagtgagtagaagtgagccagacaaaaaaagcagaaaatgcagatgatggaaaggacatgtgccatgcactatcataagaacttcctaactgaacactgatactacaattctgaatccctgatcttaaaaaataattatacttcaccaacaaaacttggcctcttttggttccactctgccaccctgccattggaacttggattactgtgaacattgcagctatagcaaaataaaaaataaaaaaaataaataattggcattt

SEQ ID NO: 859 - DNA, 23217 bp, Homo sapiens
  source 1..23217: mol_type = other DNA
agaaatttctggaggtggtgtatcaaaatttactctgcgagactctgctgaactggctgcatcagggagaaatttcatctcccagaagggtgttgctcatcgtttcttcccggaaacatctgcagagactagcttttcaggtgaggactcattacaaagtatcagatacataggatgaacaagtctagagatctaatgtacaacatgagaactatagttaatagaattgcattgtatatgggatccatgctacatgagtggagtttagctgctctttacataaaaacaacgacaaaaaataagtaactatgtgaagtaatagatatattaatttgcttcataatggtaatgttttcactatctgtatgctctcataacatcatattgtatactttaaatatccacaataaaatttatttttttaatgtaattattgctttgtgacacctcttccacttaagtgagtcaaattaaagtgcccgtattgtgttatgctcagaatatgcagacaactatgctcaaggaaaaggagtaacttccacttaagaaacacatatctgacaactattttgtcaatggcagtttgctagctaccatgaaaatccttagaagtttgtgctctcgactaataaatgaataaagaaagatctgagagcttcttggaagcaggtggatgaatagaatactgagtgtgtggagacaccagaaaaattactatttttaatcctggtcacattataagggaggcagttttttccttacactactactaagaagtttgttgcactgaaagtgagagaggaaataagtagatcaataagacaagaatacagacaagatttattgtttatttaaattatacagaaaacaaattttactctaaagatttaatctacaacagtactaccaccatttacttatttattcctgtttgcctttgttctctcttaaatttgaactttatgtgttgtatgtgaactgttttgtgtcctatattttctcattttatttgaacactctcccatgtgtctatacatattatatattatgtctgtaggcattatgttaatgccttagggttgcatcactctgttggaacatattttatgttatcttcccctattgaggcacatagagattttgttcagacttgcttatgttcatgtgactttataaaattctgtttagagtttttgttttgttttgtatttagagacactctgttacccagactggagtgcagtggtatgaacataactcattgtaacctttaacttgctgtgggctcaagtgagtccagggttagattccactggaactgacatcagaattttttgccaacttagtacaaggtctgcattacaagctgcaactcagaaatttctggaagagttgtaacaaaactcactctgtgagactgtggtcagattatgtaggcataatcttcctctccttcccattcaagtagctgcagtaaaagcaaggtagtgggaaagatctgaatgaggtctgatttgcagaatgtattctttttttctgcttacacaaaacagcaaattacttgcatggcatgatgaaaactattagaatcgtcccaccttagcctcttgagtagctagggctacaggtgtgtgtcaccatacccaactaatttttatttttgtagagattggggtcttgctgtgttgaccaggctggtctcaagcttttgccctcaattaatcctccctccttggcctctgaaagtgctggaattacaggtgcaagccaccatgctcagcctagagttgttttcttcttttaaattgttttctttagattaatttccatttctgtaataactggaccaggatcaaagattctgaagtttatgcccgggaatgctactcattgcccagtgctgccagctaccattattgtgtcagatttcttggaagaacctcagtgtcagtagctttcagtttaccccaaccaagcatgagagccatacctctttgttagtttgtaagtacatccttagagggtggttccaaactctactcttcagaaaatatagtaatatcacaccccacagacttgacattaagctctactttaactctactttgttacttccttctgagttgcatctagagaaaagacaagattagcctttaggaatgttatacttttatcatcctaagacccttagatatgagatatggtctggagttttcttcaagatataatgtagtacaaaatagctggaaacttttctcatgtccagaatatattatgcatttaatacatatgtgtttattgaatgaatatattaatgtctctatacttttggaaagtggagtgattagacagacaattaatacaagcatttcatgtattcaatcattcgttacttatgtattgagggcctactctgtgccaaatactgtgataagaattactgataaaagaataagtaatatgagcatcctgcctcagaagaattcaacatctagaaaagaaaacgaaattcaactttaaaacatcatgttgaacagcataaatatatacgatatttatcaattgaaagaagaaaactttaacccaacataacaagttatataattaaaatatgcataaacacttatgagagcacagaaaagggagtgacttattcagacggacgtaagagacagtgaaaagagcactagggataacaggctattcgggtaaacttgaaggggtaagtggaagcctaatttagaaggcagaactgaagtaggaaatttcaaactgagaataaatgtagaaagaccagaggtgctaagcagacactgtgttgaagaaatccactgtggtcttacatggtggatggtagcaacagaagaggctagaagggtagactagactcagatggtagaggtagaatccatgggctaaggtattaaggtagtttctttttatatatgctcagatcagtaattagccagactctaggaacttccttccttcctttcttccttccttcctttcttttcttttattctctccttccttccttccttccttccttccttccttccttccttccttccttccttccttctttctttctttctttctttctttctttctttctttcttctttctttcctttttttctttttctttttctttctctctctctctctctcatctctctgtttactctctcaacgaagctccaccttggcctccttaagctccaaaacctccgtaagctcaatcagtgacagtccttgtgctctggttagattccatatccctgaacttcaacctgaaaacttccatcagtaagtaagctggtgcaattctaggactcaccttttctgttttccttttctcagagatcatagttctttctgcatatcctgatgttcaacatatgaaaattgttattgttttaggtggaaaggtaaattcaagttctgttatcctatcttggctggaagcaatattactggtagtgaattcttatgggtctgcagcaacctcaattctctccttagaagaaagaattcaactgaggggcataaggtggaaggacagaccaaggcaagttttagagccacagtgaaagttttttaaaaagctttagccaggcgcagtggctcacgcctgtaatcccagcactttgtgaggcccaggtgggcagatcacaaggtcaagggtttgagaccagcctgacaaacatggtgaaaccccatctctactaaaaatacaaaaattacttgggtgtggtgttgcgtgcctgtaatcccagctactcaggaatctgaggcaggaaaattgcttgaacctgggaggtggaggttgcagtgagccgagattgcaccactgcactccagtgtgggtgacagagcaagactgtgactcaaaaaaaaaaaaaaaaaaaaaaaaaaagctttagagcaagaaggaaaagaactaaagtgcacttggaaacttggaagagggcaaagtgggtgacctgagagaccaagtgagtagtttgaacttttgccttggggttttatatgttggcttatttctgggctcttgtgtccattctcccttgattcttcccttgtggtgggttgtccacatgtgcagtggtctgctagaacttgagaggtgagcatgtgcagtgtgtttactggaattgtatgcatgctcacttaaggtgttcttcccttaccaatcaaatatccctagaaggtcacataccaattaaacttcacctttttgtctctgaatgcacatgcttgagcccacttgcccagctcctgagatcttatcaggaagctgctgatcaccagttttaggttctctgtctactgagagactacctgataggtggcttgtgggagtgggaaggaccttcgggtctgcactaagcagacgtaatgaactaatggccctcctgaacaggaggtttgtgagagtgatagggctaaagcctaaaactgcaatgcctgggatttcctctgctttttcaactaaaaatggctctttcacaagaagctgcaccctgtatctcctgttttctctgtgtgatctgaaattgtcttgcacacctaccaaactgtctggcttgaagacaagtctgcctcttcttttacttcacatgccatgtgacttcttaaacacacacttcctgttattcatgcacccatggctcttattgcatttgtgcagcagcaaagataagagctcccttgcagacatcccccaaaatttataggtgtttttatcctacaagcttggatgacctccaatcctgtccctatctgttggtacattgccaaaaaagacactaattgaaaccccagctctgccagtgctttatgatttaacatatgctttttgttcctgtcacaacctagggccaagtttttctggggtttttgaaacagtttgtcctcctgcatagggctatgacactttaaggatctcacctacttgcttttttcttttttttttgagtcagcacttcttaaggggaggggaaattcttcctttaccattagcaagttcttgccctaagtcccaaggcctccagaggttcctcctttatgtcgagggcaaataaacattgctctctcaaatccaagcattgctgtttttgtaagcatatgaaggcttttcatgaggtttttctcgcttcctcctacttcctcctgtagtctccatttctctaatcactcctactcccttttcaatatgctgcaagaccttcaaggtcatatttaaagggagggaagtccagcccccttatggcagttattttctttgtaatacttggcctaagaatggaatgagagaaaattacaaaagtcaatcttggaacccagtacccttatgcaggaaattctcaaattagccttctcagtcttttataatgaagaacagaataaggaggacagggctaagaaaaagtagaaatgcagggaccagaggcaggtatattgtcttctcaatactcaagagtcacccttctacaggggacccctaggctgcccatcagtgagacatgacagaattgaaatcctccccctgtcccccttgaacctggctggctactactgccctgacagctagcaagaggccaaatccacagaacaaccactactacccctctgtcagcaggaagcagttatagaagactgacctttgtctatattccccaaataattggggtcttgaactcatggtgggggaaatgttacacaaggtagatagtcaggcatgagtagggcaggagaaggctccatgccccacatcccacacccagatatgtcaggcaaccatcaggtgatggtccagtggttgttaactgtctctctaaaataataattggtcacagccagtgccagccaggttcagtctccgaatacaaaaaaaaaccaaacctgaaaatggtgatcagcagcttcctgacaagacctcaggagttgggcaagcaggcttaagcatgtgcattcagaggcaaaatgacagagtttaattatgatatgaacttctagggacatttgactggtaagggagaatgccttaagttagcatgcatacaactctatgctcacactacacatgctcacctcccacatgctagcaggctgctgaacatgtggacagcccacccccatgggaagaatcaggggagaatggacacaagaccccaaaattatgcctacatataaaactcagtcaaaaggtccaactgcacacttgatctctcaggtcgcccacttggcccccttccaaatgcactttacttcttttccctcctgctctgatgtttttaacaaacatttactgctaccccaaaacttgccttggtctctccttctgccttctgcccctcagtcaaattctttctgttgaggaggcaagaattgaggatgctacagacctgtacagatgcaccaccagtaaaggcttttcactgatgttctaaaatcacaaggttacctagttatggaatcttgcatcagaccagttttaatgcaacactctctcatagccctaccttcacttagaagttactttgctctcttccaaacatcacagttccaaaatagaacacagtgacacaacatctttcttcatttttcaggtagttgtgatgttatgaagtgtttaggtaatcccaatttgatgcagctagtcaaatatgtaaaaatgctatttttgtattacttagtaatttctacaaaatgtaccacagatcctagtataaggcttaaagatggaattagcctcaaagtgtgaggcttggtgaaagtacaagttttgaatatgatgcagtaataatttttgaaaggttaattgtttatatttagaccatgtcagaatgccctttattaaaatgcctatatcaaaacatcatgcaatatataggactttggctcaagtgggggaaagaagaaaaggaagaggaggaaaagaggagtggtggtagtaatcaaataaataacaaatgttcagtgcttaatataagacctacaatctactaagcacattgcaggtattcattcctttaatccttacaaaaattctgagtgatatagtgctattatcccaactacctttgaggaaaccaaggtacagagagactaaataactttcccaaggttacacagctcgttctcagaggagtcaggagaatcactaatagcaactaaaattcaaaagatattatgtgtatttaaaaatgtactttttaaatctaaaatgaaattaatggctggaattcatcaaagggtaagaaaaaagagctaaaaaactcagagaaagctccttgtgttttctacgagtctcattttctcttggatttgctgaggactgcagttgaaaggcactaaaaaaaaaaaacctggtcattaataaagaacttgctactcttgtttcagaatctcctctagcttttctcaatcctgtatgttccttggttgtctttctaggctaaggtatcctccatgatgttaccattgcaaggtgcccagatgctgcagatgctggagaaatccttgaggaagagcctcccagcatccttaaaggtgataatggaaaattctgagaggagtaaagaagacaaacttgatgtgaaagaggagggaaagggactgatatttatgatgcacctattttgagccaggcactatttcatgttttctctcatttagtatgccttacctctctacaagatgtttactgtcatgtccatgttgctgttaagaaaatgaagactcagttaactgattttctcaatatatcacaaatactgagttgcaatgctatgatatgaacatagttatgccttagtctaaacactgccttttgctctgtgctaactcaaaaaattacttccttgctcctttccaagaagcattttataataacatttgaaatttgcccagagttctacaaagttggctgaggctgcatattaatgtttaacttgtttattacaaaaggacacttgccagtgagaggttaactagaatgagtcttctttgaaattaataacagatcaatttctattttaatgtaaatttcccaattgctctgaattgaaggcaggtcgagttactttagggctagctcccagtatctctcttaacctggtattaataattagaggtctaagaattaaataaaacaaatataaatatatatatataaatggatatatataaatgcctacatccagaactatgcaagagcagttccaatgatagagtcagattcttgtctgtatgtatatatttagcaaccaaatggatatggctcactccaatggaacccaagtacaattgttcatgtatatgtgtgtgtgtatctctttagtggacaattatttttacatttgtattgttttagaagacattcctatatagtgcatacatttcaggtaaatacattcaaattacccattccctaaatgatttgttattcccttctttcagtataaaggagaaaatattagcattcttttatttgtgattatatagttttattttcattcatcagagatgcattgagacaacaagctttattctttatttattaacaacacagtatagcttcaagtaaactaatccaaatctaaagttacccaccttgaagctcctactaacattaatcaaaattacctaatatttaagtggcttcacatgacaatccttaagatataaataacctcccagagagacagaacattttttttggaaggcatattagttaagacactgtatgtataattagttgaggtatttttatgattagtggctactcttaaaaattctctaggctaaacattttgttcaacactctgtgatgtagaattttgtgcttcaaatttctccttattccttgtgttaagtggatcctaaacattttgagaaaactctaggtgtttcccaaggattccttcttgggacccctctatggtgagataaggaggccctcatgactcctccctttcatgaggaaatagcattcctcctcttttgttgtatactaaaagacatacattttcccctaatggaactctaaaattttttatgccagttgcttttaatggaggtgtctaacctagaattcactgttactcaacaattacttgaggcctagttaagaaaatgtccatccattcttctgagtgttagatataaaatgcataaagatgtccactacaactgattcaactgataacagctgcctcgctatgttctgttcactagtgtgaaaggaaaatatcttgggcccccaaaatcactaaagaaaactcaagctggaaactgcttagggcaaacttgcctcccattctatttattcaaagttgctaagatagatgcatatctgattgcctctttggaaaggctaatcagaaactcaaaagaatgaattgtttgtctcacatatctgtgacctgaaagctttctccctgcttcaagtcttcctgccattgcttcaaaatgtcccttcttcaatatgtcccacctttccaaaccgaaccaaagtacttcttacatatattgatcgaggcctcatatctccctaaaatatataaaaccaagtgtgccctgaccaccttgggcacatggcatcagaacttcctgaggctgtgtcagtggcacatcctcaaccttggcaaagtgaactttctaaattaactgagacctgtctctgatttttggggtttagattttggtaaccatgggagcattctgagtggagatgcccctgacctttgacaaatctcctatcggtgcttggtaccagtatggctgactttatggctcaaactaataggacaatttgctgaggtctgtgagcatcccctccagagaatccctgatctccccaaatttggtcaaattattaagtttatttattcctaattagatggggaggaaggtctctttgaagaggaacctctactttactttttacacaactaaagttagcatttaacaactacctggtgttaatttctgcttacacttacggtgctcagaaatcatgtaatttgggtgatcattgttagttttgcttaacttttttgttctttgtatttttcttggacaaattgaaaggagaactctaaattatgaggaacaagacctctgatgtgggaggaaaatggctagcaaaagagaaaaaaaaaagattttgaattttaactactaaaggggctttatttacattataaggtcacctttttgccagccagaccaaactgaaagagcaatggctgtacttctgaaaaagcagcatttggtcctaactgaaatatggtaataagatttttttaaaaaaattaaggagctcaattgttaaaagtcagcttaattaaaaggctaacatccaagatgtatgtgtgtatgtgttcatgtgtgcatgtttgtatttgaaggccttcatgtttttatttttgtttctttttctctcctaagaccttgtctattttcgagcaaaagtttttttgttttgttttgttttccttctcagttgactgaattctgttttcacctgatttttttttaactaaaatagttattgcaacaaaggctacgtggttatttaagaaaaaaatgaagtttaattttatttttaatttggctaaaagaaaaataaaaacatctccttctatcatcaccagactttttctctctgtaccttatgttgtaaattttactatttgattttcacctgagttgtttcctttaatgtgcaaatttaaggctatttttctgacagctgcctagggttttgaaacaggttaccaagaatctgaaattctaagatagaaaaaaaaagtggggtgatctttataaatctataaaatgtacttccgttggcatgcctaattcatctttatatgtatttatgtattgtatacaaaatatttcactactaaaaatatataaagtgttctaattaattgacttaaagaaaaaacaaaagtgcttaaatgcgatactaaaaaagaaaagactattaaaatcctttttcaagtttatgtaacttaaataaaatctttaataaataagctagctttaaaatttttggtaaagtaatagtagaaatgtcttaagaattaccagcatacattttgtttgcatttattaatcaagcaaatttcatacttatccctgccaaatactataagttgtcaatgtttggcatacaggttacataactatgaacccagccccaaacaggataatcattgcttgtgtaatttttaataaataatgcattgatatgggtttaatgaaaatagctgcatctttaatttagtaagatcaccataacttctaatcctgtgggtttaggcagtctggtccacagtcaataaggaggtttgtttggggaaaagactgttatcctctttgtttcaaagctaaactataaaccaagttcctcccaaagttagttaggcctacgtccaggaatgaatgaggacagcttggacgttaaaagccagatggagtcagttaggtcaaatccgttttcactgtctcagttataatcttgcaatgtcagttttataactttaaatcatgaatatcacagttttcataaataatccaggtaaacaattaaaataattggggtaatgtaattggataaatatttgtaggcaaattggtcataatttagagtatgaaattatattaaattaaataatagacatttcattatttgggtatcttcccataaaaatatattgtaggaaaatattcttgctaaaaaataaacaaaactgtgtgtgtgttttttaaagaggtgaacaagtttttttccaattcaaagcttatttaaaggttatgtataaaacaaggtaaaagggactaggactaaaaaaagatatgaaaaagctatttttaacaaaggtttttttaggtaaaaaagcttaaagagaaataattttatataagacagaatcttgtgtggtaaatttaatcctaaactaaaataagtggttgtttaaaaaagagggatgttcaggacaaaccagaaattccaagcatgtcatgaacagtcggtgtaagtcacaataagaggatttctatatttaaaaagtttatatgatcaagttatcatattaagttttcatttgcttagaaaaaaactgagataaaattttttaattaagattattacatccatgtatcttcctgtatatgcttttaaagtccttctaacattgaatcacagagctttaactcctgcatctataaagcataccaagtcctgctaaattttaaacactgacagcaattaaagcctcatcttcaggccctgtagaaaatgccaatcaaaataaactgccttcctgagacacagggcaataaattaaagctactcaactcctcaaggcccagggactatcatggaggagttgggcatgtaagagtgtaatgcctgattttgaaagataaaataagtttcatttctccgtaaattaatcattaatgtcaaaggaacactgatgaaaaaccagcatatagacccctgtggcagattaacaaggctctcttgaagcattaaccaactctttaataaaggttataagaggcttaaggaagttacattttataatatagattaaattttatagattgtttacaaattttgaaaaacaaatgtaattagcttcatgctgtttttattggggcttcttgtttagaaaattaaatttcctttctcaaaaaatgaaggttttcactgttttttgaagtctttgactttcactttagttaaataaatgactttaaaatgacctataatcctattttgtaatttcaagtgttttaaacttacatttgacaactttccaaaattgaactataaattatgtctttttctgacctgattaattctttaagacagtaggttcccctaagtacaaaaatgacacaatttggcttatttggtataaaaattatacagaaggcattgccaaatatgaattggtgtttggttttctttgggctgtctttgtataaatatgttattggtatgtgttccaaaattatgggaaactcctgtaattataatataatttagtatacattatcaataataatcatattgtgtgccacagaggtaataaattttcttgtcaattgtatcttttgacaatggctgccttaaacctttttttaatccatggaaaattattgtcttgttttggtcatctttagaaggtggttttataatcagctataaaactccaacaggtgctcttaaatgtgggtttctgatactgtgtgccacagaagtaataaattttcttgtcaattgtgtcttttgactatggctgccttaaacctttttttcatccatggaaaattgttgccttgtgttggtcctctttagaaggtggttttataatcagctataaaactccaacaggtactcttaaatgcaggtttctgataactttggagattgtgacatcagaatagagaaaaaactttcaggactcatagagagataaaatgttaatgagtatcaagcaaaataggaattaactacatggactgaaccaatctttttcacattttacttaaaatgtttgctgatcctttgattttcagtcttaaaacttttcttttgagctattgacagcttttaacaatttagtatactcctatgaacaaactttggagcatgtttgtttctctctacctcacttctccagaatttggaaattgtgagtattcttaacttatggtaatacatttatttgcataagtgcaataagaatctgttttcatttgtaacaggaaacaattggagaaactggttattttactaaggctttaactgctttcctttaagaaatcaaacttgacttctggagccaataaagcccttgaaaaaaatgtccatatattttgtgtacacagtccctgtacaggatttctgactgtggtaaataaagaatgtcactttctaacagacacagaagccccagatttaacatggaacctcaagaggagaagaaattcatccaactcataggtatttgatggcacaaattcatggctaggttttgctataaaaagtcttatctgagactcctcctatggaacaaagtttcatcaaagccaatttaaaagcctatttaaaaaataattattcttgctgcactgtatacaaataattaggccaagtataataaagcaaaccagtcctaccataatttgtttttagtaaaaatgggaaactggagagagaaaaagactatatttcaagactatagtacacctgttgttagattctagtctcgcctaatgttatttttcaatttttattattttctacaatttgaactgaattctatttttcttggctacaagtcttcaaaataatgttttaaatttatttttcttctttttttttcatttttcctaatttgaaataactgaaaactaagctgtgctttcttaaaaccctgaaaactgaagccaaacaacttaaacttcagaaaaaaataacagcaacctgtttacatacataagccactttcatacctgcctattaatgtatggattttagaataatgtggcctatatctatttttccaggattgttcttttgtttgttgttgttttttctccctttcaccctattttctcttcataggacatgagacttcacaacatgctaaaaatgagattttgggacctacccatctagaaataaactgtcctagccgtaagacattaaatgaaacctgagaccagagactcattttattgttaaatgctttctccaaaagattttacaaaaaggatggggggcatataaaaggaaaatatcttgggcccccccaaatccctaaagaaaacccaacctggaaactgctttgggtaaacttgtctcccattctattcaaagttactaagaaagatgtatatctgattgcctcctttggaaaggctaatcagaaactcaaaataacacaaccatttgtgtctcacctatctgtgacctgaaagcttcttccccacttcaagtattcatgcccttgcttcaagaagtcccacttttccaaactgaaccagtgtacttcttacatatattgattgaggtatcatatctccctaaaatgtagaaaaccaagctgtgcccagccaccttgggcatgtgtcgtcaggacttcccaaggctgtttcacgggtgtgcactcaatcttggcaaaataaactttctaaattaactgagacctgtcttagattttctgggttcacactaggtttggggtccagtaggactaaaaaggattttaataaattaggccacaacaatgagaaaaaataagagtttcacatattttcatttttgcaatggataatattatagtgtaaatacattttaataggccccaggtacaaatgtgtaaaaatgtaaccactatattttgccaaaactgtactaaatttctatattaagcctccactcatggctgaaaacagaattaattcagataaactcagacttagtcgatttagagtttttttcaccttcattccctagtctaacatcagtatttcatgtggggtaggggcagcaggagggaaatatactggtatggttctatcatctatccttgatggaaagcattcaagtgcacagcacctttttggtgtatttccatgctgatatcagctgaaacttcatgttcacaatggtcacgagatctatgctgacatccactactgcataccacaaccccaaaatcataaggacacttactgtctgtggggtttactctcactcattctcacctcctaccctctctttcacccctctctctcattagtttgtccaacagggcaagggtggggatctaagaatggacccaggctaggggaccccaagcttattctcttgagcaataggctatagtctctgctgactgataagaattcagttaagctctccagagagttatatggaaacaatgctaaagagttttaaacatgtatatagcctttaaaccagcaattactcttctggatattgtaagaaaatggtaggtacccatgcaaagattcctgtgaaagaacattctataaagaattatttatttgagtgaaaagttgaaaacagctgagatgtcatcaactggcaagtgattaactgtgatgcatccatgtaatgaaattttattcagccattaaaagtaattgaaaattattttgtatgcttgtgaatagagaaataggtacacaatatgttcaatgatgaaaaatagcaaatatcagtaattttattattgaacaaaaatctgtttaatctaaaggctctgatggacaagtggcctgattttaatacagtggttgtctgccctctgtgtacagattaaaaaatagcacacagagattctttgacttagattctccatttggctactttgtatcataaaatgtcatgattttatagaaataatttttgtcctaatcaagcaagaaactttactgtttttttcaaataaaccaaccctgtcaatttcttgggatcctgcaggtttatggaactgtctttcacataaaccatggaaatccattcaatctgaaggctgtggtggacaagtggcctgattttaatacagtggttgtctgccctcaggagcaggtaagtttccatgtgtgaatattcttctatatttatattagctgtgtgcctattacattcttagcaatatggtagagccagggcatgcagaagtaaatcatagtaatagtcaacaagtccccatcctcaagaagctcggagtctgaaagacaagatagatcaaccaataaagtgtgaagtatacaagaacagaagataaacaggatacagaaagaggccaaataaaacttgattaaactatggaagtcaaaggtggggctacccgataagttcagtatacttcttggtggagatttcatctgaactggattttgtaggaaaaatatgcttttgtcaggattacaaggaaaagtggacattctaagcagagaaaatagcaagagcacagatataaagttgtaaaaaaaaggacaatgagttagagtgactattgttttagtccgttctcatgctactaataaagacatatgtgagacagggtaatttatcaaggaaagacgtttaattgactcatagttcagcatggctgggaaggcctcgggaaacttacagtcctgacagaaggggaagcaaacacgaccttcttcacatggtggcaggagaaagaatgacagtcaagcaaatggggaagccccttataaaaccatcagatctcatgaaaacttactatcacaaagacacggtgggggaaaccaccccaatgattcaattgtctccatctggtccctctcattacacgtggggattatgagaactataattcaaggtgagatttgggtggggacacagccaaaccatatcaactatgaaaagcaaaactataatgatagaacttctatacacatttgaggaaacacttaaaattattgaaactaaacaattaacacatttcaagataaaaatgcataagcttatttcaaaacatcagaaaacacaaatatacttttaatgctaataaagttatttaaaaatcactttgttgtgagaacacttaaaatctactctctcagcaattttcaagaatacaatacattgttattaactatagtcaccgagttgtacaatatgtctcttgaacttattcctcctattataactattataactgaagtttcatatcttttgactaacaactacccaattcctctactttcccccaccttacctgctgataactaccattctactctctacttctatgagttcaccatttttacattctacatacaaaggagatcatgaggtatctgcctgtgtttggcttatttcactaagtataatgtcctccaggttcaacataggggaagcaatatgtatgctaattaccctgatttagccatttcaaaatgtatacatatttcaacacaacatattgttaataaatatatgcaatcatttatttgccaatcaaaataaaaaaataaacaatatatgaaatgaataaatttatggtatgaaaactaaactgaaataaaattatttgatcttttattaaatgtggtcttaagcaacaaaatgtgtcagtggtatcattgctgacttgtgagtgggttttttgtgcaacattttccaactttttaaaaagttttttaattctataatagttgtggtaatattttcatccaccttcttcctgtaaataattgtatctgtcatttactaatttgagaagctctttccgtgtaagtggattgtttgtttctctggaactgcaactggtttaaccaacatattttttaaagaaggcattttgaattagtttttaatcttctttggtatcaatatcaagtttcatactgccatggtcatagtttgtgtattctgcaagtctttgaactgtagtaaaatttattcttgtgacataagctttcccttgtcaattgcctttctcttcttcctgttgaggatgatggtggtaagaagaatgctttctaaatggttatgtcttttatttgaaattttaacgtgatatgtggataatgaatagtattgttctggaattttccaacataaattgaatatttgatctttatctcattatttaaagaattcagaaataattatatgcatacaaacccacagttagataaaggaaataagttctaatgtttaacataggatgactatagttaacagcaatgtattgtatatttcaaagtagattgaaggaggacttgaaatgttctcaacacatggaaataataattattctggatgatgaaaactatgacttgatcattaaacattctatgcacataacaaaatattacacattttttacaaatattatgtatcaataaaaaagaaataattgtgatacaccaataaaactaccaatattttattacttagaaatatcacagtataaaattatatgtaatcataaaatataaggatgtgttttatttcctttttcctaatgataacaggatatgacagatgaccttgatcactataccaatacttaccaaatctactccaaagatccccaaaactgtcaggaattccttggatcaccagaactcatcaactggaaacagcatttacagattcaaagtaagtaagaggaatgggatgtgtgctgactcacttatgtgtcctgagcaagttttcatatgacttatacctccttcctccaagctccagactcccagcctgctgtcaattttgttactgtgtggtaactatatctgtaaaaggtggtggacagcgtgggaaaccctaaaatttgcaaagaatgggcttcataaagggaactatagtataattccttggtaccaaggatttatgacatattttgcagctgtatccagaccttttagggtgattggatgctgaagaagagccttccctctggacttctattcctgtaataaaaatgatagcttatttggccatagaatacttcccaggtcaccaagaacaactatcatggttccaactatgctctctggagattctctaggatggcatttgcctattacttgctgtataatcttagttaagtgatttaatctctctgagattatgttcctcatatataaaaatgaggaaaataatgttacctaaaacacaaggcactgaaaagattaaatgaaagtgactaggaagtgcttagcataatacttagacatattagttaatgtttgctgcatagcaaacctaataattctgtgaatcaaccatttgggctgagctttgcaaggcagttcttccactggtcttatctgggtttactcatgtagctgtagttgatgggtggaccatggctgattgctcttacacggcctcactcacatgcctgaatgagagttctgctgttagttcatgacagctggtgactgtggtgacagcatgatggcaacatgtgtcgctagcaggctggcccaggcctatcttaatggtattggtcttaacataattggtcttaaccaggagcaaaaacaaagggaaagccccaatggggcaggcacttttaagcctctccttgcattaaatttgctctttccattgatgaaagatggtcaatgtggccaaggtaagttgcagcagaggaggggactatctggggaatggattccaggagatatgtgcaaatcatgggtcattgcctcatattattacactaggaatgtagcttagtagatgttacctaccgttttttaaatttacctactaggattatcaaaattgctacacaattacgcagcccagaaaacttggttccagtgcagatactgctgttaataacacaatcataactgaatccatccctaagcatgtttttgcttaggtaaaacagaaaaaattacacaaatccttactgtttgaaatgcttcttccccagtgctgtaaagaaatagcacttgaacataaatttaatttcctcagtaaggccatttttactttctgcagaaagggtacactcaccagcaattttgccatgagaactgaacagaggagacagggttatgtataacctgacatgtccaccctactgttgtgtctggtttccattggctggaacagggcctcacattctgcatttgtcccaactggctagcaacttaaaaccttttaaaagagataaaggcagaggagaacaaaggaaggggcaagtaacttgtggaatgctgagaaaggtaaaacatctccaagtaaggaagaggaacaggctatggcctaatgcttgcttggaccagtataagtatgccagggtaaatatttaggctaaactgtgggagctaagaacacaaagtacattgatttctttattatcttctagcagttatctaagaatgctagcacaggtctttgaataaattttgcttctagaggaagttactattgattcttaattagatggggagggaagtctttttgaagaggaatcttcactttttaaattactattgacatgggtcacacagtggtagcaccaagcccagaaccaagattttatgatactaaatcccagacacttcttactccactgcagaacttcagtctagaatatacctaaaccatttcatctctgtttattataccgtctaggttcacagcctagcctgaatgaggctatacaaaatcttgcagccattaagtccttcaaagtcaaacaaacacaacgcattctctatatggcagctgaaacagccaaggaactgactcctttcctgctgaaatcaaagattttatctcccaatggtggcaaacccaaggccatgtgagtttgataaaatccagtctataccactcacacctctcaagtaacctcccaacttctctccctgcattcactctggctttcctacaatcaatgttgtacaaagaaatcagaattacatttttaaaaaatgtaactcagaacatgtttctctcctgcttaaaagactccaccatctcccttctcatctagaataaaccaggcctctggctaccacttggacctttattgcccttcctgctttcttcctccaacagctctgaccttcactctgttcctctttcatcacaagctcatctatattccaggacttcacatttgttatttcttctgtctactctgtctctcaagacaatagaggtcacagcaaatacaaacctttatactaatggattttgttttcttcttggaccctccatagcaaccaagagatgtttaaactctcatccatggatgttacccatgctcacttggtgaataaattctggcattttggtggtaatgagaggagccagagattcattgagcgctgcattcagacctttcccacctgctgtctcctggggcctgaggggacccctgtgtgctgggatctaatggaccagactggagagatgagaatggcaggcaccttgccggaataccggctccatggccttgtgacgtatgtcatctattcccacgcccagaaattgggcaaacttgggtttcctgtctattctcatgtagactacagcaatgaagctatgcaaaaaatgagttacacactgcaacatgttcccattcccagaagctggaaccagtggaactgtgtacctctgtgatgccaatcctgaacataagacagtgttgggcaggtctgggcgtataatttgaggagtggatggtggatgaaaagaaataataaattgtaatcagcagtaaaggagtgggcactgtttggactctggggaagcagtgtgatgttcaacagcatcgccatggtccctgcattcacaggtttctcagtgggaagcaggcccaggtcctcttacatttgacataagcaatttacctccccacatttccaggacctctatgacacttcatcagatacatattgctccaaattacttctcctggaatccctggttcctcagttgcaagacccttgccagtttttctgggagctaggaagaggtgaattaaattttctgagcactatgacttctttctttctaaagcctttcccttatgatcaacaagtggactctcctcagcaggtctttagagattatcctctcctgttattgctactttataggtacattaaatatactggacacaaatatatatgggatattaggctaaatacagtatacatgatatagcagggaatgttactagaagaaatatcaactgatgatatcctatcctctccaagctcctattccaggaaaaaagatccaatgttttttctaaagatgagcttccaaaacccacaactcctaaataatacagaaagttttgtgtttgactgtatacaatttttattgtgtttgttcaagctaagtggttcatcatggtgacagcatgaaaggaatgagtgtatgaaaaggtgaaggtgggagcaccttgacccagggatgtgatggtttattgaggagagataggagttgaagggagaggagacagcatgaacacctgcttgtccaattagcctcagcacattactaatctcagtttgttcctgctgtaacaaaatacctgagactgggtaattcataaataacagtctgaacttatttgtttatttaaaataataataaaataattaaaaatttatttatcac

SEQ ID NO: 860 - DNA, 13729 bp, Homo sapiens; identical to SEQ ID NO: 632
  source 1..13729: mol_type = other DNA

SEQ ID NO: 861 - DNA, 32744 bp, Homo sapiens; identical to SEQ ID NO: 633
  source 1..32744: mol_type = other DNA

SEQ ID NO: 862 - DNA, 9577 bp, Homo sapiens
  source 1..9577: mol_type = other DNA
tgcattgtgggcctcccgacatggtctgcgagacgaagatcgtggccgccgaggaccatgaggcgctgccgggggccaagaaggacgcgctgctcgccgccgccggcgccatgtggcccccgctgcccgccgcgcccgggccggccgccgcgccccccgcgcccccacctgccccggtggctcagcctcacggcggggcggggggcgcggggccgccgggggggcgcggcgtgtgcatccgcgagttccgtgcggccgagcaggaggcggcgcgccgcatcttctacgacggcatcatggagcgcatccctaacacggccttccgcggcctgcggcagcacccgcgcgcgcagctgctctacgccctgctggcgggtcagtgcgccgggcccccggctgccgcagtccctcgggccggcgcggagctcccccgccccggcgtccacgcggaccccgcgcccggctcccggggaccagcctgggaagccccccgctttctgccgcgccgggccccgcgcagggctggctatgggcgtggggatgggcgcagggccccgagcgggccggagccggggagggtccggggtccgcacctgcgtccccgccgcgcagccccccacccccaccgcctcccctgtcccctcccgggcatcctgggtgggggcgggtgccagggcaggtagcgcccgccgcggctgggccccggcgagtgcctaaatataatctgcgggcgggggaggccgcctcccgctcggtgctaatttatgaggggaagacagccggcgccgcggggggtgcgcgcgcctggcacagccggggcggtcgcagagggcggccccttcagcgtctttgggtgcccttcccctcagagcttcctgccggggtgagggggttcgctcccattttacagatgaggcgcttgaggccgcgtagggaggacgcgactcccccaaggtcacggcagccgaaatgcggctggaagcggtgtggggcctccctgccctgtccctgccctcagagctcccggacgctggccaggaagggctcttgctggggccctgggaagagggggtcctggagcccgaggctggaacgtgggacaccccccttcctcctcccccctcccccctcccccgcgcggggcctggtctgcggggcagctccctgccaggatctgcccaccttggcttcagtaggccagcgtgggcagagtccttcccggcccggccatcccgagggtgtcctgccgtgtttggaagctcagagacccgccgaggctcattccaggcggtgggggtgggtggggtggctgtcttcaccgcaggaagcttggaaatagggagaagtagaaagcacccgagatgaccccggctcctccaccaggagcgcggccgggcgcggcgtccctagcgggcttcgccggggtggcgtctctggggcctggggacccccgccgcgccgctgacccgcgccctctgcccccagcgctgtgcttcgccgtgagccgctcgctgctgctgacgtgcctggtgccggccgcgctgctgggcctgcgctactactacagccgcaaggtgatccgcgcctacctggagtgcgcgctgcacacggacatggcggacatcgagcagtactacatgaagccgcccggtgagtcccgctcccgccgctccccgacctccgccccagacagccctcgggggcacgcactccagcgacctcagggcaggcctgggcgagggccggcgtgggtgggcctgagccggggcccctgtgacctgagccttctgggtgaccgaggcctccggtgtcagcggggctgggggaggcacggccggttcctcccgctgagtgacctgagctggccctgcgacgcagtggctccaccgttccctgctgtggatgcgtctccctggcgcctgctgcggtggggcaagggccgctgggctctgtgggtcccatctggtgtgccttgcggggatggggttgcctgcagtgccagggtcctggggggagagggcttgtgtggcaggggccggggaccctattggggcacagaggatggggtgggggcaggggacctgaccttgagccttggccttcacttctggcctgatcgctgggccgcttagctgaagggttttgtcccagcctctgtggccttctatagctggaggagctgggtctgggctctagggggggtgggggttgttctccaccctcgggctggcccccagccgctgagccacaccggttcccccatgccggatgccgcaggggtgaagactctgctctctggggtgggaggctctctgcgatcctggagcgtctgtaggccaacgagagggacagagtgtggcccaaagggttgggcagggtctgtcaggagcccggtcagtgtcaggggaggggcagtgtctggcaccgctggctgccatgctccacccccgcgccacggccttggtgcctgctgctctccctgaccctttcctaaacccaaacagagcatctgagcagcccctgagccctggccagcctctgcttgggaggggaaacgggccatgaggaagcacaggccacagcaacacagggggctccggtgggcacacggggcatggccctgctccctctgggccgtggcctccctggtgtgagggagtggaggggtagctggcagggctgcaggaacaccccacgagggcagaggctggatagctgctgatggcccgtggtggattctgggagctgcttgtgcacatggggaaaccgagtcttgggaggagtgaggtgtgcccagggccacatggtgctgggggttgctacttctgggatggccctgatctctcgtcttgcctgggtaggtagaggcagaacccctgggtggtgggcaggccagctggtgggagggatactggtccaggatcccctccttggaggtagagatgctgtgtgggtagggagatggggggttgggtgtgggagaccccaggggctccaggacagggggccgaggaggggcagccctcctgggaaccctggagctgcacaaagcttggagggcccagctgctcgtgtctgtggcgatggcagcggtgcccagtggctcccccccacgctgcttctccttgaagggccttcagtacccctttagctgcctgccaggcctcagtgtccagcagtgaaggagacagaggtccccttcatggagccagcaggctggtggctgtgcagaggggcaatggggagggatgggagggcttcccggggctcggggcaggtgcagagcctccttgagtaggaggctggatgggccacaggcaggctgtgtggccctccactggccaaacccttggtcttcagagaggtctctgggtgccacctctgcctttggctgctggaggtggctgggcttcccctgtggccagtgcctgcaggttccctcccacaaccgccccaacctgcccctgcacctctcctcctcccctgccggttcccctcccccacgaccgccacctcctggcttcgtgcctgactcgaggtgagaattgggccgtgctgtggatggggtgatggcctggccacttggcctactgccaggagaggccggggccagaggggccatcccctgtcccccacttggatttataggaaagctcctcctgggctgcagggagccttctggacgcactttgctgacccctgccctttgcggccctctgctgtgggtgctggagtttgccgtgatggcccgggtgaccctgggtggccagaagccacagcagtttggctgcaccatggcctgttcagggtggcccgggccatcaaggcatttggtctgggagtagctgggcagagggcagcggcctgactgggcaaagcctgccccagctcttggtctcagaggagggactcgggcctttgaccactactctgagcagcgcagcctccaggcttgagtgggtcctggctgttggcctgttgggtaacaggtgttgggctggctttctctgcttaaggagctctggaggggggctctacctgcttgtcctgaatagtggctgccccctcccttggctccagcagagctggtagctaggccccgggggctgccgggattgggtgtcccactgccctggcttggtgtccagctggagggggcagtgccaagggccctgtctcaccccagaggtggaggggtctccccagccttcctcaccgggtgtccctgaccgccctatcccctgcaggctcctgcttctgggtggccgtgctggatggcaacgtggtgggcattgtggctgcacgggcccacgaggaggacaacacggtggagctgctgcggatgtctgtggactcacgtttccgaggcaagggcatcgccaaggcgctgggccggaaggtgctggagttcgccgtggtgcacaactactccgcggtggtgctgggcacgacggccgtcaaggtggccgcccacaagctctacgagtcgctgggcttcagacacatgggcgccagtgaccactacgtgctgccgggcatgaccctctcgctggctgagcgcctcttcttccaggtccgctaccaccgctaccgcctgcagctgcgcgaggagtgaccgccgccgctcgcccgcccgcccccccggccgccctgtccgcctttgcccgcctgcccgccgcccggcgcggcctgctttcagacgctcaattggcgtttgtgttgggtttccccttttcaacatcctgcggttgtctggctggttccggggggtgcggggctgttgttcttcggcgacactttggtgggggtgggttgtttgtcgccatagcccctcgcccttccccacctgcctgggcggcttgccacctgaagagtggcatcttggaccaccgcggctgtccatgacgctgccctgcccgccgccactggggaaggcccagccttgctcaccaagcacagaacctctgcagcagatcccggggccaggctccggccccgcctgcggccccagcgccactgcctgtggaggccccagctggccacggcgctgctttgctccgcgcatgccgagggtgtggcccggctgagcatgccgcatgcacacagccccgccctgccgccctgcccagactggacccggagacccgggctggtgagcgcccctgtccccagcccccagctggctgtgggagggcctgcccctgcccccacctcctggagggcctggtctgccccgcgccgcccggctctgtccacacctgctttgctctgacgccctccatttctctggctccggcccctcccctgcctgggctgtgctgactggtgtcatcacccaggtgactcccatggcgtccgtggcacagccagggtgggggtccatgggacccctctccccagtgcccactggatcgtgctggcctctcccagatgtccccggggacctcctgcctctggctgacggtccaccctgtgaatcttatcagcccaggctgctgccaacagcgcccagcccacagcttctcccagcctgaaaccaacacattttctaataagttatttagacagaatagcactctgcatgactttaattcttgggacaaaacggtagtttgtaccctaagacacagtttctggcccagtgtgatgggggtgggtggccgggtgggtggagcgttttgctgttggaaacctggagggaaaccctgattggatgtcatttcctgccatggagcacgcctcccagccctggcctgcagtgtgggcagggtggggggcaagggagtccgcagcctccgggaggaggggcagggcgctgccttgggctgggtgggaagaggggtggccgcctcggcttccgctggccatgctcctggtctctccttcctgaggtcacaggcaggggctgccctggacggggggcggggggggtggcctggaaggggagacagaggtggagggtggcacaggctgcacattcagcttagaagtggacctggctttggtggcaggagaagaataaacacttgcccagacccctttgtgtgggggaattggggaggggtcgtggcaggcagggtgggccacggaactgggtcccaggcatcaaggccacgtgcagggccatggagggatgcttctcacgaggcgcttcagaagcgagcgaagggacagagaagccctgcgtccaagggccttttgtcctgttagcaattgaggtgtgcagagcactgtacagaccccactcccctgtacattcctccctggaggtgcccggtccccgcttggggatgggagttttgtagactgtacagaaatcggcaccctattttcttgcagctcagattttgttaatctggaatatacagacagacgtaaagtgttttagcaaaatggaaacaaacagttgtgcctttttcctcttttggtttggtttgggtttggcctggggctggtcccagttggtgcggggcatgctgggggcaggaggggcagggcgggccaggtggagtcaggtcttgggggtgtcatgtcggggtgctgccagcgtcccttggtcctgtgcctttggagcctcgggctcctggggtgcagggtgcttgggggtggctgttggagcccaccgacgccagggcagggcctggaggcccagggactgccagtgtctccttgatattgatcctagcagatccccctcctgggggttctgagagtcctgggcagtgtggccttctctcattctggtggcatctgcgcccgtgagtgacctcttccttggctgcactgccctgtgggtggtgagacgcttggccttttttgttgctgccaggacttggtagagatggcaggaagggtgtgcggggtggttgtgtgcagaaccctgccgcccctgaggtgagcagaggcactggtgtgcctgccaggctggggcggagctgcccggaacccttgccaggccaatgtgtagcttggtggcgcccttgaaggccactggggggtaggtgtgtcctcccccggggctggaggccgggtgcctggtgggtgggcctgacctggcccacctcatccctccagcctgggatctcactgctctgcacatgtgcactgacgtgaattttatacgtttgtagaaactctgatgtaacttcttctacctctgaagcgccctcctgggccctgctgtcacgtggctggtgcggcttccccgagtgctggccccctgcccgctccccatgggcacccaccactcaaactctgcgtggtgaggcccggggaaagccaggccgggccctagcactgctcaggggcctggggctcctgggatttctgtgtgtttggaagcctctgtttttggagtggggggcgtggaaggcgggaggggctgacagtgcctggggccagagctgggcgaaggaggacatcctcactggacgagcactgcaggcctgacgagaggctccgggcagctgagggctgaagcgcctcgggatgccccacactgcccagagccacgggtcttgctgtgctgggggtggggtggccccaggcagctgccactgcccaggtgtgagtcgctgcagacctggtccctgagggtgggaggcctgcttgtgctgaagctgccatgtggtctggcccccagaagggctcctgagcgtagggagttgagccccgcagccgtggcggcatctcctcctccttcctccgccccatgcccagccttgcttccggctggtggcatgccttggggccgggcagcaggtgagaagctgcccccggagggaggggccaagggctgggtcagtctggcctgaggggtggatggctggccctgggggaaggctgggcctgggaggccctgtggacagcaggcctgaggccacgaggtcctggggccacccctctcctgctctgggtgtccttctcagagaagatggcagaaggctgcaggccctagaggggacgacgggctggggacgccctgagcttcctggctgtgtggcaggtgctggggaagctctctgggccatagggacctggctcccctctgagaggcccgcctgccctggggcacccagggctgtgctggtggcctgaggctgggaacttgggttcctgggctctgctggcgcctgggctttgtgggggccgaaggtggttgccccgccgggcagggggctgtgtgggccctcgtggggccaccttcctgtcagtgcccgagggacggtgggacagttgcccctgcgccaagggagcccactgccatcccccgtgggctggcgctgcagtcgcgcaccctgtgttgcctgctgacttgcttatgtctgtttggaagctgcttctgtttggccacaggcctgtgttcctgggctgatggccacagagctgacacttggggtttgagttccagacttgcagaccctgggatccgcttactcctccgcgccacggctgctgtgcttccagaggtggcgtgatgcctcccggggccatggtggggtgaaggatggcgagccggacataccattgttggatgtattttttttaaaacagcaataattagccattttaaaggagggatgtacctgtgtgtgtgcatgtgcacgtgtttgagcgtgtgtgtgtgtgcaagtgggttcttggatatgtgtagtgtgagcatgtgtgcatgtgtgagcctgtgcacgtgcatgttgtaggtgcataagcatgtacacgcgtgagcatgcatgtgtgtgtacacgtgtataggtgtacatgtgcatgagttgtgtacatgcgtgagcacgtgtatagatgtacgtgtgtgtgcgcatgtgtgcgtgtacatgtgtttgtgtcttgggtatgcataagcatgcacgtgtgtatgaatgtgcgtgtgtatgcatgagcacgtatgcatgtgtgatgcgcatgttcttgtgtacttctctgagggggcacatatgtatgagtgtatgagtgcatacatatgcatatggtgtacgtgtgtgtactttgtgtgtgggcatgtatgcgtatgagtacttgtgtgtggctggtgtatgggtgagcatgcacatgtgtatggatgcatatgtgagctgtacatgtagagtgtacatgtgtgttgcatgagcatgcatgcgtgcgagtgcctgtgtgtgtacttgcatatatgtggctgtgcaggtacccggcggtggtgggctggcagtgcccggggaagcaggtcctgctcacggcttccctgctgggccccaggccccgggctgagcctccctggcccctcttgcccctcagtggagcagggcctgggtggagggcctgggcagctccagggcaggtccggggaggccaggcttggggagcacagggggtggggttcacctgctgctgtttgttcccgaaactgtactgtgagcccacggcgggggcagattgttctgaggccccagatgtgccaaaacagcccccagggtgggggcgagcgagttctgaggagaggggctgcgggggccgggggtgggtgtgtgcccctcccctgaatggcccccaatgctgctgtttttcaataaaaccagagttgaaggca

SEQ ID NO: 863 - DNA, 16475 bp, Homo sapiens
  source 1..16475: mol_type = other DNA
gggcgggtggcgccttggcctccgcctccgctcgcctgcgcgcggccctgcgtgagggggcagaggcgaggtggaggcgttggcgctgccacgtctgggccgcggttcccaactgtggcgcgggcggtggaggaggaggtggggctggcgctgaagccggatccggatccggtgctgtgcacactggtgggggagagtccgacgcgcctggctaggagcgccgaccgcagggcctctacgggtgaggagggaccggggccggggcgcgagagcaggaccgtgtgtcctgggggctggggcgggcctgccctcaggtttatctaacaggtgtgtctggtgccccggccaggcccccgggggtgttgtgtggaggagctgggcgttaatcctcgccagctgggtgcacatggtgtggagcgcggttcccaggaagttgaacgcacgcgcgcctggagcagaggttaaggatgatggccagcggtccggccatacgctggtcttggcctggcagggctggaactgggactggggtcggaacttcgctccccagactttggcgtgggaaatgagacagttggtcgcgctctctgcagccatcggttttgaatgggcacgaacgtcccaggccccttctcttctcccattcccgggcgcatcccacggtggtcggagccattgaggcagctgctccgaagaccacctccgcaccgagtaggtcggcgctttccccagggtacagagggacattctttgtctctttttcctaggctcctacccctagaaataccgagtactgtactgtgatttctgttgcgggagctgatgtttatgtaagccaaactaatttaaaattttcatacaaaattgaacgggcgattataggattcgttttgttaggataatccctcatgaacgaatcctagaatggatcttaagaaattaatttaggcaggatttgctaaataggggagagagcgctagctgtatggtatgatgatgtaaagattggggtctgttgaggatggtaatcgagctcaagatgcgaaaacgaggattctagccccaagtcacttacttgctgtgttacctaaggggcaagtcttgggagttccaggtgctccagcttcctcatcggtagactgggaataacgcctagattgtaaaggtcaaactatcagaaaatacttttgaacattcatgcagttacacaatttaataaatatggccaggtgtgttaaaaatctttaacggaatagattcagaatggattcttgttatcgaaattgttataaaatgaatataaaggaatccgaagtccgcccctcccccattcacctgtacttagaaggttccccaggagctcttgagaaatacataggctggtttagatttggccttagattgtattttttaaaatttgtagatcgacttttaaaatcttcatctccggtgtctattacttgttgctctccgttggttgcttctagcagcagcctctctccccattcgtattccaacctgatacagaggctcagacgccaaatagttgaagttttgtttaaaaaatattcaattgagtgaaaaaatattcaactgatgtgatgactagtaaaaatgaatttggtgtatgctttccgcgatattgtggcagtttgggaatttttttttttttttttttttttgtccttctggattttctgaaatgtgacctacaggtaagtcttattcgttattcattcactaggcattattgggctagggttaggcttaaacgggtcttctaaacgcctgctaatttagcagttaatcagaaaaggttctgaggaatacttaaggaggattagtgtttaaagttcatctaaaaactttaaagaacctaatgatatgatgagattccgcttcacacaactgtgcaattttattcgcagaaatttcctagttttgcaatatctgggcacctgaagatgctaaaagattatttatataaaattacttatttaattatgttctaaacccccttggaaccaggtttcaagtcatatcttgcttcactttgcccagtaccttagttgggcaccagcagaattttacggtttgaggacagagtgagctaaagtgggccttcagtatggctctgttttgtagaatagctcataaaaaaatttttgatgttaatttctgattgcctggttaatagattcttatttcaatctgtaatgctttgtttaatgtattttgactagtctgattcccattttccaaatgtaggttctaagtgctgcttatgacttaatttttaacccttgtacaacagtaagatagggaatttatctactctagtgcatcttcagtgtaatggttaagagcagagtctgaagtcatactacctagcaggactggctacgtaatctgtggtaatccaaattaaaatgcagggttccttgttaaaaaattaagaacttcaaaacagtggcagcagggtatcaaacttaagtgcagggccctgtgtaacggcacaggtcaggggcttctgaagctggccctgttgcctcattttgaatcctcactctgttcttattggcactctaaccttgagcaagttactgtgcctgcttccttatctgtaaaattgggataataatgatacatcgttcattgtatttttaagagttaacatatagaaagttttcaataagtgttagccaatattatttatttttatgatcattcgtggaaaaggactgtctcatcaaagaaaagtacaagaaaatattagtatttcctggttaaaattcattatttaagggcttcataatcctagttgttttcctgtatacttcttccctctcatgaaaattattaaccctatttttcatgttttctagaccacatttttattgtaaacacagacaactttataggaaaaaggaatctagttaaatgtggttaaggttgatttaaattctcttttgagttttctttgaactttgtatttacaactatatgtttaatagcaagaccaaaatgtttaaatagtgtgctgcctcgaggaatttacatttttaatactgtacacatttcactttattaatacttagcctgtttatctacatacctgaaaaacaatgttgctacctaccattcagatgagattacacacaaaaacctcaagggtccaatttagacaaaacactaaaacacgtggactcaatttcatctattaaaaacttgttttggctgagcatgctggttcacacttgtaattccagaactttgggaggctgaggctggaggatcacttgaggtcaggagttcaagaccagcctttccaacatggcaaagccccatctctactaaaaatacaaaaattagccaggcgtggtggtatgagcctgtagtcacaactactctggaggctgatgtgggaagctgaggtaggaggatcacttgagcccaggagtttgaggctgcagtgagctatgattgcaccactgcactccagcctgggcaacagagtaaaaccctgtctcaaaacaataaaacaaaacaaaaaacctattttgaatggctattaaacttgttaaatttgaaatgactgcttgatcatcacaatttctatattttccttaatattgttagaactgggtatagtgtatgcagcataatttgaatcattttgtgtgtgtgtggctggggggacctctcagcagtctacattataaactacgttcttttctacccaagaatgctaacttttggtataacataaacgtaagagcctgtcattctttttgtagttcctgtaaccagcacagtgcctgattcatgaattaaaggtaaaaaaaaatgaacaagaatttataaactttaattttaaatttattgctaactagcatatatcttattaagtacttgcagtattccaggcactgctaagtgcatgactgcatacagtaatgcatttaattctcccagtaatttcatctccattttacaaatgaggaaactagattctaaaagcttaattaccgtagtacatatcacacagttgacatttgaacaccaggtatgaatccaaagctcatgctctttctatgcctaggtttaaatcctggctccgctaattttgtgaccttgggcaagttacttaacattttctcatctgttaaaatgtagataataaccactcctaacctgtaggatggttgaaataaatgaattagtaaagctctttcaacagtctggcacataagaagtgctgagcaagtgttaacttctgttgttacatcacatcacactaccttcccataactagtatattgcagcattgcttatatagttacataggattatacaggcagaaacttattatccatctttaaggaaaagttaagaatatttgccctaaagcatactgtgacttatgaaataaggaacaattgggggttaggttattgggcaaattgttctctcattaaaatatggtttctttaactggatatagaaataagttggggactgctttttttggatctctaatccaaaaatccaaaacactccaaaatttgaaactttattgagggccaacatgatgccacaagtggaaaattccacatctggtataatgtacaaaaacttttccatgcacaaaattatttaaaatattgtgtaaaatatttgtgctatctgtataagatgtatatgaaacacaaatgaattttgacttgggtcccatccccaagatatctcattatgtatatgcaaatatccccaaatctgaaaaaaaaaaaaaaaaaaaaaaaaaaaaaaaatccaaaacctgaaacatttctggtcccaagcattttggataaggaatactcaacttttaattgttgggaagcatctgtttcttttagcaattctgtgctgcacagaagccccctggccccagttttatgctttgtatgatttgtttttcatccttcctatcgttacttctctgttatttagtctcagttttaaaacattacaactagtgagaacctgctcatttctaaatgttcaaaaaagagggggaaatatcatgatcacttttcaatagcatgaaaaacaccagctatttttaagctgcttagatgcaactgagaaacactatacagtttaattttaatttaatttttttgagacggagtttcactcttgttgcccaggctggaacgcaatggtgtgatctcagctcactgcagcctccacctcctgggttcaagtgattctcctgcctcagcctcccaagtagctgggattacaggtggccaccaccacacctggctaattttgtatttgtagtagagacagggtttcgccatgttggtcaggccggtcttgacctcctgacctctggtgatctacctgcctctgcctctcaaagtgctgggattaaaggcacgagccaccatgcctggtccataccacagatttttagaaaatctgctgtgaaaacaaaatcctgcagtgtatatctagcatagccaaggtaaagtatttctgagaatgccaaaaaaaaaaattaatttgagcctgttcatcaattttcttctattcatggttcattgaaaaaaaaaaaaaaagctacatgtggctagacatggtggctcacacctgtaatcccagcactttgggaggctgaggcaggcgaatcacccgaggtcaggaatttgagaccagcctggctgacatggcgaaactccgtctctactaaaaatacaaaaaaaactagctgggcgtggtggcaggtgcctgtaatcccagctactcagaaggctgaggcaggagaattgcttaaacctgggaggcggaggttgtggtgagccaagatcacatcattgcactccagcctgggcaataagagcgaaactccatctcaaaaaaaaaaaaaggctacatgcccagtaagttttttgagagggaatttcactcttacattgcccaggctggagtgcaatggcgcaatctcaactcaccacaacctctgcctcccaggttctgaggcgattctcctgcctcagcctcccgagtagctgggattacaggcatgcgccaccacgcccgactaattttgtatttttagtagagatgggggtttctccatgttggtcaggctggtctcgaactcccgacctcaggtgatctgcccacctcggcctcccaaagtgttggtattacaggtgtgagccaccgtgcacagctgaaagttttctttattggcaagtaagactaagagattacttttttaaaaaaaatttttttccccttgcaatttcctgttgaaacagatgccttcttggctcaataataaaatccaagaacataatgtaaaaaatttaagagcccatgaaaagtcagctattcatttagtagcaccaacccagaggaaaaacatgttttaaaagacctgataatagccgggcgcagtggctcacgcctgtaatcccagcactttgggaggccgaggcgggcagatcacctgaggtcgggagtttgagaccagcctggctaacacggcgaaatcccgtctctattaaaaatacaaaaaaattagccgggcgtggtgtcacgtgcctataatcccagatactcaggaggctgaaagaggagaatcacttgaacccagaaggcagaggttgcagtgagccgggatcacgcctctgcactccagcctgggcaacagagtgagactgtctgaaaaaaaaaaaaaaaaaaagacttgataataaatgggattttatagtttaaaacttactaatttagtcacttagccatttttttatctgatagtaggcatgatttttctatttatctgtagttgtggaatttaatgttagattcaggctgggttgcagtaaaatatctcgcatatgtgctaaagaatgcttctaattgcattaatttatattaactttctcaacaatcataattttccttctattaaataaagtgacttaatattcaaatttttattttagaccttactagaaaaatgaaacctgatgaaactcctatgtttgacccaagtctactcaaagaagtggactggagtcagaatacagctacattttctccagccatttccccaacacatcctggagaaggcttggttttgaggcctctttgtactgctgacttaaatagaggtaatgtacaaaatcctgtgtaaaattagagttagccttccatttttctctaaacattatgatgcagataattttttttaaatatttgacttttggactattttttgtataatacttagtttttaaagtgatggacactcaataccaatgagtgtgtgtcatggctaagaccaaatattactgtgaaatatttaaaatgacttaaatacaacatcactccttcctaattaagccaaaaagatttctcataaacaaaaattaaattatcatgtatgatgacacataaggagggatcttaagaagctggttggggaatgaaggtggaaataattttccttggataaattgaaagggtttttatacagttatttcttttttaacatctaaattctccaagttaacttccttaaactttggtaattaaaagtcaactttgtccttttcacaattatctctttgctagacagcctgaagggcctaattttggcctaattattgagtgtaggaaagttaagattttcaaaattccaggtgcactgttcacatcaatttccggtaacactaatgaaattcactagaaattacaattttaaagagtgtaatctcaacagtgttacttatactttaatttacgaatattgtatttagccatgttgcacctttaagtaaaaccaaatcacatatttgggaaaatctggcaccctttgcattgaacttaatgtaaaatataatacattgaagaatgtatgttctgggtctataaatactggatattaaggtcagcactatttaaaacatcttatgcaggcagaagcactggtaaaacctgttatttttgttatatgtagtgattatagaagaatagggttcactttattctaataattaaaagattatagaaagttctgaaaaaataattgcctgtaagcccacctgcttaatatattgcttattttcatactgtcttccttttgctattctcgtaatttgaaatctgtttttcaaaactaggtttttttaaggtattgggtcagctaacagagactggagttgtcagccctgaacaatttatgagtaagtactataacctctttttcctgaaataaagggaaacatgatttcatttttgtttagagctgttcagtgcccacttctgtttttgttcaaatagctggaaattattcaaagaacaaattagctgttttatacaaatgtttaatgtggctgagttgttctagaatccaaatgtaccagtaactttgtttttgcaaactatctgactactttattagataattattgtaccataggacctaggtgttagctctagaggtttttcgtttttttattgtagtatttcccttactgtggttatttacagaaatttcattaccaaatcaaaaaagcaagactatacgctttaaatttattttggggtttatttgtattgaagtttaaggttagcaggcatcttaagagttagtccacccgtcccctgcccctcttcttttagacataggagaaaataggaatttagagagatccaaagacttgcccaagatcacaggtagttattgctacggtgaggaataaaaccttaattctgtccagtgctctaccactgctttttcctgttataaaggaaatgaagtattattatcattactaaatatttagtaatatttaatagctgaggaattacaattcttcatttccttataatagggaattttgtattgaattctatttgaccctcctgagaatgaggaccatcattctgattctcattgtttattttcattcactgaatttctttttcccattttagatctctatctggaatgagaccatagaaattaacaatatgagagactattagcctcaatttttattcctgaatttttctttgcatgcacatgaattagatgagaaaccatgttatttcagcaatagtactgaaaatccatttgaggggaagtatctttgcacctatttgctatgtgacttggaaaagttacttggaaacagatatgtttttacttccttgcaaggtgctctcaaagcaaacaagagcaagtcatgttatcacaaaacactttccatcacaaagggaaaattaaaatatattttgtaaaaatattttgaaagcaaaagactaaaaattctagaattgagccatgtaaacatgctcttgttaaaatgtgcaaaggttatatttgaatatctattgagtataaaagttaaagagatctatttaaagtaaatgaagaaattgaagttttcattagtcatggaagtggcaacatcagccatttacttgtattttaagtgttgttcatctaaaatagctatattagtctttattttgctagcagatattttgaatgtgtaggttatattccaattgatactaattgctgatatttcaactacttggtaatattttctttagaaatggaaggtaaattactatggtaaaacagctttaaacatttagtaattaagtcagctaatcctaatatttttctggctccccataaaattgaatgtctactatgtaacactttgttatccaatttccacagaatcttttgagcatatgaagaaatctggggattattatgttacagttgtagaagatgtgactctaggacagattgttgctacggcaactctgattatagaacataaattcatccattcctgtgctaaggtatgtgctgcttataaataaaatggacagctgttttctagcacaactgactttgagtttccattagacaaatctgttttctcattgattttcagtgcctcttagaaatcccttttcccagtgtgttctgagagctttaagaaagaaaatgtataacagtatgaattgtatgctaaaattgttctgtaaggtggatcaatttggtataggcatagagaaaccaaacaacttagcagtaatgcacaaaatccctaatgttactcttttaaaaaaaacaactctgaatataccacgttagcataaatttgtttccacatggtaaagggttcagattattccgttctaattatgatacatctaatgcatgtagtgccctttcatccctcaataactcacataaaatagtaaataaaaaaagagggagagaaaaccttaattcaatgagaataaggtaggaacacttgggatgtgttctgtcacacttaggaatttcggtggggtttctgtactagacattaattttatttggatatctaaaataacttgctagtaagcaaggagtagaatgatggatatattcatgaaaaggttacattttggtgatgttgatcctgatatttgtttaaagacaatggggtgggaaggttggggacatagccaaaacaagtttaggtcacaacttgactcatactatttcctctaataagtaaaaacatctttaaattattaacttttaatagtagtactctcatactagtaggaaacaaacttttgggctaatcagatttgccccagcttctctgtcatatttaaaaacaaaggaaatgttcagctattacagaatattctatgatctctccttctcataagttgtagaaatacatactgaaacagccttcactgtataatattttttgcatttgatttctgttaagttcaagtttacaaaatatactacttattatcagtaaattcttaccaactcgttttagctaaaaacaaaagtaaatgcttactcctttaaacattgtaaatattttcagagaggaagagtagaagatgttgttgttagtgatgaatgcagaggaaagcagcttggcaaattgtaagtaggcagaaacaaggtaaccctggataaattttgttccaatttagtttcttaacaagatacttgtttgaagttctttttggcttcattaattctgaacttattctcactctaatagtttagactgaatttcatgaagaaataaagtattattatacatattttgccttaaagtttgaaaattggaagcatacttctttacagacagtaacatctttaaattactaactttttatagtaatgctctcgtcctagtaggagataaacttttgggctaatcggatttgcctcagcttctctgtcatatttaaaaacaaaggaaatgttcaactattacagaatattctgtgatctctcattctcataagttgtagaaatacatactgaaacagccttcactgtatatatctaaatcatttaaaataaatataaataagtggtattgatttattgccattttataagaacttgtagttcttatttattataatttttagtttttgagacagggtctgtttttgacagctctgtcacccaggctgaggtgcagtggctcaatctcagctcactgcagcctcagcctcctgggctcaagcaatcctcttcagccccccaattagctgggactacaggtacacgccacacctggctaatttttaaaaatttgtagagatggggcctcatcatgttgctcaggctggtctcaaacagtgctcctgccttggcctcccaaagtgctgggattacaggtgggagccactgtgcctggcccaagaacttgctttttaacactaactcttctgagttttaaggaattaacaaatattaaatacctgcttatgtaccagatgctattctaggtatttggaatacctcagtgaacaaaacagaccgatttcttgtgttctagtctatataatttatgttttttttttttttttttttttttttaagagatgggatctctttctgttgcccaggctggagtatacagtggtacgatcacagctcactgcagccttgaatttctggggctcaagtgagcctctcgcctcagcctcccaagtagctgggactacaggtgcatgccgctgcacccagctaattttttatagagatagggttttgctatgttgctttggctagtctcgaacttctggactcaagtgatccttggcctcctaaagtgctggaattacaggcatgagccactgcaaccagccaggcatacttcagtcaaggtcttttgttttttttaaaaataggattttttagtctgttcaaacatgggcagacccttcaagtttgtatatcttttatagtttttatcctctaaggcacttagatccacactttaatactgggtttggattcattaagaaattttgtatagatgtagacttgctttgtttccacttcatattaattagaccaatcttgagttaatctgatacacaccttcacaaatattaaagtagctttaaaaatgattaaagagcaaagctattatgtactcattttatgtgggtatgtcgactgctccgaagttgtttaaatagatttaaataaagaatttttacaaaataattttggtcatttttttttttaaaggttgagtttttagtgttaacatgcatcttaaaattcgtttttctttttcaagacagagactcactctgttgcccaggctggagtgcagtggcacaatcactactcaccgcagccttgacctctctgggctcaggtgatcttcccccctcagcctctggagtagctgcgactttaggcatgtgccatcatgccctactaatttttatattttgtagagatggggttttgccgtgtttcccaggctggtgtcaaacccctgggctctagcgatcgcctgcctcggcttcccagagtgctaggattacaggtatgagtcactgcacctagccttaaatttcatttttaaagagggcttagggtgagttttgtatttgtcctgtttattagtgagctggagattactagataaaagtatatttgactctaagtaaaaatgctttggtgatttaaatgcttatcaacttacatgaatgcagtgggaaaagccataatctaaacctgtttctaaggaaacttaagttttataacattaattcatattgttactagaatcaatttttattaataaatgctatctcctcaccctaccccctttttaaatttcaggttattatcaacccttactttgctaagcaagaaactgaactgttacaagattacccttgaatgtctaccacaaaatgttggtttctataaaaagtttggatatactgtatctgaagaaaactacatgtgtcggaggtttctaaagtaaaaatcttgtaagaaaattgtcaaaggggctaatgctacaaggctacactcttcctagagttgaaatattttgttgctgcagccgagtgacctccataaatactggactgaaaaaacattgtaatactacaagtataatgacatttagaagattactttgggctggtgggacatgctgtgaatttagattacaaatgaatattataaaggggatgatttttaaccaaaggaatatatttttaacttgaatcttttcttgcattgtatttttctaaaagtttggcttcctttcttggtagtcaagagtatgggtaataaggagttatatgtctgctatctgtgttgctcatttaaaaaaagtatacattgaataaggctgtttatcacatgcataaaattaaatatttttgtttcaaagaaacatctcaatacacttaggggtgtattgtttcccacatattaagtcagggtggataaattagttattataactaaacatagtatagtccaacattcgttgatcccaatacaggcaaacaacctggtcaaccttttgaagtagaagaaatgaaaattacttgacaagattaaaagtaaaacaatttaaatgttttactgaaagtttatatagtatagtctatgtagataaaaagtaccacttgtcttttctgtgaattatgactattcatttgttaaaaatacctaagagcaattatagtgggacatctaaggtcctctgtaaacagtgaattagcaaacctcagcctatgtgtttctaccctgatttttttcttttcatgggtatctgaagcctctaagttttttcaaaaatggagtatcacaaaattgagtgaaacacaatacttaatgtattgtactagattgccaaattcataaaatgttaatggaagctttttgatgtgattataatggcactattctggtcattatcctattttgattttatttaattttttaaagttgaagaattaaatattttaatggttctaatcttttgcattccatgttgcattaaacctgtttatatgagtagtcttctgttagaatcacatctgtgcttttcttgagtctgctgttgaactattagattaagtcataattcataaaattttagtttaatgtgctctttgtaaaatgaaattgtaaagaaaataccagtgtttctcatcccattgactcacaccacgtcatctggattttggatttccctccatgcagccagctatagttggctttccaaaacaacagaaatccttcaccaatagagtgcactacttacctgcttatagcctatacagacgaactgatctgtccttcgtgaaacgcaacaaagctagttctgtcttttcagaagtcctacaaccttgacaaagagtagttttatcaggtaaatcctggtaattaaaaacgcatgtttttaaaaattagcctggtaaggccgggtgcagtggctcacgcctgtaatcccagcactttgggaggctgaggtgggcagatcacaaggtcaggagtttgagaccagcctgaccaaaatggtgaaaccctgtctctactaaaaaaaagaaaaattagccagacgtggtggcatgcgcctgtaatcccagctactcaggaagctgaggcgagagaatcgcttgaacccgggaggcaaaggttgcagtgagctgagatcacaccactgcactccagcctggcgacagagagagactccatctcaaaacaaaacaaaaaaaattagcctacttaaaggcacaactaaatgctttattacctttcttaccactgaacaatttgaggtaaaatcattcacaaggttggcacttcagtaaatccctttaaatagtgttcctaagatatctcttaaatcctcccataggaaatagaattacaggtaaggtacaccatacaaaaattgtgtcattgaggacaatggtgatctgtaattttagttgagtatgtttatgatttttgaagccatatggtgagtaaatgtaaatatgaaaaaagtgctacataaaacacttcttaaactttttttttttaaaaactgctccttgtggagcaggactaccccataggcagtgtacccacaatagatagccttttgttgttgttgttgttgagacaaggtctcgctgttgcccaggctagagcgcaggggcacaatcaccacacactgccgcttcaatctcctgggctcaaatgatccttccacctcagcctcccatgtggctgggactataggtgcatgccaccacacccagctaattaaaaaaattttttgtgtggagtctatgttgcccaggctggtctcttaactcctaggctcaagtgatcctcccacctcagcctcccaaagtgcttggatgacaggtgcgagccactgcacctggcccacattttttaaagagacactgtcccactccatcacccaggctggagtccagtggtgtgatcatagctcactgcatcctccagttcctgggttcaagccatccctcctgcctcagcctccccagtagctggaactacaggtgtgtgccatcacacctggctttacatttttctgtggggtcttactatattgcccaagccggtctcaaactcctgagctcaagtgatcctctgcctcagcctccagagtatctgggattacatatgtcggctaccgtgtctggccgttcacatctttggccactatttgcttgtgaaaaggtataatgaggtggtacttatcatttttactgtgtctcatgttttgtatatttttgtttcatcaactaagatgcactgtaacatctctgaaatctggatatattatcaatggtttatcatagttttgttagcaatacactgtcttttagtggtgcctaaaataatggtatagttgtgaggtgatcttagatttgatgaagcacagtatgcaggtaggcctaatgggggaagatggtaatataaaagcaagaagtattttttttttgtaatgactgaaagctgttctgtggatgacctaccctttcctttaaacacgattctctcacttccaactccaaacttgctcaactaatccttaaaaataaacttgagctggaatttg

SEQ ID NO: 864 - DNA, 32746 bp, Homo sapiens; identical to SEQ ID NO: 634
  source 1..32746: mol_type = other DNA

SEQ ID NO: 865 - DNA, 32744 bp, Homo sapiens; identical to SEQ ID NO: 639
  source 1..32744: mol_type = other DNA

SEQ ID NO: 866 - DNA, 32744 bp, Homo sapiens; identical to SEQ ID NO: 673
  source 1..32744: mol_type = other DNA

SEQ ID NO: 867 - DNA, 23811 bp, Homo sapiens; identical to SEQ ID NO: 674
  source 1..23811: mol_type = other DNA

SEQ ID NO: 868 - DNA, 29804 bp, Homo sapiens
  source 1..29804: mol_type = other DNA
gcgcgcctctgccgtttgcagcccgcggcgctttcccctccgcggttcctccccgagccgcccccagtgcccaagcttccgcggctccgccgaccaggggccgcgccgactgggaactcgccaggggcgtagtcccctgcaaggcctgggggccggcgaggccgcagaggcgggatgggcctgagcccgggcgccgagggggagtacgcgctccgcctccctaggattcccccacccctccccaaacccgcctcgcgaaccgccagtaccgggcccaaggaccagccgcctgcgctcagacgttcagctgtgccccactcaggtcagccccaagaatgcggctgaaggacaatccgcaattgtccttcaggtcccagcgggcggttaccctcaaagctccttttcttaagacatttggcgattgtgttgtctgttagccatcatgagcgagtatttcagaacgaccgcttgttataaagctaatcaaagcgagccaggcagccactccctccttcccgctatatctcatatggaagtgaggcagtggtggcagctccggagggtggtgttaagaccggctctggctcggcagaggttcctcccatcgggcttaggatagaggcgaggcgcccttcttcatcctctccccgattccgttcccaggaatcccaaagtctctctttggcagaggaactgaacccgctccagcacctagttccacaaccctctccattcatcccaagattttctgaggcctaaccaggggccaggcacgatgctagactagagctctgagcccactctccgtagcggtcaaggtgcttgctcgaactctcctttcacaggtctaaatagcatttccccccttgaattagaagaatccgtgggattcgcagcgttggtccagctcccagccaagcagcctccgccgggcacattagaacagggcagaagcatccagcaagggtaagaagattgtaaggttggggtctttgggtggaagaaatcttttggagaattgacttggaatgcagttctgtaaaacaaacccagaggtggtttttgtgtgaaccagccagccggtacccagcaaggggaaggctggtgtgatcctgggtgataacagatggtactgggcttgggacctgctggccacaggcatgcgttgcagctgtttctagccacaaggccattctctagaccccagagaaatgaatggctttagcaggaggcttacagtattgtccttggtctcactaatcagtgaacaatgagtcggcctttggcagatttcctgaattcactttcattaacaacatgatgattgctgctttaaaaaattccgaggggctgaaattttggagaggagctctactgaaaatgaggggtgtcccctctgccccacacactatttttttctggagaagagtttaaagcatgggaaaaggtaaagaaaaagtcatttctgagttggtggtataccagatgtttacatgtgctgtgtcctttcaccttcttgaccactgtgagacacattttcatctctatttttaaagataatcaagctgagagtcagacattaatttactagctcaaggtgggacagcaatcatgaaagctaggattcaaacctagatcttttggcttcgaagtattttactctactatactaccttaatttaatatgcttgaaagcatattcttgcctttcatttctgtcctctcctgtaacattttgtttcaagggagaaatatactgatttcattcatattacttgcagttgcagtgttgtggcttatcaagctttcttagaaatctggggctaattattggaagaaagagttcaaggggtttgcctctgggcagtagggctgggatgaaaagggaaaggaggaaggctccttgcatttcattataaattcttatgtactggaaaccatgtgcaagtatcactttgataaacattaaaaagacattattagcaaattaaaaaataaaaacccccaaaactgcttcttgctatcattagcatttgaacaattgtcagaaaaccagcaaacagcaattcttttgtatgaaagctaatgggttcacagaaacaaacggggggaaatgttccctacagtctccaaaccaaaagccatcttaaaaatcacaaatctgtaatacagattttccaataattatgaaatagtgatatttgttaactttgtgattgcaaaatcatttagggagaaggctgtagttagcttggagaccacacccagccagaaagcagactggagttcaattccaaagcctgagaatgaaggcaagttaataaagcaagcagctgaggtaggtgtaacaagaattctcaaagtgactatctttaacctcctggcaacttctctacatattgtattttactttgtttctaggggtgtccaatctttaggcttccctgggccacactggaagaagaaacgtcttgggccacacataaaatacactaacactgacgatagctgttgagcttaaaaaaaaaaaaaacccacaaaaaagtctcataatgttttaataaagtttacaaatttgtgttgggccacattcaaagctgtcctgggctgtatgtggcctgtgggctgcgggttggacaaacttggtttagatggtctaataaatatcctgatttgggatgttggttatgctttgttttaaagcagttttattgaggtgtaattgacatatagtaaactccacatatctaaaatatacaatttgataaatttggcatatatatatgccagtgaagtgtatagtttgatacattttgacatctatatatatatcctgtcaaatcttcaccacaatcaagataatgaataatctctgtcatttacaaaagtttctttgtgccttttgtaatccctctctcttcccataccactcccatccccaggcaacaactgatatgctttttgtcaccatagatgtgttcacatttttagagatttatatgaaatcatattgtatgtgcacttctttgtctgtctccttcatataactatatatatttttttcgagatggagtctcgctctgtcgcccaggctggagtgcagtggcgtgatcttggctcactgcaagctctgcctcttgggctcacgccattctcctgcctcagcctcccgagtagctgggactagaggcacctgccaccatgcccggctaattttttgtatttttggtagagacggggtttcactgtgttagccaggatggtctcgatctcccgacctcatgatcctcccgcctcggcttcccaaagtgttgggattacaggcatgagccactgcagccagcccatataactattttgactgacatccatgttgttgctttttatcaacagttcattcctttttattactgagcagtatttcattgtatggatataccactcttgtttatgtgttcacctgttgattgagcatttgagttgttactagtttttgactatcacaaatctgcttgaacatttatgtacgagtctttgtgcagactgtatattttttcctcttgggtgaatatgtaggaatgaaatggctaggtcatgtggtagatgtatatttaatttactgttttccttaacattttttttttcttttttggggctttccaagcctgccagacaaattctaaaagagctctaaccttaacttactgttttccacagtggttgtatcattttacattcctaccagcagtttataagagttccagttcatcagcatttggcatggtcaaaatcttctaaattttagctattttaatagatgtgtaggtatctcattgtggttttcatttgcattttcctaatgactaataatgttgaacgtcttttcatgcgtatatttgccatccatatatataatctttggtgaagtgttcaaatcttttgcccattttttcctattggtttgtatgttttgagagttcttcagaagttctgtatacaagtacgtcatcagatatatactttataatattttctctccatctgtggcttgtctcttcagaacaggttcttaaattttgatgaagtccaatgtgtcagcttttccttttataaaacggaaatgtaatgaaatactgctcagtaataaaaaggaatgaactgttgataaaaagcaacaacacggatgtcactcaaaatagttatatgaaggagaccgccaaagaagtggacatacaacatgatttcatataaatctctatgaatagtgcctttggtggtgtatctaagagacctttgcctaatccagtgtcacaaagattttctcctgttttcttctaggtattttatagttttgttttttacatttacatatttgatacatttttatctgtatttttatttcaatagttttgggggaacaggtggtgtttggttgcatgcaaaagttccttcgtggtgatttctgagattttagtgcatccatcacctgagcagtgtacactatactcaatgtgtagtcttttatccctcaccccactcccacccttcccttctgagtccctaaagttgattacatcattcttatgcctttgtgccctcatagctagcccccacttataagtgagagcatatgatttttttgttttccattcctgagttacttcacttagaataatggtctccagctctatccaggttgctgtgaatgtcattgtttcattcctttttacggctgagtagtattccgtggtgtgtgtgtatgtgtgtgtgtgtgcatatatatatataccacattttctttgtccactcattggttgatggtcatttaggctggttccatatttttgcagttgtgaattgtgctgctataaacatgcatgtgcaagtgcctttttcatacaatgacttcttttcctctggttagatacccagtagtgggattgctggatcaaattgttgtgctacttctagttctttaaggagtctccatggtgttttccatagtgattgtatcagtttacatccccaccagcagtgtaaaagtgttcccttttcaccacatctatgccaacacatattattttttttatttttaagttatggccattttggaggagtaaggtggtattattgcatcgtggttttgatttgcatttctctgataattagtgacgttgagcagttttttaatatgtttgttggccatttgtatatcttcttttgagaattgcctgttcatgtcctttgcccactttttgatgggattgtttttttccttgctgatttatttgcttgatttccttgcagattttggatattagtcctttgttgaatgcatagtttgtacaaattctctcccactctgtgggttgtccgtttactctgcttattgtttcttttgctgtgcagaagctttttggtttaattaggtcccatctatttatctttgtttatgttgcatttgcttttgggttcttgatcatgaactcttttcctaagccaatgtctagaagggtttttctgatgttatcttctagaatttttatggtttcatatcttagatttaaatctttgatgcatcttgagttgatttttgtagaaggtgagagttgaggatccagctttattcttctacatgtggcttgccaattatcccagcattttttgttgaataggatgtccttttctactttatgtttttgtttgctttgttgaagacagttggctgtattttgttttatttctgggttccctattctgttacattggtctacatgcctgtttttataccagtaccatgctgttttggtaactatagccttgcagtatagttcaaagtcaggtaatgtgatgcctcaagatttgttctttttgcttagtcttgctttggctatgtgggctcttttttggttccatactaattttaggattgtttcattctagttctgtgaataggtattttgatgggaattacactaaatttgtagattgcttttggcagtatgatcattttcacaatattgattctacccatccatgagcatgagatgtgtttccatttgtttgtgtcatctgtgatttctttcagcagtgttttgttttccttgtagagatctttcatgtctttggttaggtatattcctaagtatttttttttttttacagctgttttagaaggggttgagttcttgatttgattctcagcttggtcattgttggtgtacagcagggctactgatttgtgtacaataattttgtatcctgaaactttgctaaattgatttaccagttctaggactttttggattaggctttagggttttccaggtctatgatcatatcagcaaacagcaacagtttgacttcctttttactgatttggatgccctttatttctttctcttgtctgattgctctggctaggacttctagcactatgtcgaataaatgtggtgaaagtgggcatcctcgtctttttccagttatctgggggaatgctttcaacttttccccaatcactataatgttggctgtgggtttgtcgtagatggcttttattgccttgaggtttgtcccttttatgctgattttgttgaggtttttaatcataaagggatgctggatcttgtcaaatgctatttctgtgtctattgagataatcatgtgatttttgtttttaattctgtttatgtgatatatcacatttattgacttgcatatattaaaccatccctgcatccctgctataaaacccacttgatcatggtggattatctttttgatatgctgtttgattcagttaactagtattttgttgaggatttttgcatccgtgttcatcagggatattggtctgtagttttctttttttttttatgtcctttcctggttttggtattaaggtgatgctggctttatataaggatttagggagcattccccctttctctgtcttttggaatagtttcagtaagattgatatcaatgctttgaatgcctgatagaattcagctgtgaatctgtctggtcctggacttttttttttttttctgttgttggcatttttaaaaattactgtttcaatcttgctacttgttatcgtctgttcagagtttctatttcttcctgatttaatctaggagggttgcatatttacaggaatttatccatatcctctagattttctagtttgtgtgtgtgaatgatcttttgtatttctgtggtctcagttttaatatctcccatgtcttttctaattgaatttatttggatctcttctcttttcttggttaatctcattaatggtctatcaattttgtttatcttttcaaagaaccagctttttgtttcatatatatatatgtgtatatatatatatatatatatatatatatatatatatatatacatatatatatatatattttttttttgcttcaatttcatttacttctgctctgatcttggttatttcttttcctctgctgatttaggtttggtttattcttgtttctctagttccttgaggtgtaaccttagatttttttttttttttttttttggtgtaggcatttaatgctatgaactttcctcttagcaccacttttgctgtgtcactgagcttttgataagttgtgtcactattattgttcagttcaaagaatttttaaatttctgtcttgatttcattgttgaccaaatatcattgaggagtagatgacttaatttccttgtatttgtatagttttgagggttcctttcagagttaatttctaattttattccactgtggtctgagagggtacttgatatattttcgattttcttaaattgattgaaacttgttttgtggcctatcaaatgatctatcttggcgaatgttccatgtgctgatgaaaagaatgtatattttgcagttgttgggtggaatgttctgtaaatatctgttaagtttatttgttctagggtattgtttaagtccattgtttctttgttgacattccgtcttgatgacctgtctagtgctgtcagtggagtactgaagtccccccactattactgtgttgccatctatctcatttcttaggtgtagtaataattggtttataaacttaggagctcttgtgttatgtgcatatatatttaggattatgatattttcctgttggactgatctttttattattatataatgtccctcttggtctttttaaaccgttgttgttttaaggtctgttttgtcttatataagaatagctactctagctcacttttggtttccatttgcttggaatatctttttcctccccttttaagtttatgtgtccttatgcattaggtgagtctcttagagacagcagatacttggttggtggattttaatccattctgccattctgtatcctttaagtggagcatttaggccatttacagtcaattttagtattgagatgtgaggtgctgttttaatcattgtgctagttgttgcctgaatatctttttttttaaaaattgtgttattattttataggctgtgtgagatttaaggaggttctaatttggtgtattttgaagttttctttcaagatttagaactccttttatcatttcttgtagtgctggcttagttgtggtgaattctgtcagcagttctttgtctgaaaaagactttatttcccctccacttatgaagcttaattttgctggatacaaaattcttggctgaccattattttgtttgagatggctaaagataggaccccagtcccttctgttttgcagggtttctgctgagcaatctgctgttaacctattagggtttcctttctaggttacctgacgcttttgcctcacagctcataagattctttcctttgtcttgattttagataacatgatgactatgtgcctggatgatgatctttttgtgatgaatttcccagttgttgagtttcctgtattttgatgtctagatctgtggtaaggccagggaaatttttctcaattattccctcaaatgtgttttccaaacttttagattcctcttcttcctcaggaacactaattatttttagttttggtcatttgagataatcccaaatttctaggaggctttgttcatacttttgattatttttttctttttttttattattatactttaagttttagggtacatgtgcacaacgtgcaggtttgttacatatgtatacatgtgccatgttggtgcgctgcacctattaactcatcatttagcattaggtatgtctcctaattctatccctccccgctccccctaccccacaacagtccctggtgtgtgatgttccccttcctgtgtccatgtgttctcattgttcagttcccacctatgagtgagaacatgcggtgtttggttttttgtccttgcgatagtttgctgagaatgatggtttccagcttcatccatgtccctacaaaggacatgaactcatcattttttatggctgcatagtattccatggtgtatatgtgccacattttcttaatccagtctatcattgttggacatttgggttggttccaagtctttgctatgattatttttttctttgtcagataggaggccttagaaaataggagtttctctaagtgggcacctgtttccgggagaagggccagagctgggttgccagcctgtgcagatgtacggggagctttgaaatgaacatttattctaaagggacaaacagaattcagaaggttgattattattattattattatttttgagatggagtcttgctctgtcacccaggctggagtgcaatggcacgatcttggctcactgcaacctccatctcccaggttcaagtgattctcctgcctcagcctccccagttgctgggattacaggcatgtgccaccatgtctcactaatttttgtagttttagtagaggaggggttttgccatattggccaggctggtcttgaacgcctgagctcaggtgatccacctgcctcagcctcccacagtgctgggattataggcgtgagccaccacacccagcccagaaggttgattattaagctattcaaggagataccagagaaaggtgaaaaccaagttaaagcaattttttaagacaatacagcatatggatgaaaaatgctccagaaaaatagaaattataaattaaaagcacaacttatggaaatgaaagacacacttagagatatacaaaatgcatgggaaatagaactgaacaagtattaataaaagaaagagcttgaagacaaggctttcgaattaatccaatcacacaaaggcaaacagggcagcaaaatcttcacctagaattgaaggtaccagcatcaactgggattggaggcggctctgtagcatacagacagctactctgtggctcatgaagttagcagaacttcatgaaatgctggagagatgttaaagaaaagaaaaagggaaggatgggactgtagaaaagaccccagtataaccgcaaccttggctgcaccttaaactcacctaaggagcttttaaaactctggcacccaggctatactccagaccaatctgaactttttaaagctccacaggcgatttcaatttgtaaccaaggctgagaatcaatactcaatataatcgatttacagtgggaggaaatttaacaagagagtggataactgttaagtctctgtgaatcccatttagttttataccttactacctcatccagtggcaatattgcagatgagagagtattaaaatgcaaaagaaaatacttaaaattccaaaattccctcctctttccttctccaatccctgagccttctgttttctgtaccacaaagcttgttcgacatccttgatgaacagaacttgggttttctgagctttcttctggcttagattggcctcacaatgaattgggttatcttcttgctgtcagttttccaggaaacaacaacaaggatttgattgattgcttgtttgttgtcatagggaatgacctagccatgttgagtgggaagtaactggctatttggttggtggggaaatatgtccaaggtggagggatggtgaagaacggaccgcatgttcctacaaagaacagacgtgaccgtccagctggcttggccgactctgagagccctgccctccactagatatggtggatggtgggtgaaaggcattggttaggactctaaggtattggggtctgtggtcaggtagagtgagatggaatcaggggttagttcaagagtaacataacgtgtcaagtggctttccctctggagtgactcagaaaaacctgtcccataatcttactgttactgccatttccttcaccctgatcaatgccagaaataatagcctgagttggattgatttgagctctggcgcctgttcttcacttcttgttcatcttttgtccatgggcatttctgtttttcttcctgaccagtgtcaggacttagatagtaatggtccttagattactgtaacagtgaggatgggcctatggggtctcctgtgtcatgtgtgtataatagcagaaatggcctcagcttagcacatatgttcatataaagaaattaggctaaataacttctcttcctctctcatttacctatgtctgaaaggaaaaaataattagacaatctatgaatcaaaaatctgtatatacctaaattataaattaaaggcaatttaactgtttacctgcatctgcacatgcaaatgttgaacctgacttgattttttaaaatgagcttcaaaatatttaaacttcagactttcttatgaacattttaaaacagtttctctgatcctttgccatttatgaagacagaggcatctgcttaaagcaatatagtcttattactatctgaatcacaaagaaaatactatttgctattgttcctttttagtcttcttcaaaggacgagaaagagctctcctccactttgcctttcttcacttactctcttggctgctttctgctcctctgtatccatctacatcactcacatgctgtcttcccaactcgtagcactcaacctcttctgtatactaccggcttccgggatttatggtgggggatatccctactgctttccctgggcttatggcaaaagaaaatgaagtccagtttgaagtctcctgcaatatcattctgctttctgggtgagaagcctggtatggggagccctctagtggatatgtggctgccattacattttccctttaaggcagaagaaagagttggtttgttggcaggggcaagggagtagttctggtcctagctcgaccatggacttgctgtgggactttagacaaagcacttcctctctcttggcctcagttccttccatgaaatattgtagtgtatactgtttgctttgtgcccacaaaaactcattgctgcaagtgggcaggacttgtggaatggctgagtgcagatctcagcaaatcctcttttcccaaaacaattatgaagccagacaaaattgccaaagacagtcatttaaagactggaaatttgaccaaagccatacaacagattgagaagggttaatttaagaaagtccatccgtggtcgggcgtgggctcacgcctgtaatcccagcactttgggaggccaaggcgggcaggtcaggagattgagaccatcctggctaacacggtaaaaccccgtctctactaaaaatacaaaaaatcagcagggcgtggtggcgcgagcctgtagtcccagctactcgggtggctgaggcaggagaatcccttgaaaccagggaggcggaggttgcagtgagctgagatcgcgccactgcactccagcctgggtaacagagcaagactccgtctaaaaaaaaaaaaaagaaagtctattggttctcagaaagaacagtggaagtctgtagtgttttagcattgccccttcacctccagctctgcggttgtggtaaggaagttctatccaggtgggtggggcttgtgggagggaatggcgtggcagcagagggtgactgactttacttccatgcccagggttgttgaaaacaagagttatctcagtgacaatcatggaagaccaaaattgcagctagcttgaggttgcagtactggttaggacaagcaataggccaacaggcctgccaaaaatttaacatggaaatccaggtaatgatacaactaaagagggtcttgaaaagctgccacatgtgtctggtggtctagaaggtatgcacaaggctgcatacacattcacattcaggacagactggagactcataaaaatctggaactttgaatgaattctccaagccacacagagatccactgacaaaaggtaaagccttcgcggcacaaggtgtggctcaacttctggccattaagctatgccgatctaggaagccaggcttaaaaacaagaagccgggcactgtggctcacgcctgtaatcccagcactttgggaggctgatgtgggcggatcatgaggtcaggagttcgagaccagcctcgccaacatggtgaaaccctgtctctactaaaatacaaaaattagctgtgcatggtggcaggcacctgtaatctcagctactcaggaggctgaggcaggagaatcgtttgaacctggaaggcggaggttgcagtgggccgagatcacaccattgcactccagcctgggcgacacggcgagactctgtctcaaaaaaataaataaaaataaaaacaagaaaaaaactctaagcagatatctcagtggttacatgctgtgagacaaacagacatcacagaatcagtccaggtgggtcactaaacaaacaacaaacaaacaagcaaacagcaacaaccgtccgccctggttgggtggggaaggagatcagagcccacagttgctacggtatgttacctagaacgtccagtttttcaacaacaaattatgagacctgcaaagaaacaggaaagagggacccatacacacaaaaacagtagagactgtttcctagtgggcctacatgttgcatgtagcaaatacttctaaactgctattttgagtatatttaaagaagtaaataaaatcaagtttaaagaattaaaggaaagtggaatgacaatgaccgatcaaatatacaatattaataaggaggtagaaatgataaagaagcaccaaatgaaaatactggggttgaaaaacacaatggccaaaataaaacattcactagagtgatttaacagcaaatttgagttaccaaaaagaaaaaagaatcagcaaactcaaagatggatcaacagcaactacctagtatgaagagtaggaggaaaaagaaaaagaaaaatgaacagagcctcagaggccaaggagacaccattgagcaaaccaacaaatgtataattggggtcccagaaagagagatgataaaaaggcagaaaaaaatacctatataaaagataactgaatactttccaaatttgatgtaaaacattaatctatacacccaagaagctctgtgaatacccagacatatcattcaaacagatgaaagccaaacacaaagagagaatcttgaaaacagcaagagaaaaaaagacttattgtatacaagagatgcacaataaaaaacaatagtcaacttttcatcagaaacaatggagaccagaaggcagtgggatgacatattaaaaatgctgaaagaaaaaaacctgttaaccaataattttgtatccagtaatgtatcttgcaaaaatgaaggtgaaataaagatagtcccagatgaatggagaatgagagaatttgtggctagcacacttgccttaaaataaatagcaaagaaaattctttgggtggaaagaaagtcacaccagatagcattctaagccacatgaaatacaaagcaccagtaaaggtaattatacagaagaatctaaatatatattttatcatttatgctgaccaatttgaaaggtaattgaataaaactagttataaatcctattcttggtcttataacatgcaaatatataataaatataatagtaatagcacaaaggagagggactgaaatgaagctgtattagatcaatgacaccagacagtaagtatcttaatcaacaggaagaaatggagagtaccagaaatggtaaaatgtagttaatataaatgaccataagtatactttttcctttttctcttaactaatttaaaagacaaaaatttgtataaagcaatatttgtaacactgtcttcggtttataacatatttggatgtaatatatctgacaataataacataaaggagggaagaaggaatggagctaattttaagtttccatattttacaggaatcaagttagtattaatctgaagtagatagcaataagtcaagatgcacattgtaatccctagagcaaccacaaagaaaactattaaaaatgttattaaaaagttaacagaggaattaaaatgatcattagaaaatacgtatttgatacaaaaaagaaggcaaaagaggaacagaggaacaaaaaagacgtgatgtacagaagattgacagtaaaattatagtcataaatccaactttattaatagtaacattaaatgtgaatgaattaaacacaccaaaaaaaggcagagatcatatgacttgatagtacaagatccagttatatgccatccacaagaggcacactttagatctaaagtcacaaataggttgatataaacagtagccgtagcaggagtggttgtactaatatcagacaaaatagattttaagagaagaggtattattagaaaaaaagggtcattctataatgacaaaaggtgaattcatcaggaagatataacaattataaacatatacatatccaacaaaataatcccaaaaagtatgaagcaaaaactgatagaaataaagggataaattgggaattcagaaataatagttgggagacttcaataccccactctcaatagtggatagaacaactagacagaaaatcagtgagcagatagaagatgtaagcaactaactgacatgatctaactgacatttataaaacattttactcaacaacagaatacatattcttctctagcacacatgagtgttttccagtgtagaccctcttctaggccataaagcaagtctcagtaaatttgaagggattgaaatcctgcaaaatattttatctgatcacatgaaattaaattagaaattaatagccaagtgatattttgggaaatttacaagtatttggaaattaagcaacatacatctaaataacccatggtcaaaaaaagaacaaggaagttagaaaatattttgagttgagtgaaaatgaacacagaacatatcaattttatgagatgcagctgaagtgcttagaggaaaatttatagctgcaaatgcctgtattagaaaggaaaaaatatctcaaatcaataatctaagctcctaccttaggaaactagggaaacaaagcaaactaaaaccaaaacaagcagaagtaagaaaatgataacaactggagtagaaatcaatgaaatagaaaacagaaatcaataaagaaaatgaatgaagccaaaagatagtattttggaaaggtaaaatagacaaacttttagctacactaaccaagaaaaaaagagagagcactcaaattgccaaaactgggaatgtaagagggggctcactatcaatcttatagacataaaagggaacactatgaaaaactttaagcaaacaaattagacaactgagatgaattgggtaagttcctagaaagacacaaattataaaactggctcaagaaaaactagaaaatctaaattgaattagtaaataaaaatcttttcacaaagaaaatctcatgcccagatggctttgctcaagaattctaccatgcgtttaaataagaaaaattaccaatctttcataaactctttctgaaaatagaggaagaaatgcttcccaactcattctgtgaggccagtattaccttgataccaaagccaaggtatctcaaaaaaaggaagctacaagactaatatctctatgaatatacatgtaaaaaccctcagaaaaatgctagcaaatggaatccagcatgaatataaaaatgattatacacaatgactaagatttatcccagaaatgcaagtttggtgtaacacccccaagtcaattaatgtaatataccagggctgggcgctgtggggcatgcctgtaatcctagccctttgggaggtggaggcaggcagatcagttgaggtcaggagtttgagatcagcctggttaacaaggtgaaacaaaccaaataaattacctgggagtggtgacgcatgcctgtaatccagctacttgggaggctgaggcacgagaatcacttgaacgcaggaggtggaggttgcagtgagccaagattgcgccactgcactccagcctgggcaacagagttagacttcctctcaaaaaaccaaaaaaaaaaaaaaaacaacaaaaaaatatcatgttaatagagtaaaggacaaaaatcatatgatcatctcaatacctctggaaaaagcatttgtcaaaatctgccattcatgataaaaaaaaattctcttgaactcagttaaagggagtttcctcaacttgaaaaagggcacctatgaaaaattcaatgtatgtagaaaatcctaaggagtcaatcacatacaggtatacttcagacatattgtgggtttggttctagaccgtcagaataaaacgaatattgcaagaaagtgagtcgcacacattttttggtttcccagtgcatataaaagttatgtttacattattctgtagcctattaaatttgcaatagcattacatgtaaaaaagtacatgctttaattaaaaatactttattgctaaaaaatgctaacaaagcgagcacacgctgtttgaaaaaaggcgccaattgacttatctgacgcacggttgtcacaaacctttaatctgtaaaaaatgaaatatctgtgaagcacaataaagcaaagcacagtaaaatgagacatgcctgtacttacaaaactattagaactttttttttttttgaggcagagtcttgctctgtcacctatgctggagtgcggtggtgcagtggcacgatctcagctcacttccacctctgcctcccggattcaagcgattctcgtgcctcagcctcccaagtaactgggactacaggcgtgtgccaccactcctggctcatttttttttttgtatttttaatagagatggggtttcaccatgttgcccaggctggtcttgaattccttgcctcaagtgatccacccaccttggcctcccaaagtgctgggattacaggcatgagccaccgcgcctgggccacaaaaccattagaattaaatatgttcagcaaagttgcagaatataaggctaatgtacaaaaatcaatggaatttctttatattacaagtgaactacctgaaaatgaaattaaaaaaataattctattcatcatagcataaaaatacttaggaataactttaacaaaaatgttaggctacaaaacattggtaagggagattgaagatttaagtacacacaaaaaattccatgtttgtggattgcgaaatatctgcaatcttaaggtggcagtcttcaccaaatcgatctacagattaaacacaatccctgtcaaaatattttttttgataaccattgatgaagtgatcctaaaatttacatggaaagacaaaggacctgggatagccaaagtgatactgaaaaagaacaacgttggttaagcaaaatgtggtgcctccatataatggagtaactgacgcatgctgcagcaagcatgaatctcagcagcattacgctgctcatgtaaattcaacttcctctctctaatgtctctgtgtgtgtggatataggattatttacttaactggtccttattgatggctgtttgggctgtttttttctttcctttttttttcttcaacttttaagttctggggtatgtgtgcaggatgtgcaggtttgttacataggtaaaattgtgctatggtggtttgtgcacagatcaacccatcaccttagtattaagtccagcatccattcactattgttcctgatgctctccctcctccaacccccaccctgacaggccccagtgtgtgttgttccccttcctgtgtgtccacgtgttctcatcattcagctcccatttataagtgagaacatgcggtgtttggttttcagttcctgtgttagtttgcttaggataacggcttccagctccaaccatgtccctgcaaaggacatgatctcatcctttttatggctgcatagtattccacattttctttatccagcctattaatgttttttaaaaacaattttgtttaaaaaattaagttcacctgtaatcttaaatcagaatttcaaaatgtactgcattttattacataaaagtacaattggtaaaatgatttactactaaaattcaaaatgttttcgtctcactgtcatgtagaagaatattactctgaacacttacctcttgcttcactcaaacaatgttataagtcaaccacaaagagcctctccacttagattttcattgcgcaccttacatttatttcaatgtctttactcttccatggaaatggtcataaataatgcccaactaatgaaaaagaatctatcatagatctgatgcaacaataatggatcacatgctttcacataaacaataggaatgaaggaacagcatgaagtaatttgagaattaaattacatttgctttcaacaagctataattttttcaagggaaaacaaatactttgtaattataactcttcaaaaaaagtcttctgtttcttttaaagttatatacaaaaaaaatctgacagttttggctttgaattattttctgtactcaacactctgatttagtgtaatgtatgaagtgtctataccttagttctttctactgtgaatcctctgatgtttatatagacttaatgtttgattaaatatttttttcacatttactgcatctgcaaaagtatcttttagtatgaactctctggtgttcttcatgctggagtttttaaacaaatgtgtttctacattcatttcatctgtaaggtttctttgcaacataaattctctgatgttcaacaaggtttgaacaactgctttggtgttttcctctagtataaaatatgtacaataaggtttgtaatacaagtaaaggcactacagtcctctttatatatgtaatgtttttcttcagaataaatactcttattcactttaaaggcttatattttctgaaagttttttttacagtaattacatttataatggtttcattaagtatgaattctctgattttgagtaagatgtgagcagatagcaatggcttttccacattctttatatttgtacaatttttctaaagtataaatgctttcgtgtgcaataaggcatgaacattaattaaaagttttgccacattatttatatttgtaggggttttctttagtatgaattatcttacatacagtaaggtgtgacatccatttaaaggctttgccacattcttcacatttctaggatttctcaccagtataacttattttatgtttagaaaagtatgaggtgtggttaaaagcttttccacatttttcagatttgtagagtttatctccggtatgaattatcttatgtttacggacctttaaaatgctttgccatattcaatcatagggtttctctccagtatgaatctcttatgtataataagagttgaagactggttaaaagctttaccacattctttgcatttgtagggtttttctccagcacgaattatcttatgtttactaaggcttgagatgcacttaaaaggctttgtcacatcctttacatttatagggtttctctctactgtgaattctcttatgttcattaaggtttgaagaccagttaaaggctttgccacattattcacatctgtaagaattctgtctagtatgacttctctgatgttgagttaggtgtgagagcatgtgaaataatttgccacattctttttttttttttgagatgggagtcttgctctgtcacccaggctgaagtgcaatggcgcgatcttagctcactgcaacttccacctcctgggttcaagctattctcctgcctcagcctcctgaatagctggaactgtaggtgcgtgccaccaagcctggctaatttttttgtatttttagtggagatggggtttcaccatgctggtcaggctggtcttgaactcctgacctcaggtgatccactcaccttggcctcccaaaatgctagtattaaaagtgtgagccactgcacctggccaatttgccgtattctttacatttgaaaggtttctctccagtatgccatgtcttatgtctatttgaattcgaaaatttgctagagactttcacatatgtattacattaaaatattttgctctgagtagttgacaaattaacgacattaatgacattaattaagtccattatgacctcctttgtgcactttgcactcacccacacttttacagcctttccttaattgtaaattctcatgttcacattttccatatctttttagtatcacttttgggaatgaatcttttataccctgttttggccaaaggtcttgggtgaaatgagaacatgtaactgggtgtttcgctaccatcttgtgtctctccatattccagggctcttttctttgctccaggtagttgatcaggtctggcttagagacagcaataccatttctaggcttccagcggagtcctaacatcttagctatggatttccaaagacctgcaggtcacagggccacagaagctgggtctctaggagatgataacacagcagtgaaggtgcaacctggagctctggtcaaatattttttaaaaagatggatgcttatgtacaactctatgcctacctattcatgtatattctcattctctctctacctgtctctctctctctctcacacacacacacacacacacacacacacacacacacacacacgataatagagaagtttgcatttgctgggcaagcaggactgaagtggctattagcaactggtggtgtgggtgtgcagaggatgggggcaccctctgggcttcaggtgggtcacgtgggggccctgcagagggaatcagggtgccagcaggggcaggaggccttgaggatcctgggtctgaggtagaactctactagatgtccacacacccacactactgaccatcatcctgcccaccccagccagaaactgcaggagaacccctttgtcttgcagtacaagagaaagccagcaccctttactgagaaggtttaacatcttacttgctttaaggaagaaatgcttaaaacaagtttagtcatctatcacagggtatatattggaggatacattcacagctgagaggcaatacattgataactggcacgggtatccttgatggctttagtaatgtgagtggggtaggagaggaggggacttctttggtcctcagtgtgaagagaaatttctttagcttgggtttctgtgaagtgatgaaccacactgaggggatctttaggctgagctgtccctgatcctaaaacaaggtctctggagttccttgagcatgtgccatttatcttttatttttccattatagggaaaaccaagacccagacctggagacctgattgagatttttcgaattggctatgagcactgggccatctatgtagaagatgattgcgtggtccatctggctcccccaagtaagagtgaatagtctattgaaatactgatattgaagttagcaaagtaaatagaagcacagttaattactgtgttcctcagttactgccattctttagcaatgggaccccttgaagcatgactggacctttgcttactgtgtgacagagcttggtctctgttcaccaaaaaccaatgagtgtccaggcctaagagtgatacaagtgtaaagagcgtggcccaagttccctgacctcctagagggccctttgtttaaatacacacattttagaacttgagctccattttgtattgacaaaagttgagcatctatcctcatctttctgaggattccccaaggagggtgcagatgctcacatgttctgatcgtcatttgttttctatagtcctcagacactgcatctggcttcttgatcacctttggcaccttcgtcctcaccttgtctcgctgctgttccaacatgctccttgctgtttcaccctaaatgtagatacagccctcttttcatttctcacagctgcttaacatatggctgagattcaatttgtgttaattaaatcttagtggagatttgatgggggaggaggtgatgatagtagaggaagagtacagcaaaatgggaaacaacttaaaattgggtatctagaactgctggtcacagtggttatctcaggagatgaggcctgataagggttggggtttgggagaggaaggggtaggtagaccctgttgaataccattgaatgcactttgaatgctgtctcctgtgcaggtattgccagttcaaagttgaattacagaagggcactataccaaaggcctttggtcctaacttgttctcagctgtcatccctgtgtcctgtcctcttcctctggcccagtctctcaccatgcagggatgttcccatggagcagagcccctttctcattgcctctcttctctgccccatccactcatacccttcccacttcttgtctcagaacctactcaaagaatgtagaaattcatctcttctttccagactaagtccaggagtttccctcttgtacaaccacagagatacttatcagttatgtcttcccccacccctatcttgctctctgaaaatgaattctgccatttctgctcctgaatgctgaattatctattgccagcttttataaaatcagcagattttcttcaaatttgtaagaaaagatcatggagcatttcttgcccttggacaacttataaagggaagggtatacacattcgcatatcaacatggttgtagcagtgctactttaaatgactacccacccagctttgggcaggttcctgaccctctttcagtctctgtctcatctcagggctgaatatgataatgtagcacctttcaaacatttcttttttcaaagctgtggaaccctgttttcaaacatacccttaatgagaatccccgtatttgagtagaggtcagtcaagtggctgtaggtggaagctggcaggagcaggtgccattcagagccctgcttggctggcttcccctgtgtccctgtggcagcccagagggaggcgtgacatggaaccaccataatcatgtatgtgatagccttttacccatgagctgacacttacatagagagtgctctttacatgtttgtgaagattactgaagtcttctcaggaaatgagactcaaatcctaggacttgggtaggtcagtgcaacacagtctgggaccacatgggaaggtgctccaagagtttaatgagaaagagactcctgtgcgggttgagagcagggagtgaggcgcagggcaaagggcttctcaggaaagttgattctctgcggttctttgattccaacttcccctcttctgccacccttctactgatggtgccaatgagactccaggggaagcagcttactcagagtcttagactgtgctctgctttgctactccttgtatttcccaacctttgtttgtctttggtctccaggtgaggagtttgaggtgggcagcattacttccatctttagcaatcgggccgtggtgaaatacagtcgtctggaggatgtgctgcatggctgctcctggaaggtcaataacaagctagatgggacgtacctgcccttgccggtggacaagatcatccagcgtacaaaaaagatggtcaacaagatcgtgcagtacagcctgattgaagggaactgtgagcactttgtcaatggcctcagatatggcgtaccccggagccagcaggtgtgaccccatttgctctgatgatggcttcttccagagctttcttggggtttgtcatttcattagtgatcagaatggtaatcagggctttcattatattattcgttatactagtagggccttctatttctgcaggactttatggttcaggaggtattttcacctttattaacccagggaggagtagaaaaggcactgggctaatagtaagaccagcgattggagccccagctcaactattaactagaggggtatccttggtcaaatcagtatatttctgaaagcttttctttcttttctttttttcccctctttctttggagacaggatctcactctgtcacctaggctggagtgtaatgacataatcatggctcattgcagccacaacctcctgggctcaggccgtcctcctgccttagcctcctgaatagctgggacttcaggtgtgcatcaccacacccagttaattttaatttttttgttgagaggtggttttgctatgttgcccaggctggtcttgaactcctgggctcaagtgatcctccacttcgacctcccaaagtgctgggattacaggtgtaagccaccgtgactggccaaagaccatttcttccttaacaaagcagggataagcagaagcagatactctgttgataaaattgcaacctagtactttgtgggccacatcttggatacacacacacacacacacacacacacacacacacacacacactttttgtttgaattacttgccaatatttaaaaatatagaaattttatataaaaagatgtaggttctcagcttctctctctctctcttttttttgagacagagttttgctctgtcgcccaagttggagtgcagtagtgcaatctcggctcactgcaacctccgcctcctgggttcaagcgattctcctgcctcagtctcccaagtagctgggattactaggtgtgcgccaccacgtctggctaatttttgtattttgagtagaaatggggttttgccatgttggccaggctggtcttgaatgcctgacctcaggtgatccacccgcctcggcctcccaaagtgctagattacaggcatgagccactgagcctggccctcagctttctttttaacatacaattgatcaggccactgggctggcattcctacttgctgacactctgtagggacatgctgtggctttgcaggggataaggggtaggtatgtcacccacctgcctcactcacattacctgcctggcctatactgcatttggctctgtcacttcctcccatatagagaagtaataaattcatgtagttcagtgcatgtgaaataactttgaatcctaaatgtatgtgaaaacttgggctattcatgttaataggtgatccttactaaaactccatgagatgagcagagaaagcatttattatcactactcccctttttttttgagacagagtcttgctctgtcacccagactggagtgcgatggcgtgatctcggctcactgcaacctctgcctcccaggttcaagcggttctcctgcttcagcctcccgagtagctgggactccaggtgcacgccaccatgcccagctaatttttgtatttttagtagagatggggtttcaccatgttggtcaggatggtctcaatctcttgacctcgtgacccacacgcctcagcctcccaaagtgctgggattacaggcgtgagccaccacacccaacctattatccccctttaaagagatggaaaaaattaaggattaaaagaagaacataattattctattttttttctatgtttcttctgttgtctaagcagattgggctcacattccaatgttagtctctgcttttgccagcccatcctcagtgaccattggcagcctccctgctgtgccctttactttctgcaccttcctcctctctgctctgcatcctctccagcctgcactccattcttgtgaggcttttctctagtgtccggggcttggtgggccctggtgtgagaaacctcccgtcccgtgagaatttgcacatgaagaccccaaggactgagggcattacaagaagtcctctgaagaagcttgggcctaggagtcatgaggcccaagaacccaagagctaagtttggacatgaattcactgtatggctctgtccaagtgagttccgctccctggctcttggatcccctgtttgtagaatgagggcctcagtggctgtggtgctgtgagatcctttgcctctgagccccacactggaagcagaccctgggccaaatggcacagagggaggaaggggttgtctgtctccaacaatcctggcttttcttggtctcttgtcactctaggagttttgaaaatataagatagcatggactgcttcttctcttgggaatagactccagacaggctggttgctgaatgggtatggtggggtggaggtaggggagggtgcaagcctaggattggtactgattgtcctgtgaactgatgtgctttgcaggtagagcacgccctgatggaaggagcgaaggctgctggagcagttatttcagctgtagtggatagcataaagcccaaaccaataactgcctgaaggtgatgaaaactccagctagaggaagagttactgacacaagcaaaaagaacatgcttccttcccttgccttctctcaatggctccgattaagaaaattgtgaacttctggaagaatctacaatgtatccaattacccttccagaaatacatccaatatatacgagcatagacccacagactctcaggatgggaaggatctggtatctagtgtgtatctcttatgcgccaggcactgtgctaggcatttcatatacggatctaatttcactctctttgtaggatgggaccttgcttgtgtcttaggctgaccttggtctccgatgcttgagtgccatcagaaacatcccagaaacctctgcttgaatatttccagtaacgaagatgtctttttccagatgttctttttatttaactaaaatgtctctagcttctttccatttatgataatcctgcccttttcgacccacagtgtagctcagaggaggaggaccttaagaaaaactgagattcgttattcagggcccatggtaccttaatctagaaacacatatcccaagaaatattttctttttaaaattatacatcaactttatgccttattgtttaaaaatcttctatcaaaagtatcatcgataagacaatttatcttgcttttgtacctcataattaccctaaaatgtgaagtttctagtctcactgatttcagatgaatatttaaaataatttgataagtttaatcaattgaactctactgtgtgagtgagggagagaaaggagttatttttgtgttttgaagaaagttgacaggatggaagatctgaaattatggctggggattgtagtgatagctggtagctgaaaccacccaaaaaagctagaaaagtgttctcttatgcctccagagatacctagaaaatatgaagaatgtggaaaagagcaagatggaaccctcagagtgtttcagataaggtctgttggtatctccataagcttttctcctatttggagaaaatagactctcactgaaactcttcaatgtttttaccctccatccttttcttagcaatctaaactcaatggcctcctgttccccaacactgcagtctgggcatctgactttgtcttccctctgcactcatttctgtgaatcatgaccaggatgaaactgatatccctagttcctcttccccatttcttctcacactcccctgcctgagaatcagttgagttcccaatacctcttccttcagtctctattcattatatggtctaggttgagacttccttggaagcagaacctgagtaccaggaactcatattttataaagtatatttattccttttagctgcaaactaacccagccatgttttagtgaatgctttaatctgaagatgactttgagctcattgaccatattaatctttcatcaaacaaactggatgttgtttcattaacaaaaaactcctccacaccaaggagtgtttagtaacttctgcacagaggactcatccatctcttgcttatgtttgggacagaaagacacttctctggctttttactggcttgaacccaatgggacagagactctctagaaagtttcagggctcacattcacttgtttgtccaaaaaatatttttgagtgtctcccaagtgccaaaccctggctactcccacctttgcctgagcccatgagcggtagtctgggggctggatgtgaggagttctgagttggctaggaagacacaaggcacaatggacatggggcaaagtccacttgctggacattggtcccttccacttccaagctgtccatcaggctgagagatctggaatgcataccccacactttgaagatgaggaagggcgagtttctcaaagtgtgtgtgtgtgtttctcttttaatctgtaatggtttctgcattttgaggtagaaacagaaatctcttttttgagtgggaccactcgggtgcggcttcttagtcttgttgatataataaagcacatgcccactcctcatggagtggagaggagaaaattctaagggaacgtactctgaatgcaaatgtttctgagattaaacactagtcacttgt

SEQ ID NO: 869 - DNA, 22195 bp, Homo sapiens; identical to SEQ ID NO: 667
  source 1..22195: mol_type = other DNA

SEQ ID NO: 870 - DNA, 32744 bp, Homo sapiens; identical to SEQ ID NO: 668
  source 1..32744: mol_type = other DNA

SEQ ID NO: 871 - DNA, 32744 bp, Homo sapiens; identical to SEQ ID NO: 670
  source 1..32744: mol_type = other DNA

SEQ ID NO: 872 - DNA, 8899 bp, Homo sapiens; identical to SEQ ID NO: 669
  source 1..8899: mol_type = other DNA

SEQ ID NO: 873 - DNA, 30366 bp, Homo sapiens
  source 1..30366: mol_type = other DNA
ttatttgaagacgctcacggagcggctggctaggctgaggagagctcgccgggctctgaggcgcaggtaacctctggagtaggccgaggcggggggctgtggaaggctgaggcgagcgggagaccctgtggaacgtgggggcgaatgtcacggggaaagagcttttgctcggcgctcggcaggtccgcaggcccgagaccgaagaagccactgactcgttctccgcgctcacaggcgccgggtttccctcttcccgacgccggcgtttccttgttttgggtttagggtttgtttgtttgtttgtttccctgaccgggttcagggtcgggacgctttcctctcctacctttcctcgcttagccccagaggggtccccccttaagccgcagctcgacctgaattcccagagaccctggcctttcagtttgttcattcattaatagctttgaaataacgcttgtgtgctgctttggggggaatttccctgatcccagggaaggggaaggaaatgaattctgacgagccacgtagccgcctgctcgtgcattctagcatttgttttcagcagccttacgacttcaagagatttttataaaaagggaagcaaacggcttgctccgggctcatcagctaggaaaatggcagaggactgtgcttcacccgttttcttgctgggctctgatgaaaagttacagacggtctctgccttcattgaaggctgttgagatggggaaacaagaaaatgtcttaaatggactattagggaaatacagggtgccatggaagcagaacaagcgcgtgtaacccttggaggggtggaaggagagcaatgtcgaggaagacctcccagaaaatagggttttaacttggtgtgaaatagactaattaaagggggtataattttgataaagcgatttttaatattttgatgaatgtggttattgtcatttcttttaggaattcaataaagaaaatggcagctcttactccaaggaagaggaagcaggattctttgaagtgtgacaggtgaatctcagcctgtgaatagaaactcttagaaaaatccaccttcttgtctctcttgttctctcctattttctaaaattttcgttcttccactagcctactccttgtggctacagtgataacctgataacctatattctaattctagcttggaaatacattaagttttcataatgaattatttagtccttttcaagggaatcaaagctgttttttagtttttgtttttttcttttgacatagaagcagcacattgaagaaagctgttttctatagctaggaaatataccaaatcagctattacctttttcctttctgttcccctataatattttacagtgttttgcatacagtagatgcttgtctggaaacaattctagaaagactgtgtactcagatattaattactctacccaggaaaagccccagggggtcagttcattacagacagttattatagggggcttgtaaacaatagagcaaaatatatgagctataatttatatatggccaacacatagaaatcgattttaaaacatacatgcatatatgtctatcatagcttctttgtatatagtatttgttttcatgaactctttgggaagatatttgaatgttttatttgataaagacagaatttgagaatcctactgttaaactaatagaaaattgtgtgtatggggggtacatgtattgtttttaatatgacctacaagtagagcttacttagcagtagatttatgtaaattttgacgcaaaataatcttatcaatggactttgtttctttttatagccttttacacttcactgaaaatctgtttccatcacctaataaaaagcactgtttttatcaaaacagtgataaaaatgaagaaaacctgcattgctctcaacaagagcattttgttttaagtgcgctcaaaacaactgaaataaatagactgccatcagcaaatcaaggctcaccatttaaatctgcgctctccactgtatctttttacaaccaaaataagtggtacctcaatccactggagagaaagctgataaaagagagtagatctacttgtctaaaaactaatgatgaagataaatcttttcccattgtgacagaaaaaatgcaaggaaaaccagtctgctccaagaagaacaacaaaaaaccacagaagagtttaactgctaagtatcaaccaaagtatagacacatcaagcctgtatcaaggaattctagaaattccaagcaaaatcgagtgatctataagccaattgtggagaaggaaaataattgtcattcagctgaaaataattccaatgctcctcgggttctgagccaaaaaataaaaccacaagttacactccagggtggagcagcattttttgttagaaaaaaatcttctcttagaaaatcgtccctggaaaatgagccgtcactgggacgcacccaaaagagtaaatcagaagtcattgaagattctgatgtagagactgtcagtgaaaaaaaaacttttgcgacaaggcaagtgccaaagtgcttggtcctagaagagaaattgaaaattggactactgagtgcaagcagtaaaaataaagagaaattaataaaggtaaagctaaatatatcactttaaaaatggctgtataacaaaacttcagtataaatgacatagttgaataaaattttattttctggactgcttttataaagccagatagcatagtgtttagttactgtaaggagtttatttatttatttattttaagacagggtctttctttatgacccaggctgtagtgcagtggcacactgctcactacagcctcaacctcctaggctcaagcaatcccacctcagcctcccaagtagctggtactatagatgcacaccacctcacccggctaattcttgcattttttgtagaggctggggtttcaccatgttgcccaggctggtctcgcactgctgggctatagtgatccacctgcctcaccctcccaaattgctgggattatgggtgtgaaccactgcacctggcccagccacattttaagttctcaatagttacatgtagctggtggctaccatattagaccatgctggtctagaacttctgttgctgacctcctgtttatatccttcatcagaaaaaaagttgagttttgtggggcagctaggggcagaaagccattgaagcaaccttaagagaggttgtctccagatcagggcttccatgtatggtggcttgtttatattcatcacaacccttgtagctggagaaatgataggcttatatgatacccagtacactcaggcttatagtcatgtctttcctaacccacctctcatcattgccttcctcactagtttctctcaaattcaaccccagtccatatctctcgtaatcacctaaatttcaaacctcagtggcaaagataataaattggtggccagtaaaccaaatctcacccataaatgttttgcttggcctacataatttaaaagttggagccaaaattatttttaaatacaagaaaaacatttctggtgtctcatgaaatattgaaagctgagccttcatttctacatggcaataatcagagctgaatatcaggctgagtatcataccatttgacaaatatgggttcttcatttctctaagtcagtgtatatctatctatttagatcagtttagttttgatcattttacttactgctgcccttgtaaggcatttaagtttttagtcctcactgtaaatgtttgttttttttcctgtttatcgagtatggccaagtagattgttaaatgagatacgttcttgctagctaagccatgacagtctaattttactaattcattttctgtttatatcaacaaaacacttctgtgtcttgatagggattttgattacaagagtaagctttatcaaaatgtattaaactgtgctttatacttatacatttgtatgaaaattaagttttttgaaagtttggggcgtaactcaagctaaaattgtctcaatccagtaaaacaaaggaagagtctgcagtttccccatgcatctcctgatgattattcttatctgtttggtacagcctggtggtgtaccaaatgaatggtgacctgatgaattctctgtaaccagtgtaacagagaattctgtaattctcttttctgtcttattttctttttcttagcttcactttacgggtttggtattgagttagttttcagtagtttgggaagctgggcttttgtgcattttaaatttgtggaacggggctatgctctttcaagattttgctaaatacccatgtctgggattcgtctctgctagctaagggcgaatctgattttctgtttttttattttgagatggagtctcactccgttgcccaggctggagtgcagtggcatgatctcaactcactgcaacctccgcctcccaggttcaagcaattctctgcctcagcctcccaagtagctggtattgtaggcaccggccaccacacctggctaatttttgtatttttagtaggaacggggtttcaccctctcagccaggctggtcttgaactcctgactttgtgatccacctgccttggccacccaaagtgctggtattacaagtgtgagccaccgcgcctggccggtgaatctgatttttgtgaggataccctttccccaactcatggagccctgaaaagtgttaaactgatgggttatcccacctctgctgggatattatggttttgagtagaagttctactttaaccaagagtttttttcctttttccccaagctatatattccctagtaattcccaaattagtatgagggaaatctgtcaggatttttttctactttgcttttcccacattcctgctactctccagtgactctagaatgttctttccttagctgctgatttttaaagtttatggcaaaaagttgtccctttccagtttggtggctgctggggaaacttttgccatttttactggcttttttgttcatttcattatggaagtgatggtctgtaatcattctgccatctctgtcaggaagtataacacatttttgagaggatgacagattacaacacgtgtactctggcttttttttcttttgagacagtcttgctctgttgccaggctggagtgcagtggcacgatcttggctcactgcaacctccgcctcctgggttcaagcaattctcctgcctcagcctcccgagtagctgggactgcaggtgccaccacgcccagctaatttttgtatttttagtagagatagggtttcaccatgttagccaggatggtctcaatcccttgacctcgcaatctacccacctcggcctcccaaagtgctggcattacaggcatgagccaccgggccctgctgtactctggctttaaaggtaatgtacgcttagtgaatacaggggaagttttcctaaaaatagtttgaaaattgattgaaaatcacattatgaaatgtaattcataataaaccaaatcttttgttttagaaatagatctgctgggattcattcactagaaaatagttaaaaattacagatgtttggttttttttttaaacctattttcaggattcatcagatgacagagtttcttcaaaggaacataaagttgataaaaatgaggctttttcttcagaggattctcttggtgagaataagacaagtaagagaaaactcgcatgaatttagctgcttaaaataatgctttattacatacattatacaataataattcttgtaatttctgggtctttcttttttcagtagcgtgcctgtggttagtatctttgtttatctctgtgacactgttttctgtagtaaagcagtgcattgcgttttgaaaaacaagaaacaaggagatcctaggttaaaattttagacaaaatattaggcttaattggtctatggctgtggccaagttacttaagctctctagagttgagtgttctcattataaaatcatacctactctatctttcacccaaaataatagaagttaaaactattatgtatatttgtgatcaaagcccaattgtgagcagaacttactaagttttataagtgacactgaaattaagcatcaagaaccatggatttttgtctaggtttactaataattagctgtatgatctaggaagatatctctaaagagttaaagttaatttttaaattcctgtcaattctgaaatcctattcctaatttatgctgtcagtgttcaattaaatagcttactaaactatgaatacataaagcttttttttatgattctgagatatgatgttaataactagtatttactgagtgctgaatataaggcagtgctaaatatttagtatacgttatgtttttcatagattgtgctcaaagcactgatacaatagaaaatataacaaaaaggcatctacttaaaatagttataaatttttcttttaaaatatattttagtacattgtctaagtcaatttaaagaaaaatagtgaataaaaataatacaaatggtataaggatatgggagaaatcataaaagtaatataaaaagaccaaaactttattacttaataactacagtttatcatttaattctccctactactctaggtcctgatatgcccatttatagatgaggaaatggacttgggttaagtaacttaccaatagcagctcagactttcacctgccttggccttgtttctagaggatgagctctaattatttttcaatgcaaagttaaagtttgtttttttagcccactctcagcttactattttcctcaaatcaattgctgttttaactttgctcttttcttttaatagactttattttgccataattttagatttacagaaaagttaaagtacagagagtagcagtgtatctcttaccctgtttcctccattcttaacatcttatgttataatacttttgtcaaaactaagaaacttgtattggtatagactttttttttttttttttgagatggagtttcactgtgttgctcaggctggagtgcagtggcaccatcttggctcactgcagcctccacctccagggttcaagcatttctcccgcctcagcctcccaagtagctgggattacaggcatccaccaccatgcccggctaatttttgttaagatggggtttcaccatgttggccatgctggtctcaaactcctgacctcaagtgatccccccacttcagcctcccagagtgctgggattacaggcataagcccttgtgcctggccctaagcactagactttatttggagttcaccaaatattggtagtggtatattactgttaactaaactctaaactttatttggaatcttctattaatgttttctttctgtcccagtatccattccaaggtactatattacgtttaattgtcatgtgtctttagtcttatctgtgacattttctgtcttatttctttgtttgcatattgccagctggacgttgatatttccaactctaatccagtactccaggatttattctatccttttttcatctgtaacttccttctcggacagtgagacacttagttcctactattcactatccatctacttatttgttctgtcccagtaaacatgtaaaacagtttcataattgttaattcatacccctgtgagaaataaccaattagagtgcaatttttttctctttgagacagaggctcactctcacccaggctggagtgcaatggcgtaatctcagctcactgcaacctctgcccccagggttctagcgattctcttacctcagcctcccaagtagctggcattacaggtgtctgccaccatgcccggctaatttttttgtatttttagtagagacggggtttcgccacgttgggcagggtggtctcaaactcctgacctcagatgatccacccgccttggcctcccttacctttcatctcatagttcatgttgaggttgagatgaatcttatctaattcagtctctttttctatatgtaattattgctgaagtaagcttttgtggaatcctatatcagctcatgccattcttctctaaatgtgatatattttcaattttttccctttgtagaattccatatatagttaaataatatatatatattaaataatatattttttaggatgacaggcgtgagccactgcactcggcctagagtgcaattttaagtgcaatctttttgtctttatccttataacttctagtcaaaacaccatttgctaaagttacttaggacagcttctctttttccccctacctccttcagtgtcgttatgctatacagttctaatatagttagattcatttctcacagtctgcattccatcttaggctacctcagtagcctggttgatatttatatgtatttttttttctcatttgatgtacattggagttcattctttgtgatttttacagttctgtgggttttatcaaatgtatagaattacgtattagccattacagtaccatacagaacagttccttcaccctaaaatttccctatgcctacattttattgttactctccttcccctcagccccctggcaacaattaatctgctttttatttctatagttttaccttttccaggaaaaacattacacatatatatcctttggggtctggcttatttcacttagtaatacatttaaggttcatccatgttgttgggtgtatcagtagtaattctcatttattgctgaactattgacataccataagcattctttatatattctggatacaagtttttgatcagatatatgattgcaaatattttctcccctcaatctgtggcttaccttttcattctctttattttttgtagagcaaaattttttaatttgataaagtccaaattaattttttataaatatattatgctttcgctgttgtatgtaaaaacttattaccaaatccaagttcatgaagatttttccctaatattttttctagacattttatagttttatgtttttcctttattattaatttttttacagagacacagtctcactaagttgcccagactggtcttgaactcctggccttaggcgatcctcccacttttggtctcctaaagtgttgggattacaagcatgagccaccacgcctggtcatagttttacatttagatctgtgatccatttgagttaattttacataaggtttgaataggtgtaatttttttgcatgtggacatttaattggtccagcaccatctgttgaggactgtttttcctccatggaattacctttgcctctttgttaaatcttgatcttgagtattattttgtcttattaacctttgaaatcttatgaattaaagctttgattttatttggtaatacacattatcatgatttttcccctaccagtttctcctaagtccactgtctatccaatcttcagtgcatcttcagtcaattcaaaaaggtgagaattgttattgttttaaagtccaagccttgtaaattatacagttcctctgggtctctttttcagtctcatgctacttaatttggggagtttttttttcttcctcactaaggggaataggagaataatattgagaatagggtgatgaaatcagtccctcatagaaacatcataagaacttaagagttgagagatggaaaagatctttatatacttgagtaataataattgctaacattattatataataccttacccataataagtagttttatatctattatcttaattttcacaacaacttagaagttagatactattattctgttttcagcctaagaaactgttagtaatttagccacagttgccacagctattaggtgctaggaccaggactagaatccatatctgaaccaaatgcccattaggttatattgccttccctgggtgatagtatagtagctacaatttaataagcatttacaacttcatgatgtaggtaccattattaccccatgttgtagatgagaaagctggctggaggagtaagtaacttgcagcagcttaatgttatcataaagtatagctgaagctaccagtacccaagctaaagactgcaatggaggaggcatggatgggtagagagcatgataggcggcagagctctgaaaaagtagtttcttatggtctaaacatcctcttcctaagcagctttgattcttctctccccatttgattataaataactccagatattaagcaaggaacttcccggctacattttccttactctcagagcacctcaccttaaattgcctcagtgattaggatgggtgcacagctttccctcttcaaaggtttgtttctagtttttctcacctttcccatttttcacctgtgttgtcatctttcatgaccttttattgaagatgggagctgtcttagttcattttgtgttgctatcacaaaataccatggactaggtaatttataatggacagaaatttatttggctcacagttatagaggctgagaagttcgagatcaagcagccacatctggtgggtgccttcttgctgcatgatcccatggcggaaggcagaacaagagagtgtgcatgagagaacaagagagcttggcttgcagcctcacatccttcaataatcaacattaatccattcatgaaggtggagccatcatgagctaaacacctcttattaggccccacctcccaaaactgttgcactagagattaagttttcacacatgaactttgggggacgtgttcaaaccatagcagaagcctaccacaattaactgataaaagtgtatactaatttagtctagcataaagagacaggccaggcgcagtggctcatgcctgtaatcccagcactttgggaggccgaggtgggtggatcacctgaggtctggagtttgagactagcctggccaacatggggaaaccgtctttccaaaaaatacagaaattagttgggcatgatggggcatgcctgtaatcccagctactcaggaagctgagacaggagactagcttgaacccaagaggcagaggttgcagtgagccaagatggtgccactgcactccagcctgggcaacagagcaagattccatctcaaaaaaaaaaaaaaagacagtgggatactatttgttaaataatatgatattgctctttttgtagactccaaaacgtcagttatcagcaatttgagatttaatctattacttcagatgattacagattctcaaagtgcttagtcgcacatttgttttttggtttttaaaattcaatgaacatttagagagtatcacatgctattgaactatactgagttctagagatgtgaagataattaatgtggtcttgctatcaaggaggttatggttagaggagggtagacatttaaacaaatatagtgttagagttgctaaaatggaagcaaagagatggctgtcacgcatgcagagtcagggagagcctagcaaaggctgcataaggtgaaaagggtcagtgacttgaacaagtgttttttcatactgtaggaagtagcccattagtagttcatcagaccagtttagggtgtcatatcttgtgacagttactatgggactgaacgaaggtggacgaacgcagaaatgaagacaaagacaaaaggatctttttaaagaaggggtcgggagctcctgctagtgagcaagggccctgagcttttacagccttttatatttattgggtagaaagagcagggaggaggaggtaaaggtcagctgcttgatttatcacaggttcacgtgattgctaacaggcttcaaatgtgcctatagataatcgcaagaaacactgtgcctgggcatgactgccctcagcattccttctgggtggcagatgcagtttgtcagtttgccaacaacctgcattcatgataacagtttgctgtttgctcatatagcctccagtggtatactgagttagtcacaaccctcattcttttggcctccaacaatagcatttatttttagtggaatagtgtatctctcacacagcaagtatatttagtgaaactttggttttatgtctgtactagtcatgtgaaatgtatttcttagcatagatttgtcaagtcagtttgaaaactacttttcagacaaatggtaagaagatagcttgacttagcttaatgcagtggagctaatgctccacctttttttttttttttttctactttgtcaggtttttttttttcctgttgtttgaacttcttacttttggtactagggttttttttttttttctttcttatttacttctactctttagggatttctactcctttggtccctggaaaaccaaggtcctttcattacaaggcaagggttacaaactcagtacctacagaaccagcaggctgggtggagactagggccagctgaagaattgcccacttaaaagggcatgtgctattccaagttcgaactcatagattctttgatggagtagaggtttagtgatcttacaatgtctcttaatattggaaatacacatttttaagtgaaatctctagattttaaaatattggtagctaatccaaagtttttaaataccatatgggccaaccaaaacatatctgctagctagatttggcctgaggggctccagtttgcaacctctataagtgaatctcaacattctttcataataggtaaaggttgtctcaactacagctatccagcctaaatatgtttttgttttttttttttccttaagaatttcacagtagtgagatgctgcttttggtatgaggaaaagcaaatttagaagcttcattgcccaggtgctgggtcataatatgatggtgactctgatttcctgtggatctgtgaagttcagtattatacttattttctccagtaccccaggaatttcttcatagctgtatggggtaaatattgtcctaagatttgataaagcaaaaaaatctttttttaaagggcaaagtcaatttccaaagtgtgcatctatgtgcatctgatattgtggaagaaagtccctaggacttggagtcagaggaccaggatttgagtgttaacactgccatttactagttactttaccttgagtaaattactgaccctctctgagtaggcctcaggtttctctttgttcctgtccttattacttcatcaagttaatgtcagatagaaagcactaaaaattgcaaggtactctgataaatggctgctttctttcccttgtaattcctccaaaattgtaaatttatatatatcaactttctgtgtcaagatctttaggtgaagaacagttttctgtgggatctgtcaacttcatgaaacagaccaatatccagaaaaatactaataccagagatacaagtaaaaaaacaaaagaccagctcatcatcgtgagtaaattccaaacaaagcttctcctatctagccctttgcagaaaagcttgccaacccctgtattagacagttcagaacttggtattttcaatgtcattaagcaatgttttatgtgacagaatgggagttgtaggtggtgacattgaatattcttgaatttatctgtgcttttcctgcactctattttttgtcaactcttgggtcaaataattttaatattgtttaaaataatttaatattcttagctgcttaaggaaaaatattgtataattaatatagaagtcctaaaatttttgccctccctgtttgaaataaggctttttcaggtctttaagggtttcattaaaaagttccgttgttcattttagctgtaatttccacaatttaatcttattctttcttagaaccatgagtctagtaaataatcttgtaaaaataaaaaaatctttggtttttacactgtccattcaaataattccctttcatcaatttattgcatttttaggtctcttgtctcttttttttccccccccaaagagatggagtctcaccatgtcgcccagactggtctctaactccttggctcaagtgatccacccacctcagcctcccaaagtgccgagattacaggcgtgagccactgtgcctggcctgatctcatttcattttgtcttgggggagggaaggaggatatggtaaccagattttcatttagtttttcacttgtgtcagcaggaaaaaaaaaattaggtgaaatttgaatgaatggttataggaacttaatttagagctatttgtgctatatttaaatgggtttctttttttaccccccaattataggacgctggtcagaaacattttggggctactgtgtgcaagtcttgtggtatgatatatactgcttccaaccctgaagatgaaatgcagcatgtacagcatcaccacaggtttctggaaggaatcaaatatgtggtgagccaaaacatagtctttcagtttgttctagaagtaaaactaaaagagacatttcttttccaccacctctaccacccagccggaaaagttaacttttaatgatgatgtttcaagcttactatctcaatttaagataaatattttgtaaacactgcattctgagcagagctgaacagtccagatatacaaaattcagagactgcagagatactctcttcccactatagtgttgtctttataggtagccttaggaaaaaaatagccttcccatgacttctccaggttttttctgagaggagaggtcccacccatttattaaacacctttcaagtccaaacacatcctatcattggccctatctttatgattgtacctgctactcagatacattcctttttccctatttttattgccacggttaatgccttcacaatatttttagcctgtttattgaaatggcttgctttctgggttcccatagtgctaccagaaataacgttttaaaacataagtctaggccgggtgcagtgactcactcctgtaatcccagcattttgggaggccgaggtgggtggatcacctgaggtcaggagtttgagaccagcctgcccaacatggcgaaaacctgtctctactaaaaatacaaaaaattagccaggcgtggtggcgggtgcctgtaatcccagctactcgggaggctgaggcaggagaatcgcctgaacccaggaggtggaggttgcagtgagccaagattgtgccactgcactctagcctgggtgacaagagcaaaactccatctcaaaaaaaaaaaaaaaaagccatagatgaaacataagtctagtatgattctacatacttctggaaagaaaaagttcccaccagaagtttggtgctctttaatctggcctcaacctttcctatatatgtgcatataaaatacatacaaaagagaaagtgtgtatgtgtgtagtttaaattcttgccctctctgatctgatctctacatcagccagaaagttctttctaaaacataggttctgacattgtctgcttcaaatttgacagctttctgttgcactaggaataaaacccagactccttaccttggctgacagatctcttcatatttggcccctgcccaccttgtcacatgacacattccctctccagctctaagctcctgccgctggaataagccacattctctgatgaagccagactataccatacgggatttctttctttaatttgtggaaacatactgggcatgttatcctttatatattttgaatatcattcctgggttacaaatacattctccctgtccctttttttaaggtttgaatttatatttttgatatagtaatactttcacatgattcaaatttcacagaatgcaaaagtatatccagtgaaaagtgtttctccataccccttccagaaacctcgttcccctatctataggcatccagcattaacagattcatctatatatctttcagagatattttctgcatatacaagcaaataccattacttggatttttttaacctttttgtggtgtatattgctacaaagaaaacatttttatttagctagtttgtgacctttggtttcttaagtcaggaacatcatctcagtcccaaaattagtaagtttttcctatatttaaaaaaatttatagctataaattttatatttagacatttaatccactggaattttttcaagacatagtgttagagatggatccttatatttttcctaaaggactgcaaagtgtgccaacattactgtttgactagtttatcttccacactgattagcaatgccacgtttaatgcataccaaattcccacatataaatgggtttgttattggacacttctgcaccatccatttgttcctgtgctagtgccatacttttataaatgtagcttcatactgtatagttaggtaagttccctttcatccttctctgtaaaaaatgtcttgactttttctgcacatttactctttcaattaaaaagcctatcacattccccccaaatgaaaaacctattcgaatttttattcaaactagtcaaactaatgccattttctctagagaaaaaaaatcttagtataacttaggaacttagtatagcacatactattatataaacttagtatatactgtagtataaacctagtgtatacttagaaacttagtatacctctgattgattcatatctttgatgtctttcaggaacattttatagttttgtcatggatcttattaaatttatttctaatatttcaacctcattttttccaatcagtcagttataccagatttttttgccattctctgcacctttgcttattcagttagttgccttagcctgaaggcaagttaaccaccttccccattatgctcactgacatcttaccaaggtttttaaacccttttcagtaccataatatttcagtatcattcaaagactagggccacatgccaaagcactatgctgggggttgagattaaaatagttgtaagactgcacccatctgtggtcttgtcaagcataagggacaaacgtataaggacttttacttagccttttcttggaatttggcttattcttctacccctcccctacctgcccactggtcttgaactcctgacctcaagtgatccacccacccgggcctcccaaagtgctaggattacaggtgtgagccaccgcacctttacctctttaccttgttttatagtcatatacatgtcttcagataggatatcagcttgttgaggccagatacctgttttaggcatcttttatttctcttcccacattacttttagttggatttcatcttcttctttttatatctattattgtttagccttttgtcttctccacatcaaattatttaatgttggttttttttcctcttcacaaattaaactgtgacccttttgttttcctttggcagggttggaagaaagaacgtgtagtagcagagttttgggatgggaaaatcgtgttggttctgccacatgatccaagctttgctatcaaaaaggtatggaacattatctttttatctcttgcctttccccacccccaagaaatcaacctatgttgaagtgcaaactgcctttgctgacagataattcacttgggtacctgcttaatgattactttcatagcaatttatacaaaactaagaattgtaggacaaaggagtaaagaaggcagataaggctccacagcttatcttttatattcatctttcccttgtgaaagataaactaagctttcaatgttgagaaattaatggcccccagggtctatttcttatattggtgttgcttgtgtttctgaggttgaatgtttagccaccgtgaataatgaataaagctaaaacaaatctgttttaatgcttcctattccttatccctcccaggtgtctcaatttctgctgaaagtgatctttaaaataggttcttaaaaccttgtttccacagtagcagctacatgcatcaatagtgaaataattttggaggtgtataaatttaagaaatagaaattaaagaggctaaagtaacagtaatcatacattctgtgtatataaatatgtatagtttctattgtactttttaaaacattcacctgtcttggtttttaaaatcattaggtagaagatgtccaagaacttgttgataatgaattgggcttccagcaagttgttcctaaatgtccaaacaaaataaaaacttttctttttatatctgatgaaaagagagtagttgggtgtttaattgcagaacccatcaaacaggtatggtatatttgttttaaattattggcataatttgcaggcaaaataaagaaaagttgggagaagtctcagcatttaagattgctaccattaatgacactcttcctactgaaatatccttgacctagtggataattgaagttatttatttccattaatatttggaattttgctttgtataaacaggataggtaagccagtcttttatgttcatgtagtcattaacacagctggattataaagtctagtgattttaagtaaacaaatctataaactgaaatttttaaacatgtggcttagtgaaggttaatatttttggcaaaatagtcattacttatcccttaattagaatctaatttaggtactaattagcaatgttctagaagacatgtagtttctccttgtgttattagaagttggagagaaaagcagcttttttgtatttttgccagtataagtgatcagtttggccttttccttccccctcagctttattaaggtataactgacaaaaattgcaaatatttacagtgtacatgtgatattttgatataggtatacattgtaaaatgactaaatcaagctaatatagctatacctcacatacttaccaacttattgtgatgagaacattaaatctactctccttgcaattttctttttctttgtttttttttttttttttctttttttgagaccaagtctcactcttttgcccaggctggagtgcagtggcacgatctcgcctcaccacaacctccacctcctgggttcaggcaattctcctgcctcagcctcccaagtagctgggactacagccgcgtgccaccatgcctggctaatttttgtatttttagtagagacggggtttcactatgttgtccaggctgatcttgaactcctgacctcctgatccacctgcctcagcctcccaaattgctgggattacaggcatgagccaccgcacccggcctttagcaattttcaagtatacattagctgcagtcatgccatacaatagatctgcagaacttactcatgcgaacttaaactttgtaccctttaccaacgtttccccatttctcccatctctcactcccccagcctctggcaaccaccattctactctgcttctatgaagtcaacttctttagattcagtatgtaagtgagatgttgcactatttttcttttttgcttgactgatttcacttagcatgatgtcctccaggttcattcatgttgttgcaaatgtcaggatttcctttttaaaggctgaatagtattccacctgtatatgtaccacattttctttattcattcatccattgatggacacttaacgttgattacatatcttggctatgaataatgctgccatgaacatgagagtacagatttctcttcaacatactgatttcagttcctttggatatacactcagaagtgggattgctgcatatggtagttgcatttttatagtaatcattctaacaggcgtgaggtgatcttgttttaatttgcatttccttgatgaattagtaatgttgaatgagcattttttcatatgtctgttcctgatttgtatgtcttcttttgaaaaatatctattctggttctttgcccattttttaatcagagtatttgttttcttggtattgggttatttatatattttggatattatcccctattgtatacacaaattttttttccaatcagtaggttggttagtttgtgtttatccactctgtactatgcagaaacttttcagtttgatgttacatttatttcttcttttattgcccacatttttggggtcatagccaaaaaattattgcccagaccgatgtcaagcttttttctcatttttttccttatagttttacagtttcaggtccctcattttaagtctttcatccattttgagttgatttttgtatgtggtttgagataagtctccaatgttattcttctgtttgtggatattcatttttcccgacaccatttattgaagagactgtgtccttgccccattgtttgttcttggcatgtttgtcagacaccagttgactctaaatgcctggatttattttatctgttttgttccattggctgctgtgttttttaatgccagtaggagtgcagtgcccctcagctttactctttggtctagattgctttggccgtttggaatctcttatggttccacaagattttaggactgttttttgtatttttgtggaaatgccattagaattttgatagggattgcattgcatttgtagattgctttgggtagtatggacattttaacgatattaattctttcaagccatgaacactggatatccttccatttatgtagatattcttcatcttctttcatcagtgttttctggtcttcagtgtatggattttcacctccttggttaaatgtattcataagtggggttttttatgctattataagtggattgtcttcttgacttctttttaagatagatcatagtttgtttttcctgtatagaaacactactgacttttgtatgttgattttgtatcctgcaccttttctgcatttgtttattctaatagtttttttggtggaggctttagggttttctgtacataagttcatgtcatttgcaaacagatgatttaacttcttcctttaaatttgaatgcctttcttttttcttcctaattgctctggcgaggaattccagaactatgtagaatagaaatgatgagagttagcatccttgtcttgttcctgattaagaggaaaagatttccacttttcattgctaagtatgatgttagttgtgggcttgtgatatatggcctttagtatattgaggtacattccttctgtacctaatttgttgagagttcttatcatgaaaggatgttggatgccttttctgtattgagatgatcatatagttttgttcttcattctgttaatatggtgtaacacattgatgtgcatgtattgagccatccttgcatccagggataaagtccactggatcatggtgtactatgcttttaatgtgctagtttgcatctgtttatcagggatattggctggtaacttctcttgtagtgtccttttctggctttggtatcagattaatctggccttgcaaaatgactttggaggtattcttcagttttttggaagagtttgaggattagtattagttctttaaatatctggtagaatttagcagtgatgtcattacagatgggctttcctatgatgcaagtttttttttttttcttaaactgattgaatctcctttttattggttagtttagattttctgtttcttcatgatttggtataggtaggttgtatgcttctaggaatttatttcttataggttacctaatttgttgatatatgattattcatagtctcttacgatcctttgtacttctgtgataatcagttgtaatgtctcctctttcatttgtgattttgtttagttgagtcttcttttttcttagtctagctaaaggtttgtcaattatctttcaaaaaaccaactcttcattttgcgaatcttttctattttttgagtccctgtttaatttatctccactgatctttattttcttccttctactaactttgggctttattcttctttttctaattatttgaggtgtaacgttaggctacttgagatctttcttctttttttatgtagaactgcttttgctgcattccataggttttggtgtgttgtgtttccattttcatttgtctcaagaaatttgtcaatttcccttttaatttctttgatccattggttgttcaggagcatgtggtttaattttcacatatttgtcagttttctacttttcctcccgtcattgatctctaattttatactgctatgaatgttctgtgtgcacttgaaaagagtgtgcattcattccgctgctattggatggaatactatatgtgtttctgttaggtccattaggtctgaagtgtaagttcagtgtttactggctgaactcagtggctcacacctgtaatcccaacactttgggaggctgaggcaggaggatagcttgaggctaagagttcaagaacagcctgggcaacatagtgagaccctgtctttacaaaaattagccaggcatggtagtgcatgcctatagtcacaggtacctaggaggctgaggcaggaagattacttgagcccaggagttcgaagctgcagtgtgctatgatcgcaccagtgcactccgctcagggcaatagtgagaccctatctcttaagaaagaaaaaaaaagttcatttccttattgattttctgtctggacgatgtatccattgttgaaagtaggatcttgaagtcccctacaattttgtattcctatctatttctcctttcagaatcctaaatatttatatatttaggtgctccaatgttagatgcatatgtatttacaactgttttatcttaatgaattgacccttttattatataattaccttctttgtctcttgatggtttttgacttaaaatctattttgtatgatgtaagtgtaggtacttcctgttctctttcggtttccatttgcatggagtcgtttttctgacccttcactttcagtctatgtgagtcttttgtaggcaatatttagttgagtcttgtgtttttatccatttagccactctgtgtgtcttgattggcaaacatattctatttacacttaaagtaattattgataaataaggatttactattgccattttgttttgttttctggttgttttatatatattcccttcttcctctcttgctgtcttccttgggatttgatgattttctgtagtggtgtgctttgatttctttatcttttatgtatctactataggttttcgctttatggtcatgaggcttacataaaatatcctataatataacagcctattttaagctgataacaatttatatcacctacaaaagctctgcactttttttcccttcaacattactaattttacagtttacatctttttatgttgtgtatttatttaagaggccttttccttcttcgatctcaaagaagtagactgttatgtcctgataataggcaagatgtagctaactaactgttctcttctactctcaggtcagaaacaatgttgtgttgttcgtaattaaaaactaaatacacacctgtcagaagggtaacagtaggtaaagaattgagacaataccaaatgctagtgaggatatggggaaaccagatctctcacaccttgttagtaggaatgtaaaatattacagccactctggaaaaagttttgaagtttctttaaaaactaaacataggccaggcgcagtggctcacacctgtaatcctagcactttgggaggccaaggcaggtggatcacctgaggtcaggttcgagatcagcctgaccaacatgctgaaaccccccgcctctactaaaaatacaaaaattagctgggcgtggtggtgcatgcctgtaatcccagctacttgggaggttgaggcaggagaatcacttgaacccaggaggtggaggttgcagtgagcgagatcgtgccactgcaatccagcctgggccacagagtgagactccgtctctttaaaaaaaaaaaaaactaaacatgtatttactatatgatccagccattgttctcctgggcatttaagtaaaacaaaggaaaactgatgtacacacaaaaacctgtacaagaatgttaatagcagctttattagtaatagccaaaacctggtaacaaccaaagtgtccttaaatgctttaggtgaatgataagctatgatacagccatatgatggaatattacttagctataaaaagtaacaaagaattgatacacttaacaacttggatgagtctcaggggcattatgctgagtgggaaaaagccaatctcaaaaggtcatatggtatatgatttcatttatataatatataacattctcatagccatggggaataaattggtggttgtcagggactgaggatgggagagggggtagtgtggatgtgactataatgaggaagaagatctttgtggtgactcaatagttctgcattttgattgtgatggtagttaaatgtatatacaggtgtgattaagtgtcatgaaactatacacaccattataccaatggtaatttcatggttttggtattataccagttatggaagatgtaatcattggggaaaactcagggaaggatacatgctcctctgtagtggtttttttcaacttcttatgaatctatttcaaaataaaaatgtttaagaaacgaaatgccaaccaaatttcatagttaatagatataaatcttctttagtgttactggtttctttaggtggtcatatatacattttaggatggagagaatgagagagttttatatactttattaaaaggaagagtctaatgtttacaattgtttaagaggaaagtctcgtaatgctatgggacacactagaatttgtgaatgtctcaacaccactagtttttttaaagcattgtgtgactaaagggataagaatttaagaaatagaaaatattttttaacatacttggagatataagttaaatttttgatacttatttaaggaatttttttttaaagcagtgtgaactcatctgtggtgttagctatagatgcttctgtatatcattgcaggcatttcgtgtcctgtctgaaccaattggtccagaatccccaagctctacggaatgtcctagggcttggcaatgttcagatgtaccagaacctgcagtctgtgggataagtagaatctgggttttcagactgaagagaagaaagcgcattgcaagacgactggttgataccctcaggtaagaaataaaatggatctagatccagaaccttagattcatagctttcccagaacctctcggcttctgagctaaagggaaggatattggtaagatacttcagtataaatactattaaagtcaggctaaggaaggtattggtactagaaaaaccatactagatgtactcagtctagggtgcaacattccaggtctgaaacatactagcccactgcttttcaaactacctgtgctaaaggactagtttaatttgtcacagaccaacactaataaaataaaaatggattgctagaaaaaaatagaaaaaacaaaactacaatctcaaattgttttagacttaacagatgtgaaattacgcttcaataaatataatctatacaaagtaaaggtttgaaaaattacagaagctgtacatggtcattgatagtgactagataatgaagacttggtataactcataagcataactaaaaaagtggatttgtgagacaatccatagaacgagagaaaatagttgcaaatcatttgtctaagggtctaatacccataaaataattcttataacacaataaaaagacaacctaatttaaaaatggacaaagaatttcagtagacatttctccaaagataaattgcaaatggttaattcaacataaaaagatgctcaacatctttatcagggaaatcacaaaacaaaaccatagtgagatcccactttatacccagtaggatgactgtaatcaaacagacaagtgttggtgaggatgtagaggaaactgaaacccttgtacattgctggtaggaatgtaaactggtgcagttggtgtggaatacaatctgatggtttctcaaagttaaactgttatgtgacctagcagtttcactcctaggtatatactcaagaaaacatgtccacacaaaaccttgcacatgaaggttcatagcaggattatttataaaagccaaaaaagtgtaaataatccaatctgtgattaatggataaatgtgatatatcgatacaataataacaatgggatgttattcagccataaaggaaattctggcacacactgcaacatggaggaaccttgaaaacattatgctaattgaaataaatcagttgcagaagatcgcacattgtatgattatatttacataaaatgtccataagaggcaggcaaatccagaggcagaaagtagatgtgtagtttccagggactgaggaaagatgaatggagagcaactaataatgagtacggggtttgggatgataaaaatgttctagaattagatagtggtggtgactggacaatatttgttaatatacacaaaaccactctgttgtacacttttaaagggtgagtcttacagtatatgagttatatctcaaccaaaaaaatgagtgtccagttttaattcccatgtacacactttgaactgacactatgtattgatgtttaaagtttccaatgtcacaaacaagcctgtttgctaatttacctaatctaggttatatggatgagtttcacaacacttgctctctcaatttctacacatatttcatcgtgtagataataggttacaaaccagtaagcacactttaaccaaaccaaagaccacactttggaatagtgttattcaagcctcttgcattctatgccacttttaaaaaataaatgccaacaccattatggggaccggatcttgggccataaatcctagtcaatcacacatacttacaaagggtatcagtaggaaaaattggtatcttaaagatttttgtttgattagttatgaaatacttttctatgttttatattagatatataaatttggtatgaggaataccagtatctaacctagttctaccatattatgtatttaattatagttaatatattagaagcttatatcttctaattgaatcaaattctaaatttttattccgaaataatttcaaacttacgaaagaacaagagtagtaggaagcctttgtcaagatctattaagttcaacatttacctcatttgctttaccattctatgtttagataaccttcctgaattattttgttacatatattatgcccctttaccccttcatgcattggtgtgtttttcttaaaaacaagaatattctcttatataaccatgatacagttatcaaatttgggaaatttaatattgatgtaatgcttttatttgacagtccatatttcacttttgtctgttgtctcaaatgtccttcatggcatttttttttttttttttttttttgcccagtatcacattcagcatttagttttcacgtctctttaatcttcatcttccctaatctggaacaatttctcagtcttttgacatggaaaaatttgaagagtgcaagtcagttattttatagaatatccctcaattttgattaattctttttttttttctttcacaaacaagctgtaggagatgttgaattcttttaaccatttccttattacttttaatcctaaggtaagcaagatcaaggagagttgtagtcaaaatgcagattagtttttcccttcttaaagctctcagtggatgtttacattgaaaaaatatatataggctggacggtcgctcttgcctgtaatccctgtactttgggaggccgaggcgggtggattacctaaggttggaagttcaagacaatcctggccaacatggagaaaccctgtctctactaaaaaaaaataaataaataccaaattagccgggtgtggtggtgcatgcctgtaatcccagctactcgggaggctgaggcaggagaatcgcttgaacccgggaggcggaggtttgtagtgagcagagatcgtgccactgcactccagcctgggcgacaaagtgagactctgtctcaaaaaaaaaaaaaaaaaaaaaaaatatatatatatatatatatatatattatatatatatatatatagttactgcttaagattgattttttttggttctaattatctttggcttttaattaacaatatgatcttttttttatttttattttttgattgagttggagtctcactctgttacccaggctggagtgcagtggcgagatatcggctcactgcaacctccgcctcctgggtttaagtgattctcctgcctcagcttcccaagtagctgggactacaggcatgcaccaccatgcccggctaatttttgtatttttagtagagacagggtttcaccgtgttaggatagtctcgacctcgtgatccgtccgccttggcctcccaaagtgctgggattacaggcgtgtgccactgcgcctggcctagcaatatgatcttatattagttgctctttaccatggatatcctagagttaggtggatggttccctttgcctctcatcagaattttttctggaccttagttttcccatctgtgaaatgatatcattagacttctgtctctaaaatataaggcattttttcacttactaaaaataaggttgatttaagtcaagagtatttacttaaattgtgctcatgttaattagaatgttaagttgcttccatcattaaatcatcttttcttctcttttaggaattgcttcatgtttggctgttttctcagcactgatgaaatagcattttctgacccaacaccagatggcaagttatttgcaaccaagtactgcaacacccctaatttcctcgtatataattttaatagttaaagctgatttcagttataaaggagttactatctggataagttcaaagagctccttattataaaatacaaactatttaatatcaaaataaaaaataccgagactcacactcatacacacacacacacacacgcacacacacatatcacagttttgttccttatgagttgaaaagtcaggaataaatttgttgaaaattatctggggattcaaaggaaaaatctttgggtgattccctgattagcactctgaatgtttaattatgaaactttgtagctataactggaaaattacctgactctttgtaagagtattaaatacaaagtgatttttctctagaaatgtgacctggtcttttataaagcccactcttagaccaggattatctaatgccacatcagaagcaaacaggcaaatttaaacttgggcaagtaatttctgtgcccaatttgtaaagggaattcctgaatttttttttttttttaatagaggcatgggtctcactgtgttgcccaggctggtctgaaacttttgggctcaagcgatcctcccaaaacgctgggattacagtcatgagccaccgtgcccagcctaattcctgacttctctatacagagtcttcacttgataggcactcgtctgtagtaactcagtttgaatatctttagaaaatgtttagaatttatttgtaacaagatggtaaggaataagattatcccatatgcatttctgtagagcagaatttgatagcttagtgttcaatctttttgaaaataaatgtttacctgtcatcagatttaattaaaattatacttagtaattgcactattacttagttaatttttgttgtatggaaatattggtagtactactttgggaacctgttactgacaattgatgtcattaacaaaatgcctagttggattagatgttttcattttctaattttttgcttgtttaaaatgcaccttacttgttctgagatacctggcaaaagtctttacaaaatgtatggtaatagaaccaaggttagtaaatatacataggctggtggatgagagaccatggaactgtgtaaatacacttaaatgttcacacatttttctagtgtaattcttggatactttaaaaagcaaaacattgttcaaattgttttgattctgaaaaatcattcaactgctaactggcaataagactctaggcaagtcgttttccagattgtaattatatgtagaaactattcatctgcattcattttatttgcctgtaagttaacatgtttccaaaatttaaaagcctgggtccccaaaagaatgtggaagtattaaaatgtatgtaattatgcaaacattttaatgctattttctgcacttatttcttttaaatattttatttaaaatttttaattaacattttgtttgcttaatgcttttgttatgaatcaattaaaattctttattttatacaactaa

SEQ ID NO: 874 - DNA, 14521 bp, Homo sapiens; identical to SEQ ID NO: 671
  source 1..14521: mol_type = other DNA

SEQ ID NO: 875 - DNA, 19905 bp, Homo sapiens; identical to SEQ ID NO: 663
  source 1..19905: mol_type = other DNA

SEQ ID NO: 876 - DNA, 32744 bp, Homo sapiens; identical to SEQ ID NO: 664
  source 1..32744: mol_type = other DNA

SEQ ID NO: 877 - DNA, 9851 bp, Homo sapiens; identical to SEQ ID NO: 665
  source 1..9851: mol_type = other DNA

SEQ ID NO: 878 - DNA, 5896 bp, Homo sapiens
  source 1..5896: mol_type = other DNA
cgggattggggcctggcggctgccgtcagcatggcggaagtgggcggggcgcgttctcacgcgcatgcggaaggggcggtagccggccgggcctgggaacgtggctggttggaggaggtagatcaccctttctgcgggggacgatttcgtcggtggtaggtgggtgtgagcttggcagtacccgggtccgcgtggttggagggtcgaagagagtggtctagaacgccactcaaaggggagggcctaagactaagcccgccttgccctgaagtggtcgggggcggggagggagtggctagagccccgtggggtggtcgccggggtaagaggttggaagtaggtttaaggcagggctgaaagttgattctgggttggaatccctggactggggcaagtaatgggagctctggggatactttggtacttggtacttggtgcttgggtttgaggaatcgaagttctggggagtggacggaaggaaccggcagaaacggagcccaggcttggcctcttggagtgggagtcaaggattgtttaattatccttaaccagcctggttctctttcttgcaagaattttggagtctgtattctttgaagtgtctagacggaactaatgacggaagtcaacttagccccagcaggaaagctggagcgcctacccaaagttggaggaaattcagggtcctgaagtctttgctctccccatctgcatgcaggctgctaccatgaggttgaatcagaacaccttgctgctggggaagaaggtggtccttgtaccctacacctcggagcatgtgcccaggtatctttcccgcttgacatggggtgcgtatcagcacccagagctgtgtaaggtacagccccagtctcagggctatttcccctaagaagaaacattggttgtgagaaataattatatatgaggggggaaaaaaggctgggtgccgtggctcacgcctgtaattccaggactttgggaggctgtggcaggaggattgcttgagcccagcagttcgagaccagcttgggtaacgtagcgagaccttgtctctacaaaaaaatacaaaaattagccaggcatggtggtgcacagctgcagtcccagctactagggaggctgaggtgggaggattgcctgagcccaggagatgaagactgctgtgagctgtgattgtaccactgtactccagcctgggtgacagagcaagaacctgtctcaaaaaaaaacaaaaaaaacaaaaaaacaaaaacaaacaaaaacaaaaaaacggccgggtgcggtggctcacgcctgtaatcccagcactttgggaggctgaggcgggtggatcatgaggtcagtagttcaagaccagcctggccaacatgataaaacgccatctctactaaaaacacaaaaaattagctgggcttgttgcccggcacctgtaattccagctacttgggaggctgaggcaggagaatcacttgaaccagggaggtggaggttgtggtgagccgagatcacaccactgtactccagcctgggcaacagagtgagactttgtctcaaaaataaaataaaataaaataaaggctgggcgcagtggctcacgcctgtaatcccagcactttgggagaccgaggcaggcggatcacaagctcaggagagcgagaccatcctggctaacatggtgaaaccccgtctctactaaaaatacaaaaaaattagccggatgtggtggcgggcgcctgtagtcccagctactcgggaggctgaggcaggagaatgtgtgaacccgggaggcggagcttacagtgagccgagatcgcgccactgcactccagcctgggtgacagatcgagactccgtctcaaaaaaaaaaaaaaaaagagaccagcctgatcaacgtggagaaaccccgtctctaataaaaatacaaaaaaaatagctgggcatggtggcacatgcctgtaattccagcctgggcaacaagagtaaaactctgtctcaaaaaaaaaaaaaaaaaaaatagcagaacctggggactgtgacttccttgggaggagctgcccatcctcttccctttcattctctcagctttttggcctttcagcaaggaattgctttatgtaaactaaacgtggaagaaaaagaaattgtcttctcacctaattgtaaattagtgatgtttccctggtgccagtgagtatgttcagttcttggagacttaatgttagcttgtccttgaactctgagctgatgagttgtgatatctaccattcaaaaggccaggactgagtcatgatgggattcctgtgggggcagttggcacatgtctggtagattgggatagtggtgctgtagatgggtattctctacttgtagttttccgtttgagggttcctggtgccctaacttcgtgggatctgtccagccgcctttgttgaggttggcttgccatatacatccccttctggaatttgaagaatgtttggtttcagactgctcctccgcactgacccgagacaggataggaaattggacagatagaactgactcgtcctgctgttcttgtgtaagactagcttgcttctgggtcttgtgtctgtggcccctgccttaggagcaatcataaccctttgggtcttctttgagccctatgttagccctgtctggttctggaccctcataaggtgtcagacgtatgcctctgaatgagtcctccatgtctaaagccacccctctgtcccagcaggtaccacgagtggatgaaatcagaggagctgcagcgtttgacagcctcggagccgctgaccctggagcaggagtatgccatgcagtgcagctggcaggaagatgcagacagtgaggagtgcccccccacttcccctagccctggtactgggagggctgactccacagtcagtctccaggttccttccctttcccagccccggccatagaagctttgtgaaaagcctggaaggtgctggaactcctgtattctcatggccctgaagccagtccctgtggctgacccttctgtcctcttccccacccactgcatcgggcttggaaggatttggagaaagtagagcatttggggctctggctgtaaattgaggccctgcccctcatgtccctcaccacagcctagtgtggtgactgccctcctctgtgttccctgctctctgagaatttggttgctggttggagaggctttttctgtatgaggcagatttggaattttgtaatgagctgaaggaagctctgggaccccctcttctcctggcagactcagagatgctggtgttctgcagtgctctggcttgggtaggagtaccatcctctcttctctcctctggggagtgtgtgtgatagccctgtcacctcctcctcagagtgtaccttcattgtgctggatgccgagaagtggcaggcccagccaggcgccaccgaagagagctgcatggtgggagatgtgaacctcttcctcacagatctagaagacctcaccttgggggagatcgaggtcatgattgcaggtttgtttcacctagccctgccttccgctgactcccggctctcagatctgctgactgagcctgccgaggctgcaaagggtgggcactcacagggttcactgggaggctccatgtggtgagtccagggcctggctgggcagcctgcccacctagccccctcagcctggtggtacaccctcagcctcatcactttagtccttatgcttaggcgtgaacttaacccttggtttggggtagattcaagtatggttagtcccatagttggggtgggctggggaccctcagaaaaaggtctctggagcatgttgtcatattacaggaggaggccctcctgtttctgctccttcatggtcctcagtttcccccaagtggctactgactatccccatgaggcagcatactgactccatgaggtaaagaggtcagctttgaagtcaggttgctgggttgcaagctgtgaggcctttcacacttctttgtgcctgtttcctcgtctgcagaatggtaatgatagtagcaacttcagagttgttgagaattaaatgagatggtgtctgccaagtgcccgcactggagcctggcacacggcgtcagcgccgctcctgttgtctctcctagagcccagctgcaggggtaagggccttggcactgaggccgttctcgcgatgctgtcttacggtaagaaagtgtgagcagacaatgcgggaagtgggcaggccccaggtgaactttgttcaggtgtgagggttgggggcaggtgaaggttcctcctctgcagcttgggacaggagggtgggggcaggcgcctccttacttgcccctgtctcatctcctctgcgaggagtgaccacgctaggtctgaccaagtttgaggctaaaattgggcaaggaaatgaaccaagcatccggatgttccagaaacttcactttgagcaggtaaggatgtcctggggcagagtggggcttagacctgggtggtgggcctggtggtggtaatactgtaacttagcaggctttgttctctctggctcacgtaggtggctacgagcagtgtttttcaggaggtgaccctcagactgacagtgagtgagtccgagcatcagtggcttctggagcagaccagccacgtggaagagaagccttacagagatgggtcggcagagccctgctgatggctgggccttgtgggcagccactctgtgtgagcagggtgttgggcccatacacttcaaagaccagagccctgcactgggagagtgctcctggcccaggctgggaatcacctttcgaggcccttcagactctggcggggcttgctgtggcctccctccagctagtggtgtggctgagcagactccagggccagggccagttcccttctcccctcccggccaaacccagacccagactctaggaagctggaatggagggcagggatccatgggagatgtcgggatgaaggtgggagctggaggtgcagggggacctggaacatggatgggagtggacaggcctttctccttagaggccagaggtgctgccctggctgggagtgaagctccaggcactaccagctttcctgattttcccgtttggtccatgtgaagagctaccacgagccccagcctcacagtgtccactcaagggcagcttggtcctcttgtcctgcagaggcaggctggtgtgaccctgggaacttgacccgggaacaacaggtggtccagagtgagtgtggcctggcccctcaacctagtgtccgtcctcctctctcctggagccagtcttgagtttaaaggcattagtgttagatacagctccttgtggctggaaaacacccctctgctgataaagctcagggggcactgaggaagcagaggccccttgggggtgccctcctgaagagagcgtcaggccatcagctctgtccctctggtgctcccacgtctgttcctcaccctccatctctgggagcagctgcacctgactggccacgcgggggcagtggaggcacaggctcagggtggccgggctacctggcaccctatggcttacaaagtagagttggcccagtttccttccacctgaggggagcactctgactcctaacagtcttccttgccctgccatcatctggggtggctggctgtcaagaaaggccgggcatgctttctaaacacagccacaggaggcttgtagggcatcttccaggtggggaaacagtcttagataagtaaggtgacttgcctaaggcctcccagcacccttgatcttggagtctcacagcagactgcatgtgaacaactggaaccgaaaacatgcctcagtataaaacaaacattataaaacgaacgcgttgcttgccgtgg

SEQ ID NO: 879 - DNA, 16339 bp, Homo sapiens; identical to SEQ ID NO: 666
  source 1..16339: mol_type = other DNA

SEQ ID NO: 880 - DNA, 32744 bp, Homo sapiens; identical to SEQ ID NO: 652
  source 1..32744: mol_type = other DNA

SEQ ID NO: 881 - DNA, 23884 bp, Homo sapiens; identical to SEQ ID NO: 653
  source 1..23884: mol_type = other DNA

SEQ ID NO: 882 - DNA, 32744 bp, Homo sapiens; identical to SEQ ID NO: 654
  source 1..32744: mol_type = other DNA

SEQ ID NO: 883 - DNA, 32742 bp, Homo sapiens; identical to SEQ ID NO: 655
  source 1..32742: mol_type = other DNA

SEQ ID NO: 884 - DNA, 32744 bp, Homo sapiens; identical to SEQ ID NO: 656
  source 1..32744: mol_type = other DNA

SEQ ID NO: 885 - DNA, 32744 bp, Homo sapiens; identical to SEQ ID NO: 658
  source 1..32744: mol_type = other DNA

SEQ ID NO: 886 - DNA, 32744 bp, Homo sapiens; identical to SEQ ID NO: 657
  source 1..32744: mol_type = other DNA

SEQ ID NO: 887 - DNA, 9830 bp, Homo sapiens
  source 1..9830: mol_type = other DNA
agcgcaaggtgacgggcgtggacgcggctgtggggccgggagcggagggttggggtctggcctcccgcgccggggcgaaggggcagccgcagcgcagaggcccgccccgccctcccctcccgtcacgcccagcctcccggcccttgggctgctcgcggcctttttttcccggctgggctcgggctcagctcgactgggctcggcgggcggcggcggcggcgccggcggctggcggaggagggagggcgagggcgggcgcgggccggcgggcgggcggaagagggaggagaggcgcggggagccaggcctcggggcctcggagcaaccacccgagcagacggagtacacggagcagcggccccggccccgccaacgctgccgccgggtgagtcggggcccccgcccggcgcccgagccccgcgcgggggtgggaaggggctgcggaaaagttgggagccccgggtgccgctttgtcgcggggccgcggaggggtcgggctgggaaggccgcggggccggggcgaggagggaggcggcgctggcggggggcgctgcgggcgctcatggcggcggccgccgggtaaggcgggcgcagcgcctcaagggagcggccggggccggcgggcctggcgccgcggtgtccgcggcagcgccgccctgagccggagaagctttcccgggcaacaggtagggcggaaggtggggacgcgggggctgcgggcgacggggccgagccgtgggcttccctttgttggggagtggaggagcttggtgaccattggcgcgagagcctccaccctggcagcggcccgcggggttgccctggcctggacgcgtcctgtggcttgggtgggaggagaggggagggccctgccccgttttcttcctaccggcccaccgtgcccacctcgcaggcgaggtcagagcttccatgtgcttaacgggaaacaggaaggagcggcccggagcgcctgccccggcccggtagggctaaggcataccgttatgaggtgtggatggctggcaagggagctcctggtggaactggctttctgggccgtagcttgttaatcactagaggcccgtggcaagtgggttgactgcaggtgtagagcactcatctttagcctgcagttggagtctctccctccctaagcctagctcctggcatcaaaacctggtttcagtcacctgagttgccaggcccaggttcagggggttctgaggatcgtggcgaatgcagtgagcccctgttcctggagaagtgagtccgagcaggcctccagcaggcagtcacccccatatctgtgctggggcaggggtgggtggcggttgctgccgcataccggagtcgggatgaccgcaccggggtgtgagtggctgcacatgtaaaggggctcctaagggtaaggacttgcctgcagtcctgtccctgaggacctggcgctgaccataccgtgatctgcacagtctgttccagagagggatccttttctcccctggtcccccacttccctcactggggcctctggccagattttcccctgggaggaagggcctccttttacccctgtcactggccataggctggctgatccctcactgtgtccttcaacaccgccccagctgtctctcaaacccaccggcgtctccctgcccctggggccatagtctcatgcagtgttttggtccgtggaggcctttggtgggactttgcagacaagctgtaggccagatgaggctgaggactactgttctgactgcctctcacccacctcttttttacaatctggcttattttgaggcccatcctgcagcctggagggataacacacctctcattggctccatccatggcttgtagacttctagtacatgacctgcttctgttgcctgaaagttttcaacaaggaagactattcaggacttcttcagtggaagcagggagccggtgggacctttgtcactcctcccttgtcaacaactcctttctattttcctcagttattcttccaaactatgagagccagtcagactgaccacctggagtctgagagaattccttcctctcaggccgaaacttctgccttctcagccgtttggatctacaaactcccatggggatcctctgctcctttcatccacctagaggggtcttgtgggggtgtcagtcagagttggggcaaaggttggggctggacagagtcctgctcaagttcctgctaatctaatgccagttaaatccctgctcttctggcccctctccagcctgtgcctcagaaagtggcatctgtgcctccaaggcaggtgtgtgtgagagagagcgtagacagataccatgtctcttcatgtgtatgggggagtgaagtctgggtggaaaagtgtttctagatgtgattttctccataagaagtcaagtaactgccctgaaggcccagggggcctggaaaaacagggttgtctccttaccgtgtgtacacttcagcttttcttgccccagcctcttgtttatggggtcttgcttggatctgtgtgctggtgctaagaggcctccccagtactgccacagggacccaactctttggttctgtggggatgtgtaagtgaggccggccaggccccagctgtcctcccctctcttcatgttgagtcagaggtcctgaccctgctgaatctggggcctccctgctggggagatgggggtagtgcctctctgctaatggaggtgcaggaccaccagggagggctgtggtcatgggaagcctgcaacctcagtgtaaaagcccccattaatctgcatttcccaagtcttccactctccctgcttggagtggaagaggacaggcgctatctcatcttggggatgaggaagttgcactgcccaggtgtctgtccttgaccatgctctagtgcctactttgcctgccccccaccccctgttttgcaggcatgagacattcctgggccccaggagtccagcaggggctccaccctccctctgcgactccagcctgccgcctgactagagaaacatccctgccagttttcacagacctggttggggatgggatctgaagtctaggactgccagggcaacatggtacctttggctttacatttccctggagaagttgggctccaagagacagcagtcaggtgactgggtcaggctgatttctcgcttccaatcaggctgagcaaaaaagtgggaagagggggccatgtgcacacatcaaagtgttccgcattgtcccttctctgtgcattttctacccttgtcccttctttattcaattttctacaacttttctctaggaaaaaagtgtgtgtttgtgtggggaaagttccactgtggataattacatttaattttgttcagttcagaaggcttccatctgtttaattaaatatttattctggctgaggtggagggggcaggggcagtgtctggaatgtgtgtgtgtgatttgggggaggaggaggggagaaggtggagctgaagctcctttactggcagtgctgacctctgatttcatccgagagagcagtgaccaggagtggggacaagggggtaaagtccttgagctggaatactgacccgtgacaggctgagggatttcgcaagggctacagtggtgggtgggggtggagcgggagctgtcagagcagcagcaggaccagcccagcccagctgtggtctcaggctctgtcttcagtcagtggcaccaactagtctccaggtcactgtggataacaatttcaccactctcttttcttcctgtctctgctttcactttctgggccagcctaaatcccaccgcctcatctccttcccaggagaacaaggggtggggagcctggaaaagactgtcatggtcatcctgctgcggcttcttgctgagtcctaggattgccaggtgtttgctggacccagcatccctggctctcctggaccatcttgccattcctctcagcttcaagcagctgctcttccctcatgagccacacacgtctgaccgttccctccctcctctgggtatccaagtggtcactcccaccatgttgttcgtctttcagttgggggaggaggtttacatagcggctctttcctagactgagagggtatgggtgttcccctgcagactaggattctgttttctggatgagcatttatacgaaatagctctgaccaggcaccgtggctcatgcctgtaatcccagcactttgggaggccaaggctggcaggttgcttgagcccaggagttcaagaccagtctgggcaacatggcaaaaccctgtttctaccaaaaaaaaaattcaaaaattagccagatgtggtgtgtgctacttggtagtgcatgctactcatagccccaggcactcgggaggctgaggcaggaggggaggatggcttgaacctgggaggtggaggttgcagtgagctgtgattgtaccactgcactccagcttgggtgacagaggaagaccctgtctcaaaagaaaataaaagaatagctcttaattccatcagatgtattggtccgctctcttggttccctgccccacaatccctgactctttgcagccctaccttcacttttctttctgaagagttatacatagggtccttctgccttgtgtgtagggactagatggcttggcatggagtgtcaaccttgtgtgcagtagttcgatgtccagtgattgtggagctcagtgtcatttggggacataattttgctttaccttggcttttttttttttttttttttttttgagacagagtctcactgtgttacccaggctggagtgcagtggcaagagcatggctcactgcaaccttcacctcccaggctcaagtgatcctcccacctcagcctcctgagtagctgggattacaggcatgtgccaccacatccagctaatttttgtattttttgtagagatggggtttcaccgtgttgcccaggctggtctcaaactcctgagctcaagtgatcagcctgccttggtctcccaaagtgctgggatttcaggcgtgagctactgcccagcctaccctgtctcttaatttttctttagggacttgctactcagatgggttgtaggttgtagggaaggggaagaagggtttgcctcagccctgcaatgttttggggcaccccctggaagctttcagctgagttggcttggaggctcgaggaagtggccagagtgtagggggataagggagggactttactcagattgttggctacagcttctagggccaggtcctgcctgtcttgcaggttaagatagcaaaatgacaagacccccaaggttcttcccccactccccgaaatcagaggttgtaaggaccccaagtttcttaattccagggaatcacgtctgcaggttgctgtagacaataaatgctttttttttttttttgagacagtctcgctgtcacctaggctagagtgcaatggcgtgattccggctcactgcaacctctgcctcctgggttcaagcgattctcctgcctcagcctcctgagtagctgggactataggcgcccgccaccacacccagctagttttttgtatttttagtagagatgaggtttcgccatgttggccaggctggtctcgaactcctgacctcgtgatctgccagcctcggcctcccaaagtgctgggaccacaggcatgagccatcacggccggcctaacagtaaatgttaaaactggaaagccaccgtattacagatgaggaaactgatttgcccaaggctacatagccaggatagggatctagagttcgactctctgcccccttctccttttgatacatcctgaaaacttttattcatctatctcttcctccatagctactccctcttgatgccctcccctttgcccctcactcaggatgctccagaccttgtatgattacttctggtgggaacgtctgtggctgcctgtgaacttgacctgggccgatctagaagaccgagatggacgtgtctacgccaaagcctcagatctctatatcacgctgcccctggccttgctcttcctcatcgttcgatacttctttgagctgtaagcatgccagcctaccctcatgccttcccctgttgccagttgcagtttcttggacttcaagtttgttccttgctgtttaattagcccttgaccctgatgttctggctactcaggttcctgcccactgtgcaccccctcccctgaaggcaccattgtcttcctgaaggctcagcacccccaggccctttccatcaatggttatttgttctcaccctctacccgccgcccgcctggccactagtgaacacacaggcagctttgtcagctgtgggcagccctggaggctagagaaaagggggttgccaggaagctggggaaactgaggccagggtaaagttgccttagcttgcagccctttcccttcccagcaagctagataccttactcatatcccttccccaggtacgtggctacaccactggctgccctcttgaacataaaggagaaaactcggctgcgggcacctcccaacgccaccttggaacatttctacctgaccagtggcaagcagcccaagcaggtatgagccgcatgctgctctggctctgggaatcactgagtttggtggtggggggacagggtttgaatgttagctctggcaggtgaagagatggggaagcagtggtgctgactgaggttgttactgggagaggctggggatgctgctgagttccgaaggtaaacataacaatgggcttcttcactgtgcccaggtggaagtagagcttttgtcccggcagagcgggctctctggccgccaggtagagcgttggttccgtcgccgccgcaaccaggaccggcccagtctcctcaagaagttccgagaagccaggtgggggaggctggggcagaagctgggtgacaaggaatatcctgatgtgtcttgctgggagggataggcggtggctatacgcagggagatgtgaggaggtgaattcagttattaatggtatcttgtgagggtatctgcaggtatttgggggctgctgggggactgtgctatcctctgacctagccatttctgcttcctctgccagctggagattcacattttacctgattgccttcattgccggcatggccgtcattgtggatgtgagtggggattactgggaggtgggagtaggttctctggcaaggtcaggtgaggccatggaatttgggttcctcctcttttaacttctcaccatctctctgcagaaaccctggttctatgacatgaagaaagtttgggagggatatcccatacaggtatgagttctgcttcctcatgtgggggtggactaagacacaccctagtgaagagacggtttgtggaatccatggcagagggattagagtgatggaatgaagaacctcaggggctagggggtttgtggagtggggacacccttgcggctggttgctcttacctctctctcctctcccagagcactatcccttcccagtattggtactacatgattgaactttccttctactggtccctgctcttcagcattgcctctgatgtcaagcgaaaggtgggtgaaggggttgtgcaattaagcctcagagccaaaatgaggccctgggatgaacaccctctcctttgacttctgggtactctgaatggagctgttggtatatggggaaccaaaggcaaggggtaagaaggcatagtgagagctggggaataaaaaaaggccctggggcctgcatcatctctgcaggatttcaaggaacagatcatccaccatgtggccaccatcattctcatcagcttttcctggtttgccaattacatccgagctgggactctaatcatggctctgcatgactcttccgattacctgctggaggtcaggcttcctcaaatctagagaccctggtgcaggttcttctgtccctttggttttctttgggagggaggtgcggggtgggaatttggaggatgacattcctgggaccaaggaggagggcacagagtcagtgctcctaactggagtgtacatatgaatgtactcgagggagtcaggagcccatgatgatggatgggggctctctatgcagtcagccaagatgtttaactacgcgggatggaagaacacctgcaacaacatcttcatcgtcttcgccattgtttttatcatcacccgactggtcatcctgcccttctggtgagtaggcagctaggctacactcctgttctgaagaaatcaggagccttgcctttcttcccctcctgtatctccccggtgtctgacctgctcttgtccacgttctctctctccttgaatcctcaggatcctgcattgcaccctggtgtacccactggagctctatcctgccttctttggctattacttcttcaattccatgatgggagttctacagctgctgcatatcttctgggcctacctcattttgcgcatggcccacaagttcataactggaaaggtgaagccctgttcccattgtgtaggccttactactctctacaacttcctgaactcccatcttgccagtaactctctaaaaaactagtgtggagccctgggtataacaggaacaagccctcagagagaagcagtacttaggggtttgaggatctcatgtaataacccttcttgtcccttttccacagctggtagaagatgaacgcagtgaccgggaagaaacagagagctcagagggggaggaggctgcagctgggggaggagcaaagagccggcccctagccaatggccaccccatcctcaataacaaccatcgtaagaatgactgaaccattactccagctgcctcccagattaatgcataaagccaaggaactaccccgctccctgcgctatagggtcactttaagctctggggaaaaaggagaaagtgagaggagagttctctgcatcctccctccttgcttgtcacccagttgcctttaaaccaaattctaaccagcctatccccaggtagggggacgttggttatattctgttagagggggacggtcgtattttcctccctacccgccaagtcatcctttctactgcttttgaggccctccctcagctctctgtgggtaggggttacaattcacattccttattctgagaatttggccccagctgtttgcctttgactccctgacctccagagccagggttgtgccttattgtcccatctgtgggcctcattctgccaaagctggaccaaggctaacctttctaagctccctaacttgggccagaaaccaaagctgagcttttaactttctccctctatgacacaaatgaattgagggtaggaggagggtgcacataacccttaccctacctctgccaaaaagtgggggctgtactggggactgctcggatgatctttcttagtgctacttctttcagctgtccctgtagcgacaggtctaagatctgactgcctcctcctttctctggcctcttcccccttccctcttctcttcagctaggctagctggtttggagtagaatggcaactaattctaatttttatttattaaatatttggggttttggttttaaagccagaattacggctagcacctagcatttcagcagagggaccattttagaccaaaatgtactgttaatgggttttttttaaaaattaaaagattaaataaaaaatattaaataaaacatggcaataagtgtcagactattaggaattgagaagggggatcaactaaataaacgaagagagtctttcttatgccttccttgc

SEQ ID NO: 888 - DNA, 32744 bp, Homo sapiens; identical to SEQ ID NO: 659
  source 1..32744: mol_type = other DNA

SEQ ID NO: 889 - DNA, 19742 bp, Homo sapiens; identical to SEQ ID NO: 661
  source 1..19742: mol_type = other DNA

SEQ ID NO: 890 - DNA, 1427 bp, Homo sapiens; identical to SEQ ID NO: 660
  source 1..1427: mol_type = other DNA

SEQ ID NO: 891 - DNA, 32742 bp, Homo sapiens; identical to SEQ ID NO: 662
  source 1..32742: mol_type = other DNA

SEQ ID NO: 892 - DNA, 22009 bp, Homo sapiens
  source 1..22009: mol_type = other DNA
aatgcagggccaggccggcagaaggcagggtgggtggggctgagtcagaggagaagggataaatgccaggtcctaacccaagtacccacctgtcattcgttcgtcctcagtgcagggcaacaggtaagagctgctttcagcctggcaccctatctctggtctgccagctggtctctcagggctgtacacactgactctctggtctgagtagatctgactttttcctttgtttgtttcttagaatctgtctctttttcattttctttttatctcccatgtctctttctgtctttcctcattttcagcttttttctctctttttcccttcgttactttcttttgttagttttcaagatcattcatttcatttcatcattctctgacactcttgctttctcttatttttccctctgaattctaactatctttttctctaaatttctttctctccccctttttgtctctttcctcggctttgtatctctccgtctctgtgtttctgtctctctcttcctctctatcaagaacgatggcttaatatttcttcctgcaattccccattcctctctccctttgactccctctacctgctgggctgacagcagagctcagtgggtcagagcccatggggagcctaggggtgggggaagagctagggagggaaactaagaggatgtgggggtgatgggaatgatgaattgggtaaggagagatttggggaattgagagatgaataattagcagaaataagtgaagaaagtggaagaggaatgtagtgtcactatacagaaagtaaacagatttctattctcatcctaattcactgtgagaccctaggcaagtcattcactctctgaaaaaaaggcttggcctgtaatttccaccaccctttctagttttgattttgtgatcttctaaattttcctgtttctaagaatttctgattctctgattacagttatctaaagttctgtatgattctttcatggtgggaaaggggtactaggaagagaagtaaggcctgatgtttccaactcctgaagagaaattaccacttcccttccagacctaattgacttttgcaaagcaggccacaaaaggggtgggggggtgggggacaaggaatgctgcaatgagtgttttctggctgtctgctggggtagagttgcagttggcccttttcacctctgggagtacagattgggtgctgacacaagagaggattttaaagtcgtagggaaaaactttcagtaatgatctgttacttggtctcaaatttcaccatcatctctttggttaaaagtattgttttaagaagatgcctggcaagcattatcacacattaggtacataagttattgaatggtagagtaaatgaatattcaacagtacctgaaattccactgtagttacagatctgttcctttggtaaggcattggtgacaaatggcatatgacctggaaagaggcctatgttagtgcagcagaggagataaatgtctagagtcaggccctcagtcaagaaaaaaaggtagtaatatttgaatcacagatccataatggttaagttaggaatctctggaaacagattgcctaggttcaaatcctgcttctcctatgtactagctttctgatctagacaggttacttaatctttttgggattcagtttccctatcatcacagggttgacatgagaacacggcctggcacagagggctctgtaagtgtttgactatcagaactaggcggaatctatgaaattatctagtccaatgtcagtggagaaacggaagcccagagaggggaattacagagcccaagttcacacaataaattgtaacaggattgggacaagaatcaattctctagcttcccaaacccagcctggtatattcatgtgacttcccttggctgtacgttcattttttctacatgggaaatggagaaaataaaaataataaagtctatcaattaaatataatatttaacacttttttactgtttactctgggataggtactctgctaaatgctttatatggattatcttactgaatcttcacaacattcctgtgatgcagattgtccttgttattaccaacattttccagatataagatgtacagcagggaagtgacttttctaaggtcccaaagctagtgagtggtggagccaggattcaaacccaagtagtttggctctagagcctatactctttataccctaaattgactaaaatgcttccttgattcaattttactcactctagtctcttggtaggtaatgagatggaatagaaacagagcccatggtaactagactacaaggtcatgggtataatgatggccaggcagagtgaggcagagcaaatttcaggaaaggagtaacagaacaagagaaatgagaacaggagcttgaaagaacttgagaattcaacaaattccaagaagtggtctatattttcccaggaccctgagcatatcatggccaaaagccccctagtaatgatgtgtgttaatttctcctgtttttatatacaggaggtaggtcttctccaccatcccaaggcaggactggactttgcctccaatattgggggctttccttcccactacataccccaatgttgttggcattattgttgccagtattgatgttaggggagtttacaggagcctggagccttgtcatctgccttgcctgcacttctgggccatccatttcttaccaccaatagccagggccagctctagccagatgctcagacgtgattccaggaaggggctcctcttctctcccacgccctggtctcagcttggggagtggtcagaccccaatggcgataaactctggcaactttatctgtggtctgcaggctcagccccaagtgctttagctttcacaagcaggcaggggaagggaaacacatatctccagatatgaggtaggcactggatccaattccttacctaccttgtgaagtggccataattacctcacgtttgacagctgatgaaggccaagatccagagaggggaagtgatttgaacaagaacatccaacaatgaaattggagagctggaattttaataagaaaagctaacatttattgaagatttactatgtgccaaaaactatactaaaggcttaacttggattgtttcatttagtccctccaacaacccttctgtcttttccaatttcagggcccacatgccttggccccacataccaacccaggctgctgtgacagcccatgagagggggagaggttgctctgggatggaacaagaaaaagaggttgttttgtgaggtacggggagggtgcttgttctatgagatcaggaagggagggagatgaaggaggttgccatatgagggcagggccatgagctgacctgtccctcaaaacataaggctgagggtgctagtagattctactcagtaactttcttcacagtgtcagtgctttagtcttctcacattctcccatgtctctcccattgtactgtcccttatcttgtctcactttttgactctgtctttccaatttgccctttttctttacatctgtctctccttcttgctctctctagctgtctttctcttggtgtctctcagctctcacccctcttaaccctcatccccctgctttagtcacctctctgtctctatcctttgatcttgtcattttctctactctcttctctctgtccctcagtctctctctcatctccctcaattagggccatgattctcttccctaaacttacttagccttttgcaatttctggcagcatttttttatgtttgtgtctgactgactctctacccctgctggatcctctccactcctgttctcacttctatgaatctttgtataatcctctagactcattgatccctcctcatgtccctttcgtgccccttggtctatctgtctctgcctttatccctgtgtgcactatcaccaccccctttttcttttttcattttctctttctctcgactcaatctctgttttcatctctaccctgctccctttccctctacctttgatctctttttccccctcaatttctgttcttttaactctaccaccaccaccacatctttgttctctctctactttcctccttttatctttcctaaattttcttttcttctggcttttctcctagtcccttctccttcctcaatttcagactctgttcattcatcaatttaccccaaaattcaacaaatatttattgagtgcctgtgtgtcatttgctttctctttttctgatctctttgccccctttctcttctctgtcttggcctctgcctgtttcactaatccatagactatgtctttgtccctgttttccagccccactgggacttgctttcacctcttcctatatctgtgcttatccaagagacaggagcaaattcaaagacagcataatatcaggctggtggtacacattctgtaggacctagggcctacccttccttccggatcccttgatttccttaaactgatacatgtgacctcaagctccttctcccctctggctgatcctgcttaggaaacaccctgggccaagcctcaggagctctactcaatgacatatgtttgcattagcaggctgaatcttcacttggctaagaccaacattcttagaaagattcttggccttaagtattgatcaaagggttagtgggttggcagttctcatcctgccacacaaaaacacatttcagtgatcctcatcatcacagaggtagtcagtgccagaatgtgagtcagaatccaggctttctgacctccagttagaactgtttccttcacccctttgcccagtagtcagtttcctatttcttcctccctcatgttttattggtacatgttaacattgggaaagaagttctttccctggaagggcaataagagcatctcggaggcagcaagttttgggtgggaagctgaagacgaggatcaaaggcttggctttttgccaggccctcatgatggaacctcatctcttccatgtcttctgcaggactttaggttcaagatggtgactgcagccatgctgctacagtgctgcccagtgcttgcccggggccccacaagcctcctaggcaaggtggttaagactcaccagttcctgtttggtattggacgctgtcccatcctggctacccaaggaccaaactgttctcaaatccaccttaaggcaacaaaggctggaggaggtaagaagaggctgctagcaaaaggggagaatgttagggtcctggggtaaaagttccaagttatactggccatctttgcctaataattaggacggttcatgtgaaaagtgtcaagatagcatgaactggccccaaaatatacccagaatctgtcttctgccaggttctctagaaagagtctcattctcggccaggcacagtggctcacgcctgtaatcccagcactttgggaggccgaggcgagtggatcacgaggtcaggagttcaagaccaccctggccaagatggtgaaatcccatatctactaaaaataaaaaaattagccaggagtggtggtgggcgcctgtaatcccagctgcttgggaggctgaggcagagaattgcttgaacccaggaggcggaggttgcagtgagccaagatcatgccactgcactccagcctgggcaacagagcgagaatctgtcaaagaaaagaaaagaaaagaaaagaaacagtctcactgtcatgtccctcacacactatactccagacatgctgaaactacttaaaattgcctaaatcaactattctgtcaagagtttgtgcctttgctcctgtcagattaccctctcctagaccctgtactggagaatctcatacttctcatttgacactaagcttggccatcatctcctctgcaaagcctgcttagacctccaaactgtctaattccaattctggctcatttcccctccctcttctggacttctgtagcccatgtacttcctctatcccagcactgttcacaatgtgtcttcagtgtatgccattcccaccagtttagtagctcccctagcacagggaccagactcatctatctctgtgtctctacaatagcctgagatagggctttaggggtacattagatctcagcaattattgttgagctgaacttatgactagaaatgcaccccaaattactctcttacctttgcatagattctccatcttgggcgaagggccactgtcccttcatgctgtcggaactccaggatgggaagagcaagattgtgcagaaggcagccccagaagtccaggaagatgtgaaggctttcaagacaggttggagtcaagttccaccttatgcaacctttactcctaatgcttgaacacactacgtcacagtcctgagctaggctaatacaaaagcagccagtacacatcccatgatgagaagtccagtctttccaggggagccatggtaggcaacagtttaggctgtatgctgaagcacaccatacctgacaaacacatatgtacgggctcctgaaacttttagtcattattctaagatgagccctctagaattttgactcctctttttcaggtggctaaactgatcccaacaggctggggtcccacatttcagcaagaccactctatgagaatatggatttgcatgaaagagaaagagctgggagtaggtacctcctttaaccagggtgcagatccccaggtcaacttaattagtgcagaccacccaagataatcacccttgagatatggccacactgttgacatctttcataggcccctttgggatatcattaaggacaaaaacttcaaaattgaaatttaatgatgtttagaaaagaagagtaaggtacattatcctgcatctactttctaaatgcaggacccagggtggctgctccagttacctgagccaagggaaaatcctagtggagagaagtatgattcaccttatagaaggtttcctaacaatgtaatagtctccattcggggggataaatagaagctcaccttggagaagatttcttctcgctgtagaagctgcccttaccttataaacttgaattttcatgtgttgcattgagcttaaagaggacaacacatgctttctttttcccccattctcttcacggccaatgaatctcacattccgtctcagatctgcctagctccctggtctcagtcagcctaaggaagccattttccggtccccaggagcaggagcagatctctgggaaggtcacacacctgattcagaacaatatgcctggtgagtttgctgaggtggaaaaaaaggggaccggaatagggaaggcattctgaaagggcctctgtcacagtaggggaaacagtacagaagggccttggaaccaaaggaaatttgagtttaaaatttaatgctggcacttgctggatctaggtgttttggcaagtaagacactttccttcagtggcatttaatacctacctcaataggttaccatgagaagaaagtgaaattacatttatggaagtgtttctaatgaggcttcattaaatattaggcttatttccattatttcttctctatgcttccctcaaaaactttcacccttcatacagcaccttttccccattcttatatgtgtttatattcctttccataatgacatttacattattttctaatgtaaaaggaatatgattcatggtaaaatatttttcaacatatacaggaaagtataaggagggaaatttaagtcatgcagagttccaccattaagtttttgttatattttctcccagatatttttctatggctacacacacacacacacacacacacacacacacaccctctgctctcttcaccacacccatgcttttgttagaagtgtgatcttattttacctggagttcgttatgctgttttgttcacttaaaaatatgtcatgggtatagtatggattcaatatcattcagttaatcaagcatctataatttaagttgtttccaattttttgtattctctcagtttagattgtaggttggttttacatacatacaaatgtactcaaagaaaatgtatagtattacttttttcaatttttatttttacctaataatatcttgctatatattttactctgtgcccttttttcactcaacaatatactgtggaaatgcttccactttaacacatatgtatctaccttatttttcaatgcttcaaaatattttgtagtatagatataatagagattatttggctactcctctatttggttgcttccaattttttctattacaaacagtggtgcaacaaacatccttgaatgtatctccttgtgtacacaggcaagtgtttctccaggataaacactcagtggtggaaattcttgggatgtaaggatgtgtacatttttgatattaatacattttgtcaattagccctccaacatggctgtaccagttatcaaggagggtatccatagtctcatacccttaccagcccttgatattatcaaactttaaatctttatcaattgataggtgaaattttgttttcccagttttatttttcctgattaagaatctttttctacatttattgaattgtctgttcatattctatgcccatttttctactgagttgaaatttttcatgttaatttttcagagattatataataaattctgagtatcaatcatttgtctgttaagtatgctgcaaatatttctctagatatgtcagtatgtgcatttaaaaaacttttgatatgtatttccaaacatctctgcagcaaggatgttaccagtttgcacctccagcagccatataaattgctgtctgcaacatgatttctgtctcacgtaaagagttctagagtttaacaagctctttggcaaacgttatttcaatttatcctagaaataaagttaccccattttgtagtggtaatggttaaagaagtgggctctgagttacttacttgatgaacacttacttgctgcatgaccctggtcaagttgtctaacacttaatgccccagttccctcatctgtaaaatggagatactaatagaactgtccatggagcattgttgtgaggaataaattaaatatttataaagttcctaggaaagaacttacatgtactaggcattcattaaatgttagctataatgatgtaattgaatattagctatctttattagtattattatgactactaatactatagcagtaataatactactattaccatgtgccatttattagtttgaatatattacatgttgttggttgtcagatgctcacaactctccaaggaaagtattattagcctcattctacaaataaagaaatttaaagtaagaaagaagattcatgacttgttcaaggccacacagctaggaagtggcaaagagatcgctagaaacaagatctgttgatactccttccagtgagactgaaagcagtgattctagtaaggaggctgccacaccaacccgggaagagagatgaggccataagaaagtctaaatgaatgtgtgaatgaactactgagtgaatgagtgaatgagtaagcaaaaggatggctgaatgaagtagtagagagttaatgtggtccataagtcaatgactgagcaaataaatgaatatgtggaaaaagagttggagaactcaaaatcagcaacatgggtaaaatacagactagccagggagagacttaaaacgaattcttttcatcctcatatctgctcctgcaggaaactatgtcttcagttatgaccagtttttcagggacaagatcatggagaagaaacaggatcacacctaccgtgtgttcaagactgtgaaccgctgggctgatgcatatccctttgcccaacatttctctgaggcatctgtggcctcaaaggatgtgtccgtctggtgtagtaatgattacctgggcatgagccgacaccctcaggtcttgcaagccacacagtgagtagtaggctttcagccatcagcagtggccagaggagatgaaaaaccacacatggaaaaaaaaaaaaggcagagctggcagtggaaacttgggttctatcaccacttcttttgtccaaggtcctccatcatatctattccttggatatgaaataagtcaacacaccatgtttcccaaactcttcggtgtccaatgctatggaggggaaggatgggagaccaagcaaggcccactctgcctgagtttttaatctagctgcagaattagtattgccagagatggagtgtgacttcctctaggtcttccaaactactcaagctcaacctagcttctccctctctccctgagtacctccagtcctagaaggaaggcacatgtctccctatcctccccatccttccctctactttgtctcataggacacagtttatataggatcactaactcaacattgactcccatcaaggaagagaaacctacccagttcctcgatgcctgacaagagtttctttttctccttttctcctgttttctcctggccagggagaccctgcagcgtcatggtgctggagctggtggcacccgcaacatctcaggcaccagtaagtttcatgtggagcttgagcaggagctggctgagctgcaccagaaggactcagccctgctcttctcctcctgctttgttgccaatgactctactctcttcaccttggccaagatcctgccaggtaagcctgaggcctgagctttgttcagggctggtatcctgcaatacagcatccagtttcactggttccatcactccttccctgtatttggagttccctcactcccattgttcttccttcttatccaccttgcatatcctcaacactggataattatatccctctgctttctctccttctgcacgtagagaggaccattaccggggaacattaccccacctcacagaaaggaaacactataaattcatcacctcccaactcaactgagctcttaacacacatacatagttattttatgtctccacaggagctttttcaaacttcttctcctcttctaaaacctctgactaccttctcctccacacttagcaaataacctcacatcttacttcacaataaaaacagaagccccagacagagaatccttatttattgccaccaaacctacgaacttatctaattgtttatctagccttgcctcattctttccttttacaatggaaggcatatctctccttctgcctaaaaccaatcccttcacttgtacactggttcccatattcccagtctcctactctctagtctgtaatgtcctcacctcatacgccttgttgtccttccgccaaggcccaatccagaatgaatacaaccctccatcttcactatatcaattccgggctcatacagttgctcagacaggagtcactaaaaattcatactcttaacctctactgggttctccatggtctctgacaatcccatttccctggtcagttctcgaagtttatggggcagttttgccaaaccaccattatcctcagccttcccacaccccctcctccccatctccctcagcagacaacttcatgttctactacattcaaaatagaagataccagacagcaatgtccttgactcccagccacaaagcacctacaaactcataagcatcttcaaatgtcctctcctcactccttctcttctgtcatagtggaagaagtatcctttttcttgtgactaatccttccactgttgctctgtgccccattcccctctaccaccttaggaatcttgacctattggctctctcctcctctcctgtatcttcagcctctccctctctttaaacatgttttcaagtctcttgtatcttataaaaaaacattgcctcaacccctgatcactctctagctactgccctctttcctccctataacaggcaaactgcttgagagaagtcttcgctcttactatctacttcctcacctcctgctgattcttcagcacagcaaaaatattaccaccacttctcagaaactttttttgagtccacccataagccccaactaaactcaacatctttaagttgtttttagtccatcccctcctcaaccattaaacttctttccatctctactgccagcatcctagcctgatccaacatcattttttaaagaaaattttacctttgccctccgataatctattctttacaacagtcagaattttttttaatgcaaaactatctttgtcaccccaccctcagccctggtcaaaaccctttagtggacccccattcccccaggaccaaatccaaatttcttatcacagcttctaaagttctcaataatctggcttctatgtatctcttcggtctcacctttttgcatccctcctctcactatttcattcagtaatacattcattcatatactcattcacttacttataaatctgtcatcagtttatttatccattcatttaataaatgtttacttagcatctactgtgtgcttactcttatactggacaccagagacagagagataataagatgtttttgctcccatgcaactcccagtctgcttgtctttcaagccattttctccagaaagccataactcattttctcaggtggaagttatcccttaatcttataataaggccacagttccttgatggcagtgcagttggtggcaggggttggggaggtccaggaatcaactccctctaccaatttcacatgcccacctgccccaccaggattgcccagtaaaaagccctgcattcttcaaatctttctggaccttagctttctcacttgtatagtaaagggatgaatcccatgatcactaacagccctgccagctctgacatgccataagcttatgattccaacagtaaaagcctgataaatatccatccctgtaaccacaagcagatgctacctggaatggatggaatttcatctagactaggaacaatctagcatcagtccgagtcaacaaacattccctggggtaatccctttttcaagtcttgatcttatatattggggagaaggaaaataggtcccgtcctcaaaaaactctgaagcttcttgggaaattaaatgttcttccaccccaaggcagtcagaggctagaccagggttacaaatgactggagggaaggatgtaggggtcagaatttgggaacagtgaagtccttccaagggagaaagaagtgtcacaaaagttcccagagaaggaagaagcagagcaaggtcttcaaagggaagaaagggttggcccttttctttgccaggtcaaacctgaaggttgaagtgggagtactgggacagaagcttaaggattatacatctgcttcctcagggtgcgagatttactcagacgcaggcaaccatgcttccatgatccaaggtatccgtaacagtggagcagccaagtttgtcttcaggcacaatgaccctgaccacctaaagaaacttctagagaagtctaaccctaagatacccaaaattgtggcctttgagactgtccactccatggatggtatgtatatgagtgagtgtatgtttactagtgttggtctcacaaaaaccatgatgatcatgatgatgatgatgacgataacattataacagctaatatttatagtgtttattatgtgccaagcaaaattattagtattttacatgtattaattcatttaattttctgaacaattctatgtgataggtgttattattattttgattttttacatgaggaaactgagacataagagtaatttgtccaaggtcacacagctagtaaatgccaaagaatggaggcagctattacattcatcttataggtaaagaaactaaagttcagagttggcatccaattcatcttgagtggctcagcaagttggtgctaaagtgagtatctgcaccctaacacatataactccaattcctcgagtaacacttctcttgttagaaatgatatgtaaatcaataatcccagtgtttggtttttatgaaggaaatttcaaaaaccattgcctaggatttttttcaaggtccagtatgaagcattggggtcaaaacaggttttcaagtcagagagacctgggttcaaatcccacctttgacagttactggctatgaccatgggtaactctttaactgtctaagcctcaattttcccaaaggtaaaatatctggttgtaagaattagagatgatagaaaccattctagttattatgctttagtagaattaaatgatcttcacactcctacctcctttctttgctcaattgaaacaatgtccaaagctttctattgctggccctgttgtgtagaaatcatgtgttttaggcatcctcttatggatttatttaagggaagaggtcctcaactcatttcagtttgtcccttttccaactgaaacaaaagagtccatagtattccctgatttaggtatcttaagtggcatgtaatgactatacacacaggctctaaaaccagactatccatgttcaaatcctagcatgaccatttactagcttgggcaagcttcttaattgctctgtgtctcagttctcagttgcttatttgaaaaatgtaagtgataataattaaataggtatgcaaattaaatgagttaatatatgtaagaaacttactattatgcccactcccacatttctaacactagcaataaagtaaaactatcctatcccttttgtatatttctaccactgagactattcaaattcattatttctctagtggaaactatgttggtaccattctacctcgttacatttgcaaataaatagttatttacctatttttggggtgcaaactctgcccaaactgttgatccttaggctgaatctctcccattgaaatgatgctaggctgaacacagcagaaacaggaaaatagacattgtcagaatgaagtaaaaacagaaagacaaagagtcaagccttgatcccaggctggggaacacacacacatgcgcacacacacgtacacacacacacacacacacacacacacacacacacacacacacacacacagagagacagagagagagagagagaaggcagggatgagatacaggcaatcgatccatacacagaggtttgtaatagttctaaatgaaggcgcacatcctccttcctctctacaacacccttttccaacccaaagtaggcatgtatgggaaattccacattggagatggagctggggaagggttatgatgtcctacctctatcccttggctttgctcaggtgccatctgtcccctcgaggagttgtgtgatgtgtcccaccagtatggggccctgaccttcgtggatgaggtccatgctgtaggactgtatgggtcccggggcgctgggattggggagcgtgatggaattatgcataagattgacatcatctctggaactcttggtaagtgaatgctttgggccttcttatataccctccagagaggaggcccttacaaaattcttttctgcctcctccccaaagctataggggttgtttggacagaattcacagccccaggctgctgccatcctggactccctctctccactcgcatcccactgcagagttgatgagaaagtctggtagagttttttgaaaagaccttgaactaggccaaatagttagattcaacttgagtatgtgaagagctgtgtttctaaacccctcccccaccctagccccaagcttcatcttagctccactcctgaccctatccagctaaaggtccccacccagctcctgcctatctagtcattgcatatggcaagacttgaaagtcctatctcaaagcagcagaattatcagctacgactgccttgtcatggacagatgagcagaggcctgggaagacagcctggagccccaacttctggtgcacccccttgtgttatctggcacatgatcctgttgctctgggactgattatgggatctgtgtatatcttattcctttctgtctccaggcaaggcctttggctgtgtgggcggctacattgccagcacccgtgacttggtggacatggtgcgctcctatgctgcaggcttcatctttaccacttctctgccccccatggtgctctctggagctctagaatctgtgcggctgctcaagggagaggagggccaagccctgaggcgagcccaccagcgcaatgtcaagcacatgcgccagctactcatggacaggggccttcctgtcatcccctgccccagccacatcatccccatccgggtgagagccccaccatgcccattgccctctccacctatttattctgggagcctcacgctcccaacaaacctacatctgttgctgtcttcaattatttgctttcctgctaaccattccctttattgccagctttgtttccctttttgaaaaattatcagccattctggattaaccagtcttttccttgcatcagccattacctcatgcttattagattatcctaaccctaacaatagcgagtgctcacagcctataattcagagtttttcaaactggatcaagacaattaatgggtcacaaaatcagcttagtgggttatcattagcattaaaaaaagaaaagaaacagaaaatgttggagtacatcacatactaagggtatcatcaatttgtgaaaaatttgtatgcattttgggtatttgcatatacacatgtatgtgtatgtgtgcgtttatggtcacggtgtaaaacgtacttcttattgagaaatgagggcagaaaaataaaatcaaaagccataggattagctgctactttggatcctcaatatgagcatttactgcctttaaaaatgaactgctacttctttcttaaataacacgtatttgtgtgagtcagtaagccagggcagggaaaggacacttatttgtgacaattttgtggatgagaaatagtcactgctctttagactaacctagtatttcctttaaacactcattttatgaattaatttagtgacagcaccccagaattggcttggcgggggttccagaattggcttggtggggggtatcttctcacccagaaccatcccaaactaagatattagctaagtaaaatcagtgtgcttgctctgcaaacagcttccaaacagggctcctggtaccacctctgctccatccttttcaaaccaaattgctagctctgagctcctccttgatagaaattctggagctgccactaagcccctaatggaaaaaaaaaatctatcccaaaattcagtgatgttccctcatctagttccctccatctgcttaatggagctagtgatggtggagccagagtggcaggtactgattagcctttctcctgagtccaggtgggcaatgcagcactcaacagcaagctctgtgatctcctgctctccaagcatggcatctatgtgcaggccatcaactacccaactgtcccccggggtgaagagctcctgcgcttggcaccctccccccaccacagccctcagatgatggaagattttgtgggtaagttctcaacatgggtgcctacaggacctccctcccctcagccccaggatctgaaagagaagctgagaggacagagaccactgagtttacaaaatatttctggaacatctaatgtgtgccagcacctatactagggtcacaaataaatgagaagcagcccctacacttgtagggctccagtttggttggggataccatagtgaacacaaacaatgacactaagggatgatcaaagctccacaaggcagtgcatgatagagttgtcggagcagagaggaggggcctgactcagcctgagggatgcaagacccacttcctagtagaggtgacacctgagctgagtcttgcaaagtgagtggtattaaaagaaagagggcatggaagaagtattcctaccagagggaagagcatgaagataggtgaggagaatgagaagcagccagggatatatcaagaacaataagcaggtggtattggaatgtagggtcataggaatggagtggggcaggggagtatcaatctatgagtctacaaagacaacatgagatagagactggattgagaggcttgtagagctgagtagtttgagatttaccctgaaaatgccagtttagtcaattcacctaatgtttgttggatttctgttgggtagttttgtttttgtttgtttgtttttgtttttgtttttttgagacagagtctggctctgtagcccaggctggagtgcagtggcacgatcttggctcactgctacctctgcctcccgggtcctggctcaagcaattctcctgcctcagcctcccaagtagctgggattacaggcacgtgccaccatgcctagctaatttctgtatttttagtagagatggggtttcaccatgttggccaggctagtctcgaactcctgacctcgtaatccacctgcctaggcctcccaaagtgctgggattacaggcgtgagccaccatgcccggcctgggtagtttttaatgcagggcctgacattgaataggtgctcattccaggcctgttggatgaaagacatgtaggcagttgatggtctagcagaggagccagatatagatggtactggtccagtatgatgagctccagtattctgggagctagagggagtggacacattatggagagagagggtgggaaggatgaaattggagaggctttgtgagtaaggaagtttttatgatgcatgttgaagtacatgtgaatatgttgtaagaatattccagaataagggaattccacgagcaatgacctagagataggaaagcagtgggtatgtattgacaacataattctgtttgtctgaagcatgggcagtatgagaattcaaggaagacaagctaggtaggcgccattcattcattcaaaaacattaaataatgctggctaacattaagtacttaccatgtgccaagcactgttctaaacactttacacgtattaactcatctaatccccacaacaacctcaagagttagagatcctcttatcatttccattttgtacatgtggaaattgaggcacaaaaatatatagtcgctgatccaaggtcacacagcttctaagttgcaactgggaggtctgtctctacctccatggtcataactgctaggtctaccacctctctgagctgatgacccagactcctgggccttttgttcagtattctcttttgctctgggcttcaattgtagagctctcagtattcttggttctctgaatgtccacctaggctaggcttttgtaagaatatatgaggcatccacgatggctccaccagtccctaagttccatagccaatccatcctgaaatcctgcaaaagttatctataatctctctcaaacctatttgcttttctcccctgccacttctttaatccatgtcaacatgatttttttcctaatttctctgcttctctcttgctcctctcaaatcctttctcgatgatgaccactagagggatttttctaaaattctgactatattgctcccttgcttaaaccccttcatgtttccctctagactctaaagcagtgacctccaaggggtatgcaaaatgattacagggtgaaggaacagaatatgtattagaattttatgtttttttatcttaaaaataggaaatcaagcatcactgatactgatctttaatatacagactgacagttatacatgtatataatatataaacaaatatagagattggaggtacatgctaaaacatttgtactgatagggatgtatagtccaaaatttggaaacattgacatataggacagagttgaagctcttcagcatagcattcaatgccttccacatggtgatctctatgccctcacctcctccccacatgcattttgttttttcagctacactgaaggacttgtcgttccctcatttttttctgctctcttacctctgggactttgctcatgctgctctcttttgattggaatgccctccctcacactttcctctggcttactttccttcatcttgtagacttaacttaggcattctttcaacaaatatttattgagtaccaactgtgtactagatactgttctaggcactggggatgcagtagcaaacaaatcagacacaaaattcctaccctctggagcttacattctagtggaaggggtagtaaaaaaaattaccaaaaataagcaaattaagtagcacattagttctaagtgctatgggaaaaaataaagcaggataaggagaatgggataaggggccaggggcgagttcagagaagggttgtagtattagagtggcaagggtagaagacgctgaggtgaaacttgagcaaaaatttgaaggaggtgaagttagtgaggcagatatctaagggaatggcatcgcaggcagagggaacatcctaaggcagggaagacacaggagtattccttttatatttgaggaacagtaagaagatgggtgtgggtggaatggtataagcaagtgggagacagaaaaattgagtacatagaggcaatgtgggaccagattgtatagggtatggtaggccattagaaggagtttggcttttactctgagagcccttgaaaggatttgaacacaggactgatatttctgactcgggttttaacaaaattgctccaacttctatgtagagaatacactaaaagggagcaagggtggaagcagggagacccaagagtgggctacagtaatatcccaggtgagagatgatggtggctcagacttgatcataatgaaggcaataagaagtggtcagattttgaaggtagagccaagggtctttgctgatagatgggatatagggtaagagagaaagagaaaaataaaggatagctctgaaatttttggactgagcaactggaattgccatccactgagatgggaaaagctaaaagtagaatagcttggtggagggtagggacatgagtagctcagttgtactcctaagttagaaatgcatattagacatctaggtggagatggagaaaagccattggatatacaagattggaaaccagtagagtggcgtgagctggagattaaaatttctgaaccatcagcatatagatggtctttaaagtcatgtgactagacaagatcaacaagggcatgaacacagaaaaggccaagaacagagccctggaacgtacctggggtacttcctccagctaggtcaggttcccttctctgggttttcacacccccaggtggaccccctaccccaggtttcctggtcatagcaccaatgacacagtatagttactgtcattatcattgtcctcatagggcttagagttcccaagcagacagtcattcttgggccacagcacatcctatacttagggagtggtccaggccaggacagtatggcttcaaattgtgtcaaaggagagcttccaaatcttttataatatatatcccagcatccagatacaaatggtaatattcacggcacacacagaagcaaacagtaggctacttctggccctgaggtatcttgaagggttgagggggatcaatatcttggctcatctgtactgtgacagatttggaagatctagtctaacccattttttccctcccctccccctaccaccttcagagaagctgctgctggcttggactgcggtggggctgcccctccaggatgtgtctgtggctgcctgcaatttctgtcgccgtcctgtacactttgagctcatgagtgagtgggaacgttcctacttcgggaacatggggccccagtatgtcaccacctatgcctgagaagccagctgcctaggattcacaccccacctgcgcttcacttgggtccaggcctactcctgtcttctgctttgttgtgtgcctctagctgaattgagcctaaaaataaagcacaaaccacagc

SEQ ID NO: 893 - DNA, 14644 bp, Homo sapiens
  source 1..14644: mol_type = other DNA
ggcgcttccgcaggaagaaggaagcggcgccgccatcgcctcccggcgctccctccccgactcctaagtccttcggccgccaccatgtccgcctcggctgtcttcattctggacgttaagggcaaggtgaggctgggcatgaggagttgggagacggacaggtgaggtctcgctcccagggattcaggggcgacccctccgcgcgggccaggaagaggtctgggaacaccccctccccctgcaatccctgggaatcccacctccagcatccactcgccttgtgcctgaggccaaggggttcgcctcctagggcctcagtttctctgtatgtaaaaatgggagcaacagaggtccccacccaatgagaattaatacaactcgctgcgtgtaaactacttagcatagtggcctttctggaaatattagggactcagcaaattgaaattatctccatcactgtcggcatccacagtgttaatacctggggaaggcaactggaacaggggcctctaactccccccatctgtggctgccttgcctcttcctgaagtccttttattcctcttgtctttttttattttggagacagggtctcttgctgtctcccaggcttgagtgcagtggtgcgatcatagctcactgcagcctggaattcctgggctcaagcgatcctcctgcctcagtctccggagtagctgtgactacacaggtgcaggccaccatgcctggctaattcttgacatttttttgtagagggatcccgctatgttgccaaagctgctctcaaactcctgaatatctggggctgcgggctgacccctccatgcccggctatttttaatttttttttttttttttttttaaatagagtcttgctctgtcacccaggctggagtgcagtggctccatcttggctcactgcaacctccacctcccgggttgaagcaattctcctgcctcagcctcccgagtagctgggactacaggtgcatgccaccatgcctggctaatttttgtattttttttttttttcaagacagagtctcgccttgtcacccaggctggagtgcaatggcatgatcttggctcactgcaacctccacctcccaggttcaagtgattctccttcctcagcctcctgagtagctgggattacaggcgcgcaccatcacgcccggctaattttttgtatctttagtagagatggggtttcaccatgttgggcaggatggtctcaatctcttgacctcgtgatccgcccacctcggcctcccaaagtgctgggattacagacatgagccactgcgcccggccgcacccggcctattttttatttttatttttttgtacagatggagtcttgctatgttgtccaggatggtcttgaactcctggtccccagctatccccctgcttcagcctcccaaagtgttcggatgacaggtgtgagccactgcagtcagcctgtcttgtcatttaatagccaaaataagagtggtggtgaaaataatattcccattaatattaatagtgagagctaagatgtttgagaacctgccatgggtcctccctgttcagacactggacaaaacaaccttaggaagtggttaactaattttttttttttttggagatggagtctcgctctgtcaccaggctggtgtgatctcagctcacagcaaccttcacctcctgggttcaagtgattctcatgccttagcctcctgagtagctgggattacggtcatgcgccagcacaccaagctaatttttgtatttttagtagagacggggtttcatcatgttggcctggatggtctcgaactcttgacctcatgatccacccgccttagcctcccaaagtgctgggattaaaggcgtgagccaccgtgtccagacagaagtgtttactattatgggtgtcttcctgactaccaggcacaatcatatgaactgtcatctttctttctttctttctttctttctttctttctttctttctttctttctttctttctttctttctttctttttttcttctttctttctttccttctttccttctttccttctttctttctttcttttcttctttctttttttgacagggtctcactctgttgctcgggctggagtgcagtagtatgaccacagctcactgtagtctcgacctcctaggctcaattgattcttctgccttagcctccagagtagctgtgactacagaggtgcaggccaccatgctcagctaattcttgaaattttttgtagagggatcccgctatgttgccaaagctggtctcaaactcctggcctcaagggatcctcctgccttggtcttcatgagtgagtcattgcacctggcctcttctttgttttttttttttgttgttgttgtttttttaaataatcccactttggtgcaaatgaagtctggggcaacagcagggattctggacccaggatgccttagatcaatccccagtttccatatgcttccagtggacatggtttctaacctcacttctcctgtgtgaaatggagatgatgataacatctaccccacagggttgtggcaagaactaataagttagtaaacatctactctttttttagtagccagcctgcctgcctaccttccttccttccttccttccttccctcctaccctccctccttcccttcctcccttccttctttactttctttctttctttctttctctctttcttcttttgagatggagtcttgctctgtcgccaggctggagtgcagtggcacgatctcggctcactgcaatctccgcctcccaggttcaagtgatcctcctgcctcagcaccccgagtagctgggactatagatacacgccatcacgcccggctaattttttgtatttttagtaaagacggggtttcaccatgttggccaggatggtctcgatctcttgacctcatgatccacccgcctcggcctcccaaaatgctgggatcacaggcgtgagccactgcgtccagccatcgcctaccctttaataaaacacagcctggcacttagtgagggccctagacccattagctgttgtcatcacactcccattttacagagcaggaaacaggcacaaggaggcagagccttgcccaagcccctcagctaggaagtagggtcagaaccgggcactgtgcctcctcagcgtggtaggttcttggatgctggtggtgaccaggtcctttccttccaccctcagccattgatcagccgcaactacaagggcgatgtggccatgagcaagattgagcacttcatgcctttgctggtacagcgggaggaggaaggcgccctggccccgctgctgagccacggccaggtccacttcctatggatcaaacacagcaacctctactgtatccaccccacgtggtgtccctggaggtgggtgtgggggctgtcggcgatggtggcagctcaggccaagagagggtgggctgaggacaggagttgcaccgcacatctctgtggcttaggctggggggcaggggcaggtagagatgagggtggtggcaagggacagggtggaggttcggggtctgtattccatttacttctccataaatggcaccttttccttaaccttgctgccccagtggtggccaccacatcgaagaatgccaatgcctccctggtgtactccttcctgtataagacaatagaggtaggtactagcctcccattggctaactggtctatccgtctatccctcttgcccgcctctttcaagattcaagatccttttctgataggaagccttcccagatctccctgggtcttcccttttttttttttctggtagagatggggtcttgctatattgcccaggctggtctagaacttctggattgaagcaatcctactgccttggcctcccaaagcatgggagccaccacgctcaccccttccctggggccttgtttgagtctctgtgcatccgccatcaaagccccatcactctgcatctcatcagctgcttatgaagtcatctctccctaaaggacagggaccaagaatgtctcagagagcatacggctcagctaagcccaaggacttggcatccaatcccagcttccctgcttcctcactgtgtgaccttgagcaagtgacttcttgtctctgtgcttaaaaaaaaaaagaaaaaggccaggcacagtggctcatgcctgtaatcccagtactttgggaggctaaggtgggcggattgcttgaggccaggagttcgagaccaggctggccaacatgcagaaaccccttctctactaaaaatacaaaaattagccgggtatggtggcacctgcctgtaatcccagctacggggaaggttgaggcaggagaatcacctgaacctggaaggcagaggttgtggtgagccaagatctcgccactgcactccagcctgggcaacactgtgagacttagtctcaaaaaaaaaaaaagaagccaccatacctgcccttttttgcctaatttttcaagcattcagtacactttttcttttttcttttttgttttttcttttgagacagggtctcactttgttgcccaggctggagtgcagtggcacaatctcagctcactgcaacctctacctcctgggttcaagtgattctcctgcttcagcctccctagtagctgcaattacaggcaggtgccaccatgcctggctaatttttgtatttttagtatagacggggttttgccatgttggccagctggtctcaaactcctgacctcaagtgagctgcctcccttggcctcccattgttgggattacaggcatgagccaccatgcccggccttttttctttttgagacaggggcttattctgttacgcaggctggagtgcagtagcatcctcatggctcactgcagcctcgaactcctattaaaatttttgttgttgttgttagagataggggctcatggccgggcaccggtggctcatgccataatcccagcactttgggaagccaaagtgggcggattacgagatcaagagatcgagatcatcctggccaacattgtgaaaccccgtctctactaaaaatacaaatattagctggccctggtagtgcgtgcctgtagtcccagctactcagaaggctgaggcaggagaatcgcttgaaccccggaggcaggagttgcagtgagccgagatagtgccactgcactccagcctgggtgacagtgcgagactgtctcgaaaaaaaaaagaaaaaagaaaaaacgagataggggttcactatattgcccaggctggtcttgaactcatgaccttaagtgatcctcgtgccttggcctcccaaggtgctggggttacaggcatgagctactatgcccaacccatagccacacttttgtgggtctctctctcctccaacccccaggtattctgcgaatacttcaaggagctggaggaggagagcatccgggacaactttgtcatcgtctacgagttgctggacgagctcatggactttggcttcccgcagaccaccgacagcaagatcctgcaggagtgagtggacccctggaggcagccatgggctggactgtgggtgtaaggaactggaggaggtccacggaggtgtccctgggtccagctgcttgtccctgccgccctccctccaggtacatcactcagcagagcaacaagctggagacgggcaagtcacgggtgccacccactgtcaccaacgctgtgtcctggcgctccgagggtatcaagtataagaagaacgaggtcttcattgatgtcatagagtctgtcaacctgctggtgagcctgcacacctccccggcaccccttccacggcctggctgcaggagacggagtttgatgcctgctaactatacccaacgtcctccctcaggtcaatgccaacggcagcgtccttctgagcgaaatcgtcggtaccatcaagctcaaggtgtttctgtcaggaatgccagagctgcggctgggcctcaatgaccgcgtgctcttcgagctcactggccgtaagcatttaggggacctttcttctgagaaatgcacaggggagtcgcaaacccgccccacgtggggacttaagagaatcgcagcccgttttgaaataagcgctcgctcaccatctgctgatcacggccagtattgcagccattggctgactgcaaaggctgtttcatgattgagcgactattgggtgccaggtgcagttttaggctctgaggacacagcagtgaagaaaaagacaaacccgcgttcttacagagatgacatcctactgggaggaggagacagaatagcatcttatttatttatttattttgggatggggtctcgctctgtcacccaggctggagtgcagtggtgtgatcatagctcattgcagccttgacctccgaggctcaactgatcctcccacctcagcctctcgagtagctgggactacaggcatggaccacctactttttaaattttttatagagacgggggtctcgctatgttgcccagtctggtctaaactcctggcctcaagcaatcctcccaaagtgctaggattacaggtgtgaactactgtgcctggctcagcatcttatttattgactgattgattgatttaagatggagtctcgctccgtcacccggctggagtgcagtggcatgatctcagctcactgcaacctccgcctcctgggttcaagctattctcctgcctcagcctcctgagtagctgggactataggcaccagccaccacgcccagctaattttttttgtatttttagtggagacgaggtttcaccatgttggccaggatggtctcgatctctttaccttgtgatccgcccatctcagcctcccatagttcggggattacaggcgtgagccaccacgccaggcctcagcatcatatttaaaagccagacactgccgggtatacagtggctcacgcctgtaatcccagcactttgggaggccgaggagggaggatcacctgaggttgggaatttgagaccagcctgaccaacatggagaaaccccgtctctactaaaaatacaaaattagccgggggtggtagcacattcctgtaatcctatctactcagtaggctgaggcaggagaatggcttgaactcgggaggtggaggttgcggtgagccaagacgtgccatcgcactccagtctgggcaacaagagtgaaactctgtctcaaaaaaaaaaaaaaaaaaaaaaaaaccaagccagatcctgtacagatactaggttcagattccagctctactgtgccagtttttgctcattctctctgggccccagtttccccatatgtgaaataggtgacagtggtcggcaggaaaggtggggatagggatcctttcctggttcccagggtcactctccactctccactctgagtttcaggcagcaagaacaaatcagtagagctggaggatgtaaaattccaccagtgcgtgcggctctctcgctttgacaacgaccgcaccatctccttcatcccgcctgatggtgactttgagctcatgtcataccgcctcagcacccaggtgaggcagggtccagccccatctgggtggagtaggttggggtaggctgaagagcgaccctgggcccagcgcagtggctcacgcctgtaatcccaacaattttggaggctgagtcgggtggatcacttgaggacaggagttcgagaccagcctggccaacagggtgaagccctgtctctactaaaaatacaaaaattagctgggcatggtggcacatgctgtaatcccaggtactggggaggctgaggcaggagaattgctttatttgttttttttaatttttattattattatttttttgagacggagtctggctctttcacccaggctggagtgcagtagcgctatctcggctcactgcaagctccgcctcccaggttcacgccattctcctgcctcagcgtcccgagtagctgggactataggcgcatgccaccgtgtccagctaattttttgcatttttagtagagacggggtttcgccgtgttagccaggatggtctcgatctcctgacctcgtgatccgcccaccttggcctcccaaagtgctgggattacaggcgtgagccaccgctcccggccgagaattgctttagtccaggaggtgcaggttgcagtgagccaagatcacgccatggcacttcagcctgggcgaagaagcgagactctgtctcaaagaaagaaaaaaaaaaaaaaaaaaagaagagagtcaacatggagtctccaagaactctccccttcttcttcccacaggtcaagccactgatctggattgagtctgtcattgagaagttctcccacagccgcgtggagatcatggtcaaggtgggccttgggggaatgcttattaacaatgcatgatctcgggtgggtgcggtggctcacacctgtaatcccagcactttgggaggccggggtggttagatcacttaagcccaggactttgagaccagcctgggcaacagggcgaaaccctgtttctacaaaaaatacaaaaattagcctggtaaagtggtgagtgcctgtagtgccagttagttgggaggctgaggtgggaggattgcttgagtccaggaggaggaggttgtagtgagacaaggactctagcctggatgacagagctagaccccatctccaaaaagaaaaaagaaaaaaaaaatctgttatcaaataaaataataactctcctgtgatggactgaagggtttttttgtttgtttgttcgtttgttttttgagaaagagtctccctctgtcactcgggctggagtgcagtggtgtgatctcagctcaccgcaacctctgcctcctgggttcatgccattctcctacctcagcctcccgagcagctgggattacaggctcctgccgccacgcctgcctccatctccccaagtgctgggattacaggtgtggcccaccacccccggcttttttcaacaagcctttcatatgccctctcagcccaggcctccacaatcctaaggtggggacccttatcctgtccattttacagatgaggaaactgaggcacacagaagttaaggcatttgcctgcagatacacagccaacaactgttagaactcaggcccacacccatgaggctcgagaagccctgttcttggtgccttccatgtggacagcaccatacacctttgcctgattcaaaatgaccccttcaggctgggtgcagtggttcatacctgtaatcccagcatgttgggaggcggaggcagtaggatcacctgaggtcaggcgttccagaccagcctgaccaacatggagaaacgctgtctctactaaaaatacaaaattagcagggcgtggtggcacatgcctgtaatcccacctacttgggaggctgaggcaggagaattgcttgaacccaggaggcggaggttgccgtgagcggagattgtgccactgcactccagcctgggtgacagagagagactccgtctaaaaaaaaaaaaaaaaaaaaaggccaagcatggtggctcacgcctgtaatcccagcactttgagaggccggggtgggcggatcacgaggtcaggagatcgagaacatcctggctaacatgctgaaaccccgtctctactaagaatacaaaaaaaattagctgggcgtgctggcgggtgcctgtagtcccagctgctcaggaggctgaggtaggagaatggcgtgaacctgggaggcggagcttacagccagccgagatcgcgccactgcactccagcctgggcgacagagtgagactccgtctcaaaaaaaaaaaaaaaaaaaaaaaaaaaagggcttggtaaatatttgaaggatgagcaagcgaattcttcgtgccccatgctcgctcccctgacaggccaaggggcagtttaagaaacagtcagtggccaacggtgtggagatatctgtgcctgtacccagcgatgccgactcccccagattcaagaccagtgtgggcagcgccaagtatgtgccggagagaaacgtcgtgatttggagtattaagtctttcccggtaagtaccagggactggcgggggatctgggggtggaggggactggagtagtgtgggggctgcccaggagccatgagaacaaggcagagaacaaatcagagacccagtcaggtgtgatggctcatgactggaatgccagtactttgagaggctgacacgggcagatcgcttgaacccaggagctggagaccagcctggggaacacagtgagaccctgcctctataaaaatattaagaggagctgggcgcagtggctcacgcctgaaatcccagcctggctaacatagagacggctaacatccgtctctagtaaaagtacaaaaattagctgggtgtggtggcgcatgcctgtaatcccagccactcgggacactgaggcaggagaattgcttgaacccgggaggcagaggttgcagtgagctgagattgtgccactgcacactccagcctgggcaacagaacgagactccgtctcaaaaaaaaaaaaaaaagattaaaaggccagacatggtggctcatacctgtaatcccagcactttgggaggctgaagcgggcagatcacctgaggtcagaagttcaagaccagcctggccaacatggtgaaaacccgtctctactaaaaatacaaaaattagggcagggcacggtggctcacgcctgtaatcccagcactttgggaggccgaggtgggcggatcacgaggtcaggagatcgagaccatcctggctaacatggtgaaaccccatctctactaaaaatacaaaaaattagccgggcgtggttgcaggcgcctgtagtcccagctatttgggaggctgaggcaggagaatggcctgaactcgggaggtggagcttgcagtgagcagagatcacgccactgcactccagcctgggtgacagagcgagactccatttcaaaaaaaaaaaaaaaaaaaaaattagccgggcatgggggtgtgcgcctgtagtaccagctactcaggaggctgaggcaggagaatcacttgaacccgggaggcggaggttgcagtgagttgagatcacgccaccgcactccagcctgggtgacagagtgaaactctgtctcaagaaaaaaaaaaaaacttagaaaaaagaaatacaaggccaggcgcagtggctcacgcctgtaattcccagcactttgggaggctgaggcgggcagattacgaggtcaggagatcgagaccatcctggctaacactgtgaaaccccgtctctactaaaaatacaaaaaaaaaaaaaattagctgggcgtggtggcgggcgcctgtagtcccagctaccgggaggctgaggcaggagaatggcgtgaacctgggaggcggagcttgcagtgagccaagaccgcaccactacactccagcctgggcgacagagtaagactccatctcaaaaaaaaaaaaaaagaaaaaaaaagaaaaaaaaagaaaaaagaaatacaagtaaatcagagaggtacgtatgtatgcaagtgatcaagcttgaaaccaggccagtctatttcacagacgtgtaaacttccatgacgggaagtgtgtggatttaaatatccccctgccaatgtcttgaggaaaccagccctgggttcaccttcctcactattgctttgctgagctgggtgggtttgggaaacccatttccacttaaggaggctcagtttgcctgtctgtgaaatgggcaggatgaggtgacccacatcccttggctactagaggttttggtttgtccccatgatcttgggagaggtggatcatcagtgcctgtaaaacaggacatggtagttaaaaaaagaaaaaaaccctgattgggttttgcagtcagaatcttccctggtgagtctctgtcacccaggttggggtgcagtggtgagatcatggctcactgcagcctcaaactcccagactcaagggatcttcctgcctcagcctcccaagtagctgaaactgcaggcatgttccaccgcacccagctaatttttaaactttttgtagacatggtatctcaatatgttgcccaggctaaggagcctttattttcctgtctgtgaaatgggctgtgagcagatctgactccaggggttgctgaaaggaaggtctcgggagggtaggcggaccctcgtgtacctgatgcccccatgttccctcaggggggcaaggagtacttgatgcgagcccactttggcctccccagtgtggaaaaggaagaggtggagggccggccccccatcggggtcaagtttgagatcccctacttcaccgtctctgggatccaggtgagagaagcaggcagggaggatcctccccttgacttcggtgggttcccctctctcctgtcccttggctcgagtcacctcagtcccctggcctgtgtcaacactcctctgaaggctgcctggtctttcccagagcaatgttacctttatctgcccacagcctgtgctccctctcccccggcctgtgccaccttgttccccaccggcttgttcacttctgtcccttctccacctccaaagccattcaccattccgttgcctgtgccacctcatccccctaagaccatgtgatatcccctcatcgatcccagcctgtgccacatagccgcttggcctaagccgtctctttctccctggccctggcctcctccctcctgcaatcctggaccacctcttttcattcccttccaggtccgatacatgaagatcattgagaaaagtggttaccaggccctgccctgggttcgctacatcacccagagtggcggtaaggcagcccagctcctggggacaatggggtgagggaaaggcagtgggtagggactcgaggctttcaccacattctggctcagaaaaccaacaagggtcaggtgtgatggttcaggtgtgtaatcctagcactttgggaggccaaggcgggtggatctcttgaggccgggagttcgagaccaacctggccaacatggtgaaaccctgtttctactaaaaatacaaaaattagccgggtgtggtggtgtatgcctataatccaagctactcaggaagctgaggcagaattgcttgaacccgggaggtggaggttgcagtgagctgagatcgtgccactgcactcctgcctggtcgacagaaaccctgtctcaaaaaatgaaaaagaaagcaaactgccccttcttgtcatggcaccctgggccttggtttgcacgtctttaaaatgggggcagttggctgggtgtggtggctcacatctgtaattccagcactttgggaggctgaggtgggaggaccgcttgagctcaggagttccagaccagccttggcaacacagcaaaaccccttcactacaaaaaatataaaaattagccaggtgtgatgtgcacacctgtagtcccagcaactcaggaggctgaggtgggaggatcgcctgagcccaggaggtcgaggctgtagtgagctgtgattgcaccactgcactccatcctgggcaagagtgagaccctggctcaaaaaaaaaaaaaaaaaaaaaggaaaaaaaagcagggacagttgtcagcgtcagttctagggtggtcgcgagtttggagaaggggctgaacatatagcacctccatctgctgcctggaaactgccttgtttctatggttacagtacctgtgtttagccccattcttagccttgttgatcatgagtgctgggataggggatgaattgaggggctgtgggaggctgtccctcttccttcacccctccccatttcttttcttttttgagatggaatctcactctgtcgcccaggctggagtgcagtggcgcaatctcagctcactgcaacctccacctcctgggttcaagcaattcttctgcctcagcctccctagtagctgggattacaggtgtgcaccatcatacccagctaatttttgtatttttaatagacatggggtttcaccatgttggccaggctggtctcgaacccctgacctcaagtgatccacctgcctcgacctcccaaagtgctgggattataagcgtgagtcaccgtgcccggcccccctctccccatttctgagatggcccctcctcattctttctctgcagattaccaacttcgtaccagctagaagggagaagagatgggggcttgaacacggggcttccttacagccccggatgcagattttagagggagggcaggtgcgggctgtgtgtgtctgtgtgagggcaggtcctggacttggcagtttcttgctcccagcacccgccccttcctcacctcttccttattccataggctgggagagaaactctctctgcttccctcgcccttggagctttccccatccccctgattttatatgaagaaatagaagaggggcttgaagtcctcctcgcgagtgccttcttgcaattacctgccttagcgggtgttgcgggtccctccttcacagccgctgagcccagaggtcccgctggcccctcctctgaattttaggatgtcattaaaaagatgaatct

SEQ ID NO: 894 - DNA, 10278 bp, Homo sapiens
  source 1..10278: mol_type = other DNA
acttccgcggccagtgcgagaggcgagggagctccagctctgcctgtaaggtctcggaagtacgaggcggaggggacgaaaaacggggggccagactgttgtggctgtggtggagacgagaaaccaggaagaagaggctcgcctcccactcggcgacagtaagcgaagcagccgaaggcgagcgccgacatcagcagctgccccctaaatcccgcccttcgtcttggcggcagcgggagactgagagacgcgcgcagcaggggcgggactggagaggggccccgcgcgcggatctcgcgagagcattagagggcggaagcgctatccgagcaggatgcggttcgtggttgccttggtcctcctgaacgtcgcagcggcgggtaagaccctccatcccgcatcccactcttgcccccagatcccccattctcacctgggcaggtcacctctaggctcgcttcttccctacccgacccacctctccgctcgccatcgtctcccgccccaccccccaatccccattcccccgctgctcccgatctcttccagttctgaggagttccttcttcccgcctgcccttctccggtgctaactcgtttttctatttcaggagccgtgccgctcttggccaccgaaagcgtcaagcaagaagaagctggagtacggccttctgcaggaaacgtctccacccaccccagcttgagccaacggcctggaggctctaccaagtcgcatccggagccgcagactccaaaagacagccctagcaagtcgagtgcggaggcgcagaccccagaagacacccccaacaagtcgggtgcggaggcaaagacccaaaaagacagctccaacaagtcgggtgcggaggcaaagacccaaaaaggcagcactagcaagtcgggttcggaggcgcagaccacaaaagacagcactagtaagtcgcatccggagctgcagactccaaaagacagcactggcaaatcgggtgcggaggcgcagaccccagaagacagccccaacaggtcgggtgcggaggcaaagacccaaaaagacagccctagcaagtcaggttcggaggcgcagaccacaaaagatgtccctaataagtcgggtgcggacggccagaccccaaaagacggctccagcaagtcgggtgcggaggatcagaccccaaaagacgtccctaacaagtcgggtgcggagaagcagactccaaaagacggctctaacaagtccggtgcagaggagcagggcccaatagacgggcccagcaagtcgggtgcggaggagcagacctcaaaagacagccctaacaaggtggttccagagcagccttcccggaaagaccattccaagcccatctccaacccttctgataacaaggagctccccaaggctgacacaaaccagcttgctgacaaagggaagctttctcctcatgctttcaaaaccgaatctggggaggaaactgacctcatttctcccccgcaggaggaagttaagtcttcagagcctactgaggatgtggagcccaaagaggctgaagatgatgatacaggacccgaggagggctcaccgcccaaagaagagaaagaaaagatgtccggttctgcctccagtgagaaccgtgaagggacactttcggattccacgggtagcgagaaggatgacctttatccgaacggttctggaaatggcagcgcggagagcagccacttctttgcatatctggtgactgcagccattcttgtggctgtcctctatatcgctcatcacaacaagcggaaggtaagtcgacagcggccttccggaggggagtggggtttccagcaccctggaagcttgggtgtgggtgggtatcccgtcactagatgcccgtgagcactggggactttaaaacaaacttcagttttttcctcaggccctattaggcctctttactcttgttttgttaatcgtgttttcatcctgtcacctgtttactctgagtgtcctctgctactgcattaggagccaagttaggacattattaggatctgacctgacttggaatctcctcccataactttgcacttaggtccttcacagcctcagaggacctgagtacttgacagttaaagcacgtaccttccatcctatttcccttcttgagacgatatgtcatttctagcttcctttcccaacattctctcttccatcagcagtggcacaaagaatggtttcaattactgcgtcttcgataccaggaccaaagagcccagggacttctgcaattaataataattagaagaaagcccagaaattgcacagacacgtacacctgttactttttcatcagggtttggtctgtttattagcaaccactctaatgacaaaatgattgcatttcatattgagcccccaacatttagaagctagtttctgtaacctgcttaaaattggagagtccaattctggccataaggcctatggctataaagaataaaggggaagacctttagtaaaaatgtgcattcctggcccggtgcagtggctcctgcctctaatcccagcactttgggaggccgaggcaggaggatcgcttgagcccaggagtccgagaccagcctggccaacatagcaagacctcgtctctacatataataaaaaaattagccagatgtggtggtggacgtgtgtggtcccagctactcaggaggctgaagtgggaggatggcttgactgtgggaggtcgaggcttcagtgagccatgatcacgccattgcactccagcccgggtgacagagtgagaccttgcctctaagaaaaaaaaaaagtgtatttcttattctatgtccaagtgtccattatgcagggtaaccttagtcatgaaatgagattgataaagaatgtagttgatgtagcatcgtggggtgaaaaagtacatttgtagataggaaattctgattatgactttttttaaaggaatgtcctatatcctagatatctctaggaaggagttgatagatctttgactgtgtacctttgaataaatcaaacagacttcctcccacacgctagagctcagacagccttctatttgttatttcctattaagcaatacaaaggattctgatgtaattaggctctgtctttcttaaaatggttatagtttaaatagacctctgtgagtgtactgctctttctacagtcagggtcattaacaaatatgctaccaggtgactgcctctgagttcagagactgaactatgtcattacagagccacctgttaatcattttctttttcctttcctcagatcattgcttttgtcctggaaggaaaaagatctaaagtcacccggcggccaaaggccagtgactaccaacgtttggaccagaaggtaaggaaggaggagccaggtccatgggagggataggagggataggcaacgtcagatggacccagtagtgggcttgcatttgccatgaagcagcagtggctgattctggggatgcggttgctgttgctgttgcattcgccctttttagacaacaaactagaaacatctagatacacatatctgtgacgttagagctagcagagaccttggaatactctacagcagctacctcccttcacagatgaggaaataggcccacgcagaaacactcttttttttttttttccgctaagtttctactgcaagttagtggcaaactcaggacctgatagcaactccctagtctcccagtcctgagctttctgcattctgccagcgctccataaactttaataggcatttgaatcaccttggggaattttgataaaaagcattatctgattcattagatgtggggtggagcctatatttctacattcttttttttttttttggagatggagttttgctcttgttgcccaggctggagtacaatggtgcaatctcggctcactacaacctctgctgcctgggttcaagcgattcttctgcctcagcctcccgagtagctaggattacaggcgccaccaccacgtccagctaattttgtatttttagtagagatgggtttctccatgttggtcaggctggtctcgaactcccaacctcaggtgatccgcccgcctcgacctcccaaagtgctgagattacaggcataagccaccgtgcctggcctgtgtctacattcttaggaagttcccaggtgaaaccaaatgccactggatccacactttgtgtggtaaagtgctagactgtgctccctggaaacacgagcctggaagcacataggcctccaactccccacatcagcctggcttaagcaccgtaggctggagttcctgagtacagccaatccattcctctgtcagacagataagccctccttccaccccatggcagcagagctaagcaagggtctctctaaagacaacctgtctaagcaggaagactgtactctcactgcgttgctaccagcatgcacccttccttctgctttcagcatagcaacagccaggacattggcaaagaaccattggtggcccaactatgaattgttcccagacttcctgcagggaacacgattctcttgcacaactcaatattagctacagaacgagccactgagctcagaatatctttgctaactagtccagtaggctagctttacaatttagctctggactactgccttttcagataattgactttaagggttttcccccttttatgatttttgtttgtttgtttttgagacggagtcttgctgtgtcgtccaggctggagtgcagtggcacaatcttggctcactgcaacctccaccacccgggttcaagcagttctccctcttcagcctcccgagtaggtgggattacaggcgcccaccaccacgcccagctaatttttagatttttagtagagatggggtttcacccttttggccaggctggtcttgaactgctgacctcaaatgatccacccacctcagcctcccagagtgctgggattacaggcgtgagccaccacacatggcttatgatttttaaaaaaatacacatgtggctgggcatagtggttcacgcctgtaatcccaacagtttgggaggcagatcacctgaggtcaggagttctagatcagtctggccaacatggtgaaataccatctctactaaaaatacaaaaattagctgggcatggtaatcccagctactactgaggaagccgaggtgggagaatcgcttgaacttcggaggcagaggttgcagtgagccaagatcatgccactgcactccagcctgggcaacagagcaagactccgtctcaaaaaagaagaaaaccaccaccaacaaaaaacacatgtaaataattcacaacagtacagaacagtatgaagcagaagccaggattcctctctctccatcaagtgtatatctttctagtgttaggtttcatttcaaactttaaaaatcattttgtgtgctattttaattaattgctgtttctgtggtggtgggtcagtatgtcttaattctgaatgttttccctgcacctcctaaaagatcttttttcccctaagtcctaacagaatggtatattcctctggaaaaagatgaacgtcaccaatggattgtgctgctctcgtttcagctttgatttttttgtccttgagaaccttgtcctccctgctgatttgtttctaaatcaaaagaaatgaagaaaaaagtactgtgacctgagagacaccctcctctagaatttagtggcgggtctgggctggcagaggtagggggctgctttgggctttgcacctgcactttggtgacattgttcttctgtgttccctttatttatgctggtggcttccatccgttcctcctctgagggtgagtggaggggtatatggaaacacggctatgaccaaagggagatcccagcctgggcaggctgcgctgctgaccaccctccctggggcccgggctctgtaggaaagttggtccttgactgtggcattgcactctgcactgtttctctctgcagacctaggggaaaactgcaggtggaagtgcttttctactaaggcctcttactttgggggggatgtgccctacagaagacatagaagatggggaaatgccaatgggcaaagagctactttgaatacataattctcttcaaagacttcagcagcaaaccaaaacagcaggttaaaaaaaaagatgcttttttgggtgcaagtctaacctgtctagcatgagatcttcttgattttctgattattttatgtagcttgagacaaagtgaatcaacttccacttagttgtaccgagcataaaacagaacttgggcttcctggcagtgaggccactgtcccatcacagatttttaaaataaatatgatttgaagtagtgtgatctttcacacaatcatactcagtaggaactttttgaaatagggcaagtttatgtttcatgcgagaaaacatgaaggagggttttggttttggtctgcagtttttccaaagggcttttatgagatacatttcccacaaagtccattttgcctttgttgcctaaaacagacaaaatagacttagatttattaatagaaactatactctctgccaattttacctcagtgtatttaatggtcctttaatctgatataagatgccaagggtatttgataaaaattcttcttccatgccatgtcaggagttaatacaaatgaagaaattccgtgggttcccctgggataagtgagggtagtgtcttggacaacactattgtttgaaggtttatcttttctaatcatgctctaccgcattgtagagagcctaaagagagttgtttctgagctgatctcagggaaatacaaataacttgggagatgagggaaataagatgaattctgtgctgtcaaggcagtaagtctgaagaaaggaccatgcttcttatattatcttccaccttgcttaaaacagcccatagctttgagttgacattttcattcttggcggatagcctactttatgaaggtaaggaatgaactcctacccttcttgggtcattctctgtactgatgcgttagtcttataatactttgcaccaacctgaggaatcttctaggcttctctagcatcccctaagactgtggctatttcacgtctctctccctgcctgccttccttttcccttcctttcccctcctcatgttttctggttgtgcccatctgtaccagctcctttccatccaccttcgtatgcacccagatttttctgttcccatctgtcctatttgttattcatcccgctgctcaacttctccagtatgttgcttcccttaagttgccattcattctcttcatgacttttactaactcacttcggtctctgtctgtcaactaaacttttctaaaggttaccagttatccaatcaccaaatccatggctttttctcaaagcttagtcttgtccttggcagaactggacactattgaccatccaaatggaaattcccctttcttggtgtctctgacaaatggtcctttgccttatcttgtgctggtggtgaagaggccctcaaagccaggcctctctattcctttgactgtctcctcagccattaacccattcttcatcctcggagtgagtgattcccaagtctttgtcttggcttaatccctaaagaacccagttctgctggtatcgaatagttcagcttggttgtcattgaaaggaatttctctcttctgtccatcagcctgtccctcccaactgtctaggacagtcttcggtcacctaaattcctaactgcagacttttgccctttttctctctcatcaccaaagtcccatccatttttttttaataaaagatcctcagctacagtctttccattttccttgcttctcttattgcacacccccagcccattttgcttctctcttggattttgttttttcagatccacatttattgggtttcctgtccagcttcttggaaaggagctcactcttggaaagactgatctttccaaaatattttccctggtctgaagctttggtgtgaacttctcaaggcttagagaatccagttacagaccttttggggttcaggatgctatagattgacaccctcctgcctgtttttctctgcatcccaacctggccaaggcccctcctgtggggtgcccatctgtgcctttattccggctgtgccctcgactttccagcttcccatgtttctttggttaggtttctctcccttccttctttctccttccccaatccgcctgtttcgtcagggcccagtttgtttcctcatacaccttcctcactaccccaccccacatggttgactctttccctcagctccaccagctcttcatcatgccactcatttcagaacttgagcaaaacagggcagtcaggatctgatgtctttctggtctccctaagaaaactaagctcttgagggacagcccttggcaatgctttcctatctgctgatcatggtgaccttccttaggacttccagagttcagttccttctggcagagaggttttctttctccatgccatatggatgtgactcaaatgaggggtcccacagcttttcctggctaccacttgctgtgaccttatacatgttggggtttgctcttaaagaggagagcaggaagaaaggttggtttcagaaaccaagagggtcggcagtggacgcgtacattttgtcacggagtccacagagctgagcttttgagcagactctgagaagtatcattgcttgtgttgaaagaatacaacaggatttaagtttctctttagaaattgcactgaagaaaggccgggcgcggtggctccccctgtaatcccagcgctttgggaggccgaggcggggggatcacgaggtcaagagatcgagaccatcctggccaacatggtgaaaccccgtctctaataaaaatacaaaaattagccgggcatggtgacgtgcacctgtagtcccagctactagataggctgaggcaggagaattgcttgaatccgggaggcggaggttgcagtgagccgagatcgtgccactgaactccaacctgccaatagagcgagactccgtctcaaaaaaaaaaaaaaaaaagaaagaaatagcattgaagaaaataccgcacatcagaggaaagcttattttctgcatggtgtcttttcaaagatagaatatttgaagcatgttttctagcgattgtgtggatgagggtgagctggctgaggcatcgctcaagctggggggtggtgtgtaagaagcacgtggagccacaagaggcacctcctatagtcagctaagggcttccctttctgcgcccagcttttgggtgaagggtgatttctattagacacatctgtgcttcagtcatagatgttaatagaggaagcagttttcctgctgcagattcctgaatagagttgctgaaagagtctacttctggactcaggggaagttgaaggccagtctgtgtagaaaggctgaggcaacggggaaagacctgacagctagttacatacgctctgacatagtactcccatgatggcttccagtgacacatgtgctgatagaattctaaacctctggaatttccctgctggcgacttctatggccgttgactgtacagggtaacctgatgccagatgctatgggcgtgatgagaactagagcattgcagcatggaggaaactgtgaggcaccagatcctgtgcttctgcaggccattttctgaaaacccctgttaggaaggttggatttggcgtgacttgcttgagcaagagtcctggggagagattttgaggtttaatttaacggtatatccagagctaacagtgactcaactcgtctagttctgcaagtcagatgtacacttagagtctctctgtgaagggtttgggtctgagctgtatagtatgtcaaactgccagtaagccagcccctcaccctctgatagatattcctttaatgcaccagacttcatgtttgataaatgattaatggttgaaattgtttctcttcttttgtgttttcccagttaatagatggtcactgtttccacaatgttttatactttcagctttttgtaacttaactataattacttaattttatttttttaaagcttgttgtggtctaatgagaagtatttttcagtgcataatgtttttctgagcttctgtaaatgccatcccaatgtggtttggttttgttgaacagaaaccaaaataaatttcaaaatgttaaagcaatggattta

SEQ ID NO: 895 - DNA, 10929 bp, Homo sapiens
  source 1..10929: mol_type = other DNA
gggacttccgcagaaagcaagattgggcctatccgcgatgagaacggcgtggagggggaattaaggctggaactggagagggaggggtctgcggtcagtcggacgcggcgctggaaatccggcggaggacctagaagtagcgggagcgatctgtgggcggggcgaacggcctgccggccgacggtagggcctgaagagcctagggtggggctcgcggtgtcgcggagggcgtggaagtgtgtcagggccagcgtgccggccctacggaagccgagcctgaggcgagatctcgccttttgtattttcactgactcatatttcctttactcaggctcccacatcaggacgagaaggagccctcgagttaccgtgggagctgtgggagctgccctgtgactcttaggaagatgccgtaccttggctccgaggacgtggtgaaggagctgaagaaggctctgtgcaatcctcacattcaagctgataggctgcgctaccggaatgtcatccagcgagtgattaggtatcacctacctcccttcgcgtgctaactgctccctttgcaatccccatcagggctcactagccccagtctctctgaaagggtgaattagctttcacacgtggcagttatatggttcggtcttcgtcctgctgctttggagtaccatgtcagtctcccctctgcagcatcttttactcagctgggtagtttcctccatatcacgggcttgagcaattactggtgactcttggatctataatatagctagtacagacttccttttttagcttcagacccacgtatcccactgcctgcttggcatttccacgtgcgtggtttatcaaaagtatgtccgaaatagcccggacattcttccgtcttcctcaaacctgttcagcttacatttgtgttgatgaatgccaccagcagccgactatgcgtgggagccaaccttgaggacacctgatctctcacttcttatgtcagatggtttgaattcataattctaaatatccatcctctcttgtttattagcattgttgttctggtccaggccttcatcaataaagcaattgcagcagcttactagtaggccactttgcctcatttgagacagaatttttccattatacatacctgaacacataactcttgcctacagctatggttcacaaactttactatgcataaaaatcccttggggtgctttttgtcatccagtccagggactgattctgatttcagtagggtgggagggaacccaggaatctgtatttttaataaacatttcagttggttccagtaggagaccagtctgagaaacaataaagtccaaacttatcacagcacccaaggaacaagctgttaattcaactacctacagactcttaaaaaaatgtgtgctgctcctgctcatgtctacttacctcatagcatgtatctttaccttgctattacatctgcctagtgagctcctgctcattcagctaaagtattacttcctctgtgaagaaacattttctgacttcctgccagtgtcagacctctgaatcccctctacaccttgtacaatacttctgtttaagtacttatctatcatactgtaattaacggtattctcatctggctcattaatagatttgaagttcctagaggtttgagaccacaccttcttcaagattatgtcccaagagcatgtccctggatgtaaaagttgaatttcaccaaagtactagggattcaataagtgtttgttgaggctgggtgcggtggctcacgctggtaatcccagcactttgggaggccaaggcgggtggatcacctgcagtcaggagttcgagaccagcctggccaacatggagaaaccccgtctctactaaaaatacaaaaattagctgggcgtggtggcacgcacctgtagtcccagctactcgggaggctgaggcaggagaatcgcttgaacctgggaagcggagcttataatgagccgagattgtgccactgcactctagcctgggtaacagagcaagactctgtctcaaaaataataataagtgtttgttgaatgaatagaagaataatgtttattgtaggcctatggtatgaagtactgtgtgatataatagacaaggtaatcctggctgctaccctctaagagatcacaatctagttgggtaatcaggagatatgtaagtaaaactccctccattgtaagttggggattttgcattttacttccttctgtcatgtgcgttgttcaggtacatgactcaaggcttggacatgtctggtgtttttatggaaatggtgaaggccagtgccactgtagatattgtccagaagaagttggtttatctgtacatgtgcacatatgctcccctgaaaccagatctggctctcctggccatcaatacgctgtgcaaagactgctcagaccccaatccaatggtgcgagggctggcgttacggagcatgtgtagcctcaggtgagtaccctcttctctgtctggtcctaaatggctgatgaattcaagtgatcacagggtaggtttttaaagaggataatttatttgagctccttaatactggggaaaacattattgtaccctgaactcagattttcagccactgctttggcttaataacctgtatcatataattttattagagggagtttttgattctcactctaagtaaaatagtcctcagttttggttaaatatctctaaacaattatgtgtatatctttttttgctgcctgtgcatcattattccaaatgaaaagtcaaattaggctgggcacagtggctcatgcctgtagacccagcactttgggaggcttagacaggaagattgcttgagcccaggaatttgagaccagctgggcaagatggtgagagcctatatctacaaaaaattaaatgggcatggtgacacgcacctgtagtctcagctactaggaaggctgaggcaggaggatggcttgggcccgggaattcaaggcagcagtgagctatgatcgggccactgggtgacaaagtgagaccccatcttgaaaaaaacaagaaaaaaacagaaaagtcaaattatggctttttaagcttgatagaggctttctgcaattcttcatgatctgatgggtgcagcatctactaaaccatctgttaggtgaacaggggctgaggtatgtcaaaattagtatttcagaatctggctaactccaggatgtgttgcttaggatgcctggtgtgcaggagtatatacaacagcctattctcaatggtctgcgggataaggcttcatatgtcaggagagtggcagtccttggatgtgccaagatgcataatcttcatggagactctgaagtaggtaagttcagtgtaatccatcatggtcaatgtgcctccattatgtataactttaaaaaagattgtgtggctttggtagaaaataataatgtggccccagttctgtacatatctctttaagtaggatgcagggcttggtatcttctggagatgagaagtcctttctctggggccccaatgagatcctttgtattagctgcttagaacagtctggacatggcagttttttttttgccttgcactttagtgtggcctttgtcatttttgtagcagagaagttcaactttgtctacctggagctattactctggctacatccttgttactctgaagctttccttctttatctaagaactttgttcttttttatagatggtgccctggtaaatgaattatacagtttgctgcgtgaccaggatccaattgtagttgtgaactgcttgaggtctctagaggaaattctgaaacaggaaggaggcgttgtcatcaataagcccattgctcaccatctcttaaatcggtttggatgcctcagcactctttttattatgagatctgctaccttgtgggatcttgttgatgtattaaagtattgaacaacttatgtggggtagaaaagaaagttaaccattattattattattatttgagacggagttttgctcttgttgtctaagctggagtgcaatggcgctatctcggcttaccgcaacctccgcctcctgggttcaagcaattctcctgcctcagcctcccgagtagctgggattataggcatgcgccaccatgcccggctaattttgtatttttagtagagacagggtttcaccatgttggtcaggctggtcccaaacttctgacctcaggtgatccgcccgcctcagcctcccaaagtgctgggattacagacgtgagccactgcgcccggccagttaaccactattaactccctcacattccactgagagaatttcttttatttgccttactttcccttattgatatagggaaatagaaatatactgtgggaataggttctacccttctctagtcatgtcccccaaactaagccatttatagtgtcttaaaatgtaaggaacctggacccagtgtatgctgatcatgtctttggtcttagaggagtgtgcatttgtattaacaactcatcttggaattttaagccttttttgtgtaaactttaaatagtacatgaaaagtgacttaattatggcacagcctatttttaagaattctccctttgctatgatgaacaaccacctggtcatatggcagtggcatggaaatggtcctaattttgttgctaaaatagctcttttgttttgttttttggatagaatgtcaaaactggaccaatggggccaggctgaagtattgaactttctgctacgctaccaaccccgcagtgaggaagaactatttgacattctcaatctgttggatagtttcctcaagagcagtagcccaggtgtggtgatgggagctaccaaactttttctgatcttggcaaaaatgtttccccacgtacaaactgatgtccttgtgcgggtcaagggacctttgctagctgcctgttcttcagagagccgtgagctctgttttgttgctctttgtcatgtacgccagatcttgcatagtttaccaggtcactttagcagccactacaaaaagtttttttgctcctactcggagccccactacatcaaactacagaaagtggaggtgctgtgtgaactggtgaacgatgagaatgtgcagcaggtgctagaggagcttcgagggtactgcacggatgtgtctgcggactttgcacaggctgccatctttgccataggtaggtgtctgctccttttccttcttgagaacctagaccagccagcaagaaaactgtggttagaggaaccatagagagcaaagggcatgaatcttgcttcagaagcaaagtactatgcactaaataattgggtcagtgactacaaacacgggggaagagagtttttttttgttttttgtttttttttggtcaagattggtgttgctgtatcttccaggatggagaatacaggtaacacaaactacaatacttaaaattgttgttgtcttctatccaaaatgctttcctatacatcatcttaccacagtatcgtgagacagtcaggaaaagtagacaaatgtcattaacttcattttaaagatgaagaaactcaggcacaaaaacagttatcaaattgccaaaagggcacatagttttagaaatgggactgaaatccagctttcctgactcaaagtcctatgttaatccaccagtcatttattgagcttctgctatgggctatgtattgtgctgaatgtagaccaacacagaataattcctaaatcttacagactttttcatagtaccctgtctggaatttgaaaggctggagtgactcaaaaactgaaaacagctgttgagccaagttttgaaggatttcaagtacaggaggaggagcaaccctcatatttggaataaagcatggttattttaggggcagagaagagggagcaaagaggagacaagaaatccttaggagactgctgtcaagtgtcccccacaaaaatactccattgcaggtgtgctgcaacaaaaagggtacctcatatctggctgccatgtaaatacctttgttactataagttttcaaccttgtttaatggggaattgttttgctatgagctttcagttttctagtagtcagtgagaaaaaatgatttttaccaaagttccctttatagtaaacttatattcttagttcatcaagtaaggagtgaatttttttcttttttttttttttagataattctgtttcttttgtctttcactggtgggagatgattttagattgaggtgctaatatttcacttagcagttttctctgctttcccttcttttgtaggtggcattgccaggacttacacagatcaatgtgttcagattttaacagagttgctgggtcttcgacaagagcacattaccacaggtaatgcctgcctttttaggatttttgttttttttgtcaggtgcctggcctatagtagttgctcaaaacatgtttgttgttgaatgagtaatatagagatttgaacttttccttgcatcatcatctgttgctgttagagaagcataaagtctatagatctaataggatattgagtcttcaggctgccatgatctataaggctgtactatagataatgaaggctactaggatgaccttgcttgatatttcaccatctttacttctctttttgttttatggcagtatgccataggcagtggcttccagggttgggacaagggtaagtcaagcaagatgcctaggatgcaaaatttaagaaggcactcactcttaggttcctgcaagagccaatcctgcatgtcttcttcaattttgaaccctaggcacctcacttgtgttatcattttcccaggcctggtggttctatttatactgtctttagtgtttcattcaacagcaatactaccccacatttgcatacagctttatgttttacaaagtgctttttcatacattagttcatttatcctcatgtcaatctgataagagcaatatgcattcaagaaattattgcttatttcattacatttcttagataaccattgaccacacctccaaaacccattttacagaaatccagccagaatcatgagtctgaatacatgactgttcttaagattcctgcctacctggaggctctaatcctgtgctcttgtaccctggcctgtattgtagtggtggtgcagactttccgagacctggtttggttgtgtcctcagtgtactgaagctgtatgtcaggccctgcccggctgtgaagagaacattcaagatagtgaggtagactgtaattctcctttacttctaggtagggggagaatgcttgaaaccctgccctttgaaatggaatctaattattctctctaccctgtgtttgaagtgggcactcttcgaattgattgccaccttagattctcttttggatatagatggcatataaattataaaaacaagatttatccgacgggttttattacaaaactgtgataccattgttctcttgaacagttctgttttgttttgttttgctttgcttgagatagagttgcccaggctggagtgcagtggcgtgatctcggcccactgcaacctctacctcccaaactcaagtgattctcttgcctcagcctcctgagtagagtagctgtgattacaggtgtgcaccaccacgcccagctaatttttgtatttttagtagagagggttttgctatgttgtctaggctggtctagaattcctagcctcaagtgatcacccacctcagcatcccagagagctaggattacaggcataagccactgtgccccgcttctcttgaacagttttgagtcagagatttagaccatggagtttttagctagaatgaaaattataatcatttgtgaaatttttacaaagatttggacgtaatcacaggtctactgacttaaatattcaggggtgttggacctagacagataactttttttttttttttgaaacagagtctagctctgttgcccaggctggagtgcagtaatgccatcttagctcactgcaacttccgcctcctggtttcaagcaattctcctgcctcaggctcccgagtagctggaactacaggtgtgcaccaccacgcctggctaatttttgtatttttaatagagacgggtttcaccatattggccaggctggtctcgaactcctgacctcaggtgatccaccctcctcggcctcccaaagtgctgggattacagacgtaagccaccgtgcccggctgacagatacatttttaagaagcttcacagatgactctgatgtgcactctaggttagtaaccatttttgtgaaaaatttagagaaattctttgagcagcttccactgaaacactaaaacccaatagggccaaaggccccaaacctgaggaaaccttatttattgcttaatccaacataggctatgaaagttttgagtttcctcttgtgtattagaatttcattcctatttgttgtagagagtatagtacggggaatcagtaaattaaatgaagtaaactaaagattacaccttttctgctggcactaagcgaaaagcaaaaccagtggctgtctattatctcctgtgttttagacagtcaagtgttgagcacttgctcttattcctttattctctaggggaagcaagcacttatttggctacttggtgtccatggggaaagaattcctaatgctccttatgtgttagaggactttgttgagaatgtgaagtcggaaacatttccagctgttaagatggagctgctcactgctttgctgcgccttttcctctcccgacctgctgagtgccaggacatgctaggacgtttgttgtattactgcataggtgggtttttcagaaggaaatagtatttgccatgacccatagtaaaaattcttaatagctttcattgtttggtgagtcacgtctgggacccgagaagaaaatgtgaatgcttcctaggttttcctctctccttcatttttttctcctattatggttggcacaagagtaggaggaaagtggttttgtttttaatgaagtcaatctgttgtcttacctcagaggaagaaaaagatatggctgtacgggaccgaggtctcttctattatcgcctcctcttagttggcattgatgaagttaagcggattctgtgtagccctaaatctgaccctactcttggacttttggaggatccggcagaaagacctgtgaatagctgggcctcagacttcaacacactggtgccagtgtatggcaaagcccactgggcaactatctctaaatgccagggggcagagcgttgtgacccagagcttcctaaaacttcatcctttgccgcatcaggtaaaaacagtccttaccttaaatcttgtcatgataaatctttaccttttcaatgattggtggaaagtagagtatcttagcactaaacctcagactgttgcctgaatttgaagcatttgtgagcaagaaagaggttcgtcactggttatttcagccatttgtccaaaaataaaagtcacattgtgtacatttgggaatttggataaaaaacttagctcctacagattaagaacatctttcacacaagttttctgtctcttttaggacccttgattcctgaagagaacaaggagagggtacaagaactccctgattctggagccctcatgctagtccccaatcgccagcttactgctgattattttgagaaaacttggcttagccttaaagttgctcatcagcaagtgttgccttggcggggagaattccatcctgacaccctccagatggctcttcaagtagtgaacatccagaccatcgcaatgagtagggctgggtctcggccatggaaagcatacctcagtgctcaggatgatactggctgtctgttcttaacagaactgctattggagcctggaaactcagaaatgcagatctctgtgaaacaaaatgaagcaagaacggagacgctgaatagttttatttctgtattagaaactgtgattggaacaattgaagaaataaaatcataacagagtcttgttgcttgtctagagtaagatgaataactattacactttcttagtctttcctattagagctgccagtaagtccagataatatcagatacaaaggagagtggaaaatctagaaatcaggattcttaagtttttggccaaagaacattgattcattcctttcattcctattggcaattgaccccatttttcagtgatgatgttgtagaggttaatgttggtaaggagatgcgttgaggatgggatttggattatttcctaatcaattttaggaattgtgttagtaattaaagatggctgatgtgtggaaactgataggggtcatcatttgtgggggtcatcttttcttccctggattattatagtaaattcctaactgttctcatatttccaatcatgcttttaggccagattccaaagtccttaatgtcatctaaagtacctctttggtgtcaagtcttgccactcccaaaatgacttcttttctggcagaagcaaaccatttgcattgcagttccctttatacacctgcttctttcacctctgtgttaacttaaacctgcttttatttattgcctggaacattttctcaccctcatatcttcttgaattaacacctcgtctatctttcagtgttcagctcactcataagctccttcaggaagtttcctttaaccctcactgccttcattaggggcctccctcaagctatcaaagtagccagagcatacctctagcagtagtattgtaattgttttcttgttgcttgtcctcaatttttattctgttcttatctgaccacattttgtacattgaagcaacttatggcaagaacaaatctaataaaatgatggtaaaatata

SEQ ID NO: 896 - DNA, 6871 bp, Homo sapiens
  source 1..6871: mol_type = other DNA
gggcggggcttcgggcgagagggagggcagcaggagaaaggataagaaagggagtgggactggcgcctacggtggccgaagtgggacgcgccgagccggaggctgcaggatggtaggctgtgcgaagagggaggggagggggaagcgaggggcgtgggctgcacctgcgggggtcctcgggggccgccctcggggtgaaccgccctgtcttccctctggtcctcagaggcctcccttgcctcggcgggtgggcgagccgggctcgggaggaagagggggaggtggcattcgggagaggggcggggagggggcgcatttgcagggcgagcgggggctgacgaaggggcggcggggccgtcccgagccgggaggggcgctctggtcttggcccctggggtccctcgatccccgctgcagggaagccgcccgaagcagagggttgcgggagtctctttgctgagggagggagcgggggtcaccagtcaccgagacccccttcccgggctgcacaggcgggagcggggacccgggtggggagaggggtgtgggaggggagtttccgggtcggaaaagggagcgccctactgcgttcgtggccgtgcttgcctagaggctgggcccaggtagggaagcgaagtggactcgtggtttttctccgagggacccaggctttgggatcccgggctccggggctctctgccccccttcccattctctttccggaatccaggccttccgtcttcctgcttgctccccacccccctatttgagcgccgcacgaggctccccagcgcccctcttttcccctccaccaaaaaaatcagttctcctgaattctgatttttcacttactaagctagtacagtgccacacacccagggattccaagcctgggcatgtccatgaatagaagagctactggggtaaggagaagactccaggatgtggcccagaccccccggaactgggaagctggggtacactgggcagtgagggttctgtcttccatcccacttgacccagcttgctgtctgttctgcagacattcttttaggggaaccccctgggtggcggggccctaactgagggaaattggtcacctggtgtctggggaggagtgggcgcttagcaggaggcaccctaaaaggaagaaaagttaaagagaaatgtcgaagaccaaatgcctgggtgcctgcagagaggaagataggatttgggcatctgcataccctgtgtggtgttggagatacatactacagaggaggatacccctgggcataggcctggcactggaggatgatatgtttgggagatcattaagatcttatggctatgatggggtggaaaattgaggtagcttctccagggacaaaataccagatttcagcatggtgatggatagagagagggtggaagagaacaggcatttctttggcgtcggttactgtcgtcttgtcactgtgctaggcattttacttacctttagaaagcagaccagaaagcaagaggtcagggaatcatggtaataatagtaataactaacggccgggcgcagtggctcatgccttaatgccagcactttgggaggcctaggtgggtggatcacctgaggtcgggagttcgagaccagggcctggccaacatggtgaaaccacatctctactaaaaatacaaatattagccgggcgtgatggcacgtgactgtaatcccagctactcaggaggctgaggcaggagaatcgctggaacttgggaggcggagattgcactgaacagtgattgcgccactgcactccagcctgggcgacagagagagactctgtctcaaaaataataataataatagctaacatgttatactgcctgcctgtgctagggacttgcatatatcaaatcatttagtctcacctaacaactgtgcaaggcaggtacaatgtccattttacacataaggaaactgaggcccagagacttacagtagtaattgggccaaggccttgcataactagtagagccaggatttgaacccagctgacagactcagaagctctgacttccccctgctggtggaaacacccagccttgagagcaaggggctggatgttggaagaaagtagagaagaattagctggagataagtttggggaatgtgtggttaccctcggttctgccctcccatcccccacagatgcggttcatgctattattcagccggcagggaaaactgcggctgcaaaaatggtacctggccacttcggacaaggaacggaagaagatggtgcgcgagctcatgcaggttgtcctggctcgaaagcccaagatgtgcagcttcctggagtggagggacctcaaagttgtctataagaggtgactccccacctactttcagacctgcctagattcaagttgggcagtgggttaaaatgtctgagaaatggtcgtcctgtaggtcagggagacctgggagctgaggacatctggaggacagtaatgaatgtcagcttccttttttttttttttttttctccccaaactcttaaagaagttcttgtttaccacttggttttgctcacgtgcaacacctgcctcactcacgtgtccctttgggccctgtcttgccccactgcgcatgtcccttgcagtcaaaggtcctgccctacttttcctaacacacacgcacacacacaccctttccggttccttctcctcggagcaggtaaattacttggctcaggtttttgctgagtcaaacttaggaggtcagagggcaggaaggaaaaagcatgcgttctttgcatgtttttaagacagcacaaagaggcaggtgagttactctttacatgccctagggccacctcacctgtggccagccagggcacagaccacctccaggctggtgagaggtttgagaccagaatgcctgggtcctgaagcaagcttgtagcgatgtctcatgcgctcctctccgcagatatgccagcctctacttctgctgcgccatcgagggccaagacaatgagctcatcacactggagctgatccaccgatacgtggagctcttagacaaatactttggcagtgtaagtctcctctgcccaccagtttccattcccagcaatcccctttggtaatccaccaaactttgaggcccctccagtctctgccctggaagtttcaggggagaggtgaagttggagcagtaagaacagtaattaatttccctttttaagctttaagcctattaaccatgtcccataatcgtccctgagtggggaaactgggggcaggatcaggcacttaatctccacttagagcttagctcggacttttcacacagagaccaagttcagatgttttgattagttcaaatttttatttttttagagacacagtctcaccctatcacctggaggaatgccgcctatggctggagtgcagtggcacaatcgtagctcactgcagccttaacctctgggctcaagccatcctcctgcctcagtcccctgaggaggtgggactgcaggtgcacaccactatgcccagctaatttttgtatttttttttttaagagatgaggtcttgctatgttgcccaggctgggtctctaactctggggctcaagtgatcctcccacctcagcctcccaaagtctgggattataggcgtgagccactgtacccagccccatattcagatttttatcactggttgctgatcttggatttgcattggagttttctggagaatttttttgaatggcaatgtccaggttccactcccagagattctgaattaacttatctgagggacagctcagatcttagatggggcgtagtagtaactccataatttgtgttataaagtgcttttgcgtcctctcgtttgctccttatcccatcctagcagtaggtgttggtatccccatttttgaggccagaaaactgagacttagagatgtttcatgacttgtttagctagatggttagtggcagagccctgcttggaactcaagtcttccaccccatggtccagaattccctctttccctgccccacagtgtccaggaagcggggctaccacagcctttggtgggaagaacgtcacagattttggggggaaggcaaggggaaccatagacaaaggtagataaggcaactaatgtttcatgatcaggaggaaagatgcaagaggaagagggaaaaaaactgatccaaggcaaggcgcggtggctcacgcctgtgatcccagcattttgggaagctgaggcaggtgggtcacttgaggccagaagttcgagaccagcctggccaacatggcaagaccctatctctacaaaatattttaaaaatgaggtgggcgtgatagcatgcacctgtagtcccagctactcaggaagctgaggcaggaggatcacttgagcccaggagtttgaggctgcagtgagctgtgatcatgccactgcactgcagcctggacgacagagcaagagaccctgtctctaacaaaataacgaaacaaaaaaactgaaaaagctgaccaatgactaaggcttggaggttgggggcagaacccaaggtgggaggcacggtcttgaaaaggaagtggctccagttgcccctccatgctcaacttagcctctccccgccctcccaggtgtgcgagctggacatcatcttcaactttgagaaggcctacttcatcctggatgagtttttgatggggggggatgtccaggacacctccaagaagagtgtgctgaaagccatcgagcaggctgacctactgcaagaggtacgggccagggacagtgaggaggaggaggaagcgcacagtggcggacagggtcctccctcccctggacacccggcctgccctgcccaccgtcgccaaggagccccccctccctgtggtatctgacccccaccacgcccagctctccagcttactctcaagccctgaccccatggggtgggaggtagggtggcagatagcccacctgtgcacccctcattccaagctctgtccttctcccaagcccccagatgtctcgtggccacccagtctcctttgtccaattctctgagcaaggcttaacaccaaagggttaagggtttgctctggagttaagggttgcttggagaattggagaaggggcacctggtaggtcattcttttcttccctgatttcttcccccacctctcttttttttttcttttttttttttttaacacacacatactccaaagcctctgcgtctcaggaggaaaaggctatggggatttgggggctggcagagggcacctggatgttggttctccctgctccccagcgcccccgccctcaccccattactgcctgccccctctctgctgtgccatcaccgagccctggtgcagggagatgagtcaccggaatctgcagtgatgagcgagcccggcctgagctggctctgaggagggggagagatggggggcgagggagggctcatctttgcagtgggagagagggcagaactgaacttgccacctcactggtcgagcttcaccttcccacacacgcacacacacacaccctggcgcgcacacacacacacacacacacatgccctggcacacacacccatcgtgtcaccagtgttgcgctcagaccctaatgacgcatctccctgcagcctggttcaccttccctcagggacctggcactcacctccctctgccttttccccactctgaaaaacaggacccagtcagctgtaccccccagggccccagaaagatcccccacctccttgtcccggcttcactccctttacccccaggtgtcaaggcggggcccctgcttaccaaggtcctggctttgggttctctgggtggtgacggactcaacctggaccccccctgccactgttggctggctctggggctggccctgggaggctggtgggtgccccatgaagggctcactggtccggccttgggctcacattggcttctctccccctcccccgtgtctgtgcctcccccgtctgactcttcctcgtgactgctgtcttgcccaccctgtcggcctctcctggtgtctctgcgtcaccctctgtctgtctctgccttaggaggatgagtcgccacggagtgtgctggaggagatgggtttggcatagcccctgctgggccggggtgtggcgatggggtcctggcagcgtggcgggaacggctgcttctcctctgcccagggccctgttcttggtgggactcggctgcccctcctctgctgcctcacctttcggagtgagctgtgggctcaggcccttcaaacattccctccctccaccccctacctccactttccccttttcccactgaaggttttagaagctaggaggcaggaaaatgtgacccagatgggggtgctatttggcttttattccctgcctttgcagaactgatgtcaccccagatgtccttccctccctaataactgtaaatatataaatatgtcaggttaaagggaaaaggtgttcagggcacttcttgtcctctctgtcccataacctacctccaccctccccctagccagccaggcagcttctctgcctgggaggggagcctggacccccctctttctccttggctgcagtggggcctttatccagtgccagggaggaacaacatagttaatttttttctaaccttgccactttgagggaaggaagggttgggggaagggcaagctttatgggaccctggtcctggccctggcctttcactccagttctgggtgaggcaggagctgggaggggtggggagggggagggggaagtgtctgcctttatgtcctttcttctgaaataaaagtaaaagcatttctgga

SEQ ID NO: 897 - DNA, 32742 bp, Homo sapiens
  source 1..32742: mol_type = other DNA
gtcgcgtgcgggagggggcgggtggggaaggatcgcaggcgagattacgaggcgaggctcgcgcgcccgcccccgccctggcccccagtgcccacccggtcggcccggcacagccatgatcaaggcgatcctaatcttcaacaaccacgggaagccgcggctctccaagttctaccagccctacgtgagtatccagccgccgctgatccgggcgagggggagtcgttggcgacgggcagcgcccagcgcggctttctcagagcgaccccctccggcgcgctgcggcccttgtcccgtcccggccgcctggcgctcgccagctgtcagcctcctggtgggtgtggacagggtgcccacctccctgccgcgcggtcagccaccgacgtggctttgcccgggcggttcctccgcccgtcggtgggctgcatgctttcctggctgcgcgggcgaggccctggagacttcccggggcccggccctcgccgatcgggcagccgcagcccagccgcgccgcggagccctgcgcccagtccccaagagcccaccccgcgcggctgccttcctgccgcccgcggctgcagttagcccgggaggaggaagacggcgtggaactcgttcttctcgcccccctccgccgactcccatcctttccaggtggacttctttctgttctttggacagatgggctaccgtttttcactgtggtcctctcatagcacaggaactttggcttcctgcgtttgataactgcacgttctgtacagtctctcttctgcatgtttcgatacgtgacagactgcccagtgtgactttcaggtgtctccttattgaaaaggaagatatgtgaggacctaatatttttatcaggctttttaccagctggctgcaaattatttaccctcgaagtaaccggcgacgtttgtagttgactgattggagctgtggttctatacctaaaagttatgatttcagcttctggtttggcatttttccacgtatgggaatttgccctcatttatagtttttttctatttatgaagaatagtagcatttgtagaacttctcttttaacgtgtaaatactgtttagtatggacaagtgcaggaggcattaaggtagtagagataagtgatttgttgatgatcgaggaagggttttatagagttatgtgcttacctgagggcagaattcgctagctgaaacacataaaattggactcccagtggtaggattaatgtgaggtataactgttgtgtggtattgtggcactttgcttatagcaagaaatgagctttcaattcaattttgaaattgtgccaaggctaacacttttatgcagataagtcccagatggaaatcaatcttgccattacaaagtaaatgtgaaaatgtcagtttgcctaaaatgataatgcagtctggaggtgttagttgaagtgagaaatcttgagcttattcttcatttttttcagttgttttgcttttgctagctataaagaatattttctgctactcgtgtgtggttttaatttagtataacttcaatactaatggtctgtttaaaaattctacatcattctttaatccagattaaattctagttgatcctcccgaatgggaaaaaatgccattaactttacctgtttgttaaaatatagtaccagcctttattgaaggagtctttgtcataaccattttgccagtgtcatccatttgcagtgtaaaaaaggtatgttgcaatagtaaaacaattcaaaaaattatttttccatatctaaacttaagcaatattaaaaatagtgggtttcctggctaatccatgtaatcggtgtatactactcgtatagtgtataatttaactatctattgaaaaatgcatttaatttagaaactcagaaatctgtctttcccttgtccaaaagtgggaacagaagtattgtttaccatcacttactaggtagcagtgacggttaatgtgggaagtggcagttttggcaggagtggcagctcaggtggcatttttggccattgtatgagtgacagtgccactgagggcacagagctagaagatataaaaagaagaatctggtggtcactggccgtttataggtggagtatgagaagttgtttctgtgttttaagtttctataagttgggttttgccgagtgtttttttgtctttcaggaataatttaagattatttatttatacatttgcttcctccactagaccataacctttttgagggcagttattttttttcagtcattcattccatcagtttgtcaacggataaatttaatttatgcctaccatgtgcaggcactgttttaaaatctgaagatgaacagataactttcgctcttgtgtgaggaacatagcactattaaggagtaggctgtattatagcatgccagatagtattacgtgctgtggaaaaaaaaataaagcgggtaagagtcttagagagtgagaggatgacagtttaaaatagggtagtctggtaagttctcactgagaaggtggcatttgagcaaagacttgaaggaggtaagaaaggcagccttgcagatatctgggggaagagcatcccgggtagaaggagcagcaaatgcaaaaaccctgaggagagcgcctgtttgaagaaccccaggaacttgtacatagcaggagcagactgtgtaagggaacattagttggaagtgtctgtttgtgtagggcgtcattctattcttgctgcctggaatgtccttcctttccattgccacgtgtacaaattcaaccccttgttctaggcccagcacaaacatcacctaaacattccgtgaagcctttgatcttgctcaaagcctcctcctggtttttaggatttttttcatctttgttatgacacagtattctcgttcacagcctataattcctcgtggcagccatcctatagaatacttgaaggaacgtatcagattttaggtatatttttgtcattctaagcagtcaacactgagtcttgaacatagaaaactctctaactctttgctaaatgcatttatttagaatctcctagcttgggatagagttgggattagttaacttgctgagtttccttctatctcttaaaatgtagtccttcactaactagaggttttaagaatctctgcctttagcataaaagtaatgatggcatatgtgttactcagctgtttctgttttaaggggtctctaagaagtatatgtccaatatgaataaaaatattgagtttaatttattaaacaatatctagaggtgtgactgagctaacaattccatatactggcaggatgctgaggtttgagtccaacagtaatcgtttaacactgagcagtttaaaaaatgtttaaccatttgccaacaagtttatcctactgcacttcattttcattcctcatttatctccctcaaatataacaacttacatattcatctctgccctttaacagtgcacatttccatttcatgctgtaatagattgttagattcgattgtggctccaagctgttatatgtgagaaataggaagttgcgcacctgttttgctaaacagaagttttggttcattctgctagagtcagacattacgaattcaagtgtgggctgggtgccatggctcatgcctgtaatctcagcactttgggaggccaaggcaggcggatcacctgaggtcaagagttcaagaccagtgtggccaacatggtgaaaccccatctctactaaaaatacaaaaattagccaggcatggtagcgcacgcctataagtgcagctactcgctcgaggctgagataggagaattgcttgaacctggggaggtggagaatgcagtgagctgagatcgtgccactgcattccagcctgggtgacagagtgagactccatctcaaaaaaaaaaaaaaaaaaaaaaaaaaaaaaaaaaaaaattcaagtctggactcaaaatgcatcccttttcgtttttgccttctatatccttggtctatgactgcacaaattcaaatgttttgcttggtttgtctttttaagttgatacttagcttcagcgacttgacaacagtaacctttagtcttttaatacttacctgacagtatttgtgcattactgtaaataactaatgagacttatattttataaactaaatatatttttacatagctatcaaacaaaaaaatcccttcggttgtgattccatagtgtatcctctggtgaattacttttaaaaaatttttctttttttatagagaaaaggtctcactatgttgctcaggctggtcttaacctcctggcctcaaacactcctccagctttggcttcccaaagtgctgggatgacagatctgagccaccatgcctggcctgtgaattacttttataaagtggaaatgtctttcttttgtgtgaattatcttagttgtttcttcagatataaaatactgtgtgtatgtatgcatgtgtgtgtacacaccacacacatattaagtgcaagcaggaaaaatttcaaattaacctatatgagttgcctcaatttttttaataaactgtatttaattaaactgttaaccaaatgcaagccttaggaggaactctaagattcttctttctcgtttttttttttttttttaaatcttaacataaaaatacaaagtgttgaaagtatagataacttcttttttcttttaaaaatatcccttaaaaagatccatccatgttcactcatgtctttttttagtgactattaagacgttgtggcagatgggataattaaacttatgtctgtgatcaagatagaattatcaacactcctgagtatgagggtgttaacacatactaacacacggcatttcagctttttgttaagaagaaaattccatacgatttggtttccttccatattagttataatgcgtttgtctgcataaattgggttttatgtagcctgactcaagtgcttggaaagaactatgttaggtacattataggaagtgcagagtagtagaccgattccaaaagtatttgattcagcaaatcaatgactttattgtagatccaatttctttctctttctctgctttactcatcacaaaattactattatccaaaggctgtttttctcctttggtaatcagttcaattcagaaagagacaaccatctgtttctgcagtcctggactgtgtctttcccttcattctggttagacccacccaagaccaatattcttaccctaatcaacatccaactttggattggagctgaagatgagagtgaaaacgggaataaaatggatattctgttggaaagatgaaagaaaggagtggatggtgggtaggcaaacaagggtctgctatttcttcttctaaacttttaaaaaaatatttatttttatggccgggtacagtggctcatgcctgtaatcccagcacgttgggaggcctagatgggaggattgtttgagcccaggagttcaagacaagcctgggcaacgtggcaaaaccctgtctctatgccaaaaatacaaaaattagtgagtcatgttagcacacacctatagtcttagctgcttaggtggctgaggtgagaggatcactgagctccggagatcaaggctgcaatgagctgagattgcgccattgcgctccagcctgggtgacagaggagaccctgtctcaacaaatttaaaaaaatatatgtttttattgaggtatagatgacaaaaaaaaattacatatatttaccgtgtacatgttatttttgtatatgtatatattgtgaaatgggtaaatcaagctaactaacatgtctatcaccactattccctctttattagcttttaatatatattagttttctgaaattttagattgcttctgaggttgttaatatcaggaatagttccttgtaatatgcaatactgaacctgtgtcacaatagatcttaatttcaggttttccttatatcaaagtatcctcgaaaaacccaaatgcttatacgttcacagtttttatgtggagtatgctggaaaacttgctttttaaaaattaagactaaaccttttgaatatttaattgtaaaggaggaaataaagtcttcaaagttaaaatgatttttggttatgaggtaagtgttataaataggacaatgttataggtcatttcatggcttttctaaaagaaggccttacgtgacgtacctatattatattctttagcaaagttgttttcaattttaagtaagtttctttttttgtgactgtggaaaattaaatattaaggccactaaggtcattcttgattttaccacacacagataattattaacacttagtgtatttccccccggtctttatttttcttttcagaatgtcccagtgaataggatataccttttagacattaataacacaaataaatgctttgaagctgatgatggatttattaaacattgtggctttaagataactgaatatgttaatgttcagccactctcttgttaaaatttaaaaaagacagtatatggtaatagcacattaataatttgcatgtcctaagaaatgtgtatatatctttcttttgtataaaattaaacttacctgtgtaacctgaggttatcagtgtccttgtctttttcgttctgaaaggaaatctttgctaatttttgtttgaaagtcaagagttcattcttacctttagcacttagtcttttttgtacctgtggattatggattttgtcactgctgttttataattcaaggtgattctgagttgttaccatctagagggcccagtccccttccaacttcttgttgtataaaactgtcacattaggctaactaaacacattttttcctcacccatctgccttttcagctttcctctcatcaaatcctttgaagtacaatatagttaaaacagctttctttgctgaagaatcaagcaactcttagaaggatattgaagtgaataaaggacaattctagctaataactgttttcttaagattccaagtggaggaagcccttgtagagttaggcctctgactaggccttctagagataggcctctgggaagaggggtggtctttctggatactttctgatctgtctctccattacactctttctcttttcctgtccatattctttcaagtatttatttgttgtttgtatggccctattctaagcactagtaatacagtgataagtaagacggatgtcacccttgccctgtgggtttacattctggtgataggagataggcagtaaattatttaagattgtaattagtctgaagacaaatgaaacagtataagggaataaagcttgatggaggaaagcctatattagatagggtcattgggaatacctctttgacgacctgacatttgagaggaaaactgaatgagataagagaggaagaatatgaaaacagtaaagaaaagaatgtttcaggcagaaagaagtgcagtgtccctcaaatgggaccacacttgatgtgttcaggaatagcaagaaggcaagctgagaaatcacggggaagagaggcaggagataaagctaaagagaacgatggggacagatcatgcctgtatgccacaccatgccccttcttgacataattcagtttgatgacatcatgcccagcatgttctccacaagaggagatactcctctttgaatcacacttgcattttgccatttaaacagtgcctctgcagaaggggcagtgaggctctcctctgattggttactttcttctctacccagttattgttaggctctgtaaagaaggtgttgctaggccagtgaatgaaggtaaaagtcagtgcatcaaaaccaggcatggtgtgtgcctatagtcccagctacttgggagggtaaggtgggaggattgcctgagcccaggagttgaggctatgctaggcaaccatagcagggcccctgtcttctaaaaaaaaaacaaaaacaaaggaaacaaaaaacatgagtgctccagttctgtatagcctctctatcaatgagacctgtgatcaagctttcgtaagtcacctgtgaagtaacagaactcaagaagaaaaccatttttttcttagcttattgtcttaattatatgtgaatagagtttatgtgaagcccactagacccacctctattgtactgaaaagcatttacatttttccactcttgcaagcctggtgtaattacaagaatcacttgctgtcagtcacagttctctttgttactcaggaggaaagggctatcttttaatattccagacccactgaattgttttgattaccttgtgcttactgaggaagagtactagttgattctaccgcatacatatcctatttcctgtcattaatatatcttagtgtgacatgaaagggttataaaataaattttattgtagtaaaaaatatataacaaaatttatcattttaacagttgcaagtgtacagttttgtggcatgaagtatattcacattgttgtgtcaccatcaccacccatccatctgtagaacttagtctttcccaacagaaacttcttacacattaaacactaacttcctattctccccttctcctagtacctggcaaacaccattctactttgtgtctctatgaatttgactgctctaaaaacctcatataggaggaatcatagaatttttgtgttttggaaactggcttttcttttagcacgtcttcgaagttcactcatgttatgtagcatgtatcaaaatttccgtaatttttaaggcggaataatatttcattgtatgtgtgtacataccatcgacctaaaaggaagaggctgaagcacaaaataggattcaaagagtttacttgagccaaaatgagaacagttgcctgggagactcagactcaagtatccttggatatgagctccctttggccattgttacaagcaggtttgtgaaggcattaaataaaggggacatggagtgggctgatactaagttgtctgtcaggaattctcactagtttatagaaataactttggttaatgattgactaacattgttgagatgcagggagtagtttatagtgtgtggtgcagcattattaggttattttctagttacttgtggcagtataaagcagtttcaatagataaatatttctcatagctcaaaggagagaagtaggatgtgattgctgtcacattttaatgcctttctgggccagatcatttaaaaggacttgcattcctcagataaaagtttctttcttgatgccgtattttgtttatccgtttgtcagtggaaacttgggttgcttccatcctttggctattatgaataatgctgtgaacatagatgtactgatatctgtttgagtgcctgcttttactttttataggtacatacccagaagtggaattgttagattatatggtaattttatgttttgcttttttgtggggaagcggcacatcattttccacagtggctgtaccattttacattcccaccagcaatgcacaaaggttctagtttctctacatccacgttattttttgttttttgaaaatagccatcttaatgtttatgaagtggtgcctcattatggttttgatttgcatttctttagtgactagtgctgttgtgggtctgtttgtgtgtttattgaccatttgtatgtctttggaaaaatatctatttgagtcttttgcccattttaatattcagttgtttgtttttgttgttaagttgtaggagttttaaaaatatattctagatatcagtctcctgttgtatatatgatttgcaaatattttctctgattctgtggttgcctttttactctgttgatagtgtcctttgatacacacaactgtttaatgagatttaacttacgtttttgttgttgttgttgttgttgttgctggtgcttgcttttggtatcatacccagaaaatatttttttaattactatataatagtacattgtatagtatactataatttaaccaatcaatgtggacttcaattttgagtaaggttttttgatgagattaaataagagaatggttgtggagcttgacatacaaagacttagtaactgctgtgtaaataataatgattacttttattactgcttgttactttctacttctaagtggaagatcatgtagtcagtcataggactatagaacacaccagagattgttctcaaatactctttgtgttttctcagaatgaattatctcttttattttattttttttccaaaaaccccagtgtttaaattatatgggccctgttttggtaaaaggcaaaaggtttgtaagatctgaagagaaaccagagtatgtgggccctgttttggaatgaacttgctgcttataaaatggaaagtcctcaaacactcttccacagaaaagttctgtaagaagacttttataggagaaagtatggctgtaaaagttgccccagcttctttcattttctctgagaaattagctaaccttttaaaaaaaatcttaattaaaatatagctctcacatgctataagattcacccatttaaagtatataatacagtggcttctagaattatatcatggttgtgcaaccatcgccacaatctaagtttagatcatttttgtcaaactaaatgaaatttagtaactattagcagtcacttttcaatccccactccccactgtccctggcaaccactaatctgttttgtttccttagatttttctattctgaacattctatataaatggaatcatgaaatattacagtcttgtgattggcttcttttactttacatgatgctttcaggatttgcctatgttgtagcatatattaatatttcattactttttatagctaaataatattttagtatggggaaatatatatacactgtatcttgtttgtccatttatcaattgatggacatctgggttgtttccactttttggttactatgaataatggtgctatgaacattcatgtatgaatttttctgtgaccatatattctcatttctctagggtatataactgggagtaaaattgccaaatcatatggtaagaatatgtttaattatttgaagaaatgccagactatattctaaagtgactgtaccattttacattcccaccaacaatgtctgagggctccagtttcttcatatcctaaccaactcttgttattgttggttatttttattctagctgtcctgatgggtatcaagtagtatcttattgtgattttcacttacattttcctgatgacagatgatgttgaacatctcttcatgtgattatcatccatttacatacctttttgaaagaaatatatattcaaatcctttgcctgtttttaagttgtctttttattattgacttgtaagagttcttaatatactctaagtgcagatcctttgtcaggtatatgatgtgcatgtatctcctcccattccataggttgtctttttactttcttgctgctatcacttgtagcacagtggttttgaattttgatatcatctagtttatctctttttttcttcacttgagcttttggtatcctatctaaaaaatctttgcctactccaaggtcaaaatcttgtaactgtgtttcctttcaagagtttagtagccttaattcttatacctaggtctgtggtccatttcaggttagttttgtgtatggtgtgaggtggggatccagttttattcttttacatgtggatatttagttgtttgagcaccatttgttgattattctttccctattgaattgccttggtactttactccaaggtttcctcccagattttatcttgttcttggagttcttagaccttccagctaccaccatggttgactctctaaatatttcaaactcagtctgtcaccttctcagctttttgttatttcagtaatagagtgtttgccattgaaattgggaaatattttaatatgtgtctttgttcattttttgcttctataacagaatacttgagactcagtaatttatagtgaacagaaatttatttggttcatggttctggaggctgggaagtccaaggtcaaggagccacgtgtggtgagggccttcctgctgcatcataacatggtgaaaggcatcacatggtatgcacacgtgggcaagtgtgggagaaaacttgctttgataacccactcctgtaataatgaccttcattcattcatgagagcagagccctcatgaccttatcaccttttaaaggtcttacgttttaacactgttgcgttggagattaaatttccaacacatgaactttgggggagacattcaaaccaaagcagaatggttgatggtggtttagggcgttaattatacctgccatttattgagtacttttttgtgcatgctaagcattttttatacattgtaagagaaaataggagagaattcttctctaaagaaatttaatgagatatcttggagagttctaattaagttactattgtaggtgccccagtctcttcttgtttgggatttgaggatactgctatcctgattgctggttctttgcacactctggctgaagttaggcctgcccatgtacacagagtctccagccagacttcttaggagaggccttggcagaaaacacactaactgaattttctttgctagggtcttctctttttcatgattcctaaatgtttggagtgctctgaggctttgtcctcagatatctctttttttttttttaagtgcaacataaactattattattcttcatatattttcttgattctgtgattttgtccacattttacttctgcccttcatgtaacttcatactccccattctctatatttttgaattctacctattctttaatgcccttcctcagtatttgtcacttttctttgaagatgacagtcttgctgctcaaaatcattgttcctcttgacttcttacagtatgttatttgtactactcttatgtcagaaatcgccctctaccttttattataaagttattttctatatatgtatgcttatatatgtgtgtgtgtgtatgtatatattttatatctatctatctatctatctatctatctatctatctatctatctctgtctctgtcacccaggctggagtgcagtggtgcaatctcggctcactgcaacctccacctcctgggttcaagcgattctcctgcctcagcctcctgagtagctgggactacaggcatacaccaccatgcctcaccactttttttgtatttttagtagagatggggtttcaccatgttgatcaggctggttttgaactcctgacctcaaatgatctgcctgcgttggcctcccagagtgctggaattacaggcgtgagccaccgtgcctagtcctattttaatatttttattcaaccagggcctcgctcagccacctaggctggagtccggtggtatatcacggctcactgcagccttgatctccctgggctcaggtgatcctctaacctcagcctcctgagtaactgggactacaggcatgcatcaccatgcccagctaatttttgtattttttgtagagatggggtttcaccatgttgcccaggcttgtctggaactcctggcttcaggtgatcctcccaccttggcctcccaaagtgctgggattacaggcttgagccactgcacccagttgattatgaggaattcggtttctttttttgaaatataaaaaaggcaaaatacaaaactataaattcaaaataatgatatctatattttacttcttgtattagatcataagctgtttgagaaaaggatctatttgtctttgatcttggtaatcctctgtattttaacatttaccagagtgaatgaatgcattttaagaaaatactttcctaaatttttaaaagaatgatgaggatgggagatgacattgactatgattagagggaagttttaaagttgcctgtgtgatatatgcataaggacaggagggaaacgtaggaaaagagaaaatattgttagtgggtttctgttttttttaaagtttatttttgtttttcattactacattaagaaatattaaaataataaaagtttgtgcccttttgtaactgtagttgtctttagactgatgtaatctaggagttgtgaccaactgaaatatagctcttttgacttcggttgtgaaactatagtgttaggaaatctgatcagcctgaagcaagttctaggctccttaatgaaagctgctaagttaaataaggaaaatagttttatgtcagcagatacttatttaattttagcttagcctttggatgtttgattaaaattttaaggcattctttcctatattgttttcttttttcttcatttttaattgatataataactgtgcatatttatggggtacagtgtgatgttttgatctatgtatacattataaaaggatccaatcaagctagttaatacatccagcatctttttttttttttttctagagatagcatcttgccctgtctcccaggctggaatgccctgatgcccaggctgatgggcagtggtgtgatcattagctcactgcagcctcaacctccagggctcaagggcctcaagggatacttttggctcagcctccttggtagccaggactacaggtgcccaccaccatgctcaactaagtttttaaaacgttgttgttgttgtttagatggggtctcactttgtagcccaggctggtatgaaattcctggcttcaagcaatcctccggcctcggcctcccaaagtgctgggattacaaacgtgagccactgcacctagcaacgtatctataatctcaccaacttattatttctttgtggggagaatgttaaaaatacattcttctggaagttttaaaatatatattattattaactgtggtcaccatgcagttcagtagatcacaaaaacttattcctccagtctgactgaaactttgtgccctttgatcaacatttttgctttccccgttcctccttttattcccaccaccagccgctggtaaccaccgctactgattttcttagttgagtattgccagcattctaagaagattccaagtggcagcagttgaagttcctatgagaaattctttcactatcaatgtaatgaaacatagttaaaggttagcacagttgacctcttccttgataagcagtaatataatacagaaagataacattccttaaaagaaaacttcctatgagattttattgtccttagaattgtagagctgacttttcagataaggcccagaggtagtacttaaaaataagtcagtgttaatgcatgcttattatatgccagatatcattctacaagtatgtacacgtatgtataaagtaagtgtatgaactcagttctcacaacaccaccatgaggtagatattgttgcattctccatgctacaaatgaggaaaactcaggcacagagaggataagtaacttgctcaaagtcacagagttaacaaagagtacatccaggaataaacccatatatctggttgcagattatttactctcctcctttccttcttttagtttgtttcttcaagttatacgtacatattggttaaagaatctaatagtttcataaggtttgttatgaaaaataacatttcatttctccctttccacaagtaactatttttagctgctgatttcagtgtttatgtacgtgtctaaataatgtacttgttttactgcctgatttattacttgtagacatgatttattctgctattaaaaatgattatttggctgtcctctcctccacaactaattcccagtcccctcatagttatttcataattttggttagatcagtgtttgatgtttacgttaatttattatgtaaacactatcttcagctgagccatgttgtaaactgtactgttttttctttcctgacactttttcttcaaaggttgtaattaccttttcatttgatgtagtttttaatgcacttatcactagtttacatctttgccagttgtctgaatcatacacatcttttctcagttttaggttcttaaataaatctcttctggagccttttgactaggaccaatccagaccagttgtatggcagtcatgctgggatctttattattttaggggattccttttgcttgtttcctgtgttggacctcctattgcttcatttctttgtttactatcctgccatggtggagccagtaataccctccagcaatttcttgagaaaaaggtcatgggaagtagattttttgtgatctggcatgctgcccaaaaatttttattatgactccacattgactgcatataaaattttaggttagaattttttctcagaactttgattatatgcttcatcaccttttagtttccagtgttgctatttaaaagtctgaagcagttctgattacttacctttgatgtgtgatcatttataccttccaaaaagttgtagattcctgttttttgggcagagtttctacagtttcacagacccttgccattggtctgttttcattagttgtgctgggtacttgatgggtcctttggtcgtagaaacttttgacccctgctggaaacatttcttcattttctgttctcgagtctccttttttcagtttttctgaatttctttggactcttctacgtatcttattctttctctttcattttctatctttgtgccctttgggtcaatttcccacctttattctccagttttctactgaatttttaaaatttctccatatattttaaattcccatgagcttctttatttctgaatttcactcttttataatatactgttattttatagttgtattatcttttcttacttctcttatattaatgatatatatttttaaattttcttctttttacttggtttgtttcctctgagttgctttttcccctattttatgtttaactttttaaaaaaatttatttattttttattttttattttttattatactttaaattctgggatacatgtgcagaatgggcaggtttgttacataggtatacaagtgccatggtggtttgctgcacctatattagagttgtcttcagctgtccaataatccttgactgactgctcctttctaaggatagggtactgaaagctgattggaagctctcaatccatgattagaggttgcctgtgcgatctttacttgaggtaatcaagctaggcagtttaggtagtgtaggaattggaattgtgactacaactccccaaatcgtcatgacttaacgtaatacaagtttgtttctcacttggataaagcccagcgttggtgttcttggtcaactagaacctttcatgtgggcctttttttatcattcttgagaaggggccaaaggaacttctacatctagttagcatggaagattttgcaggaatttttatgagtgaggcttgggtagtatatttttaacaacctgatcatctgggaggaaaaagctctgatttatagcatttgctgatctttatggtataaatacttcatcatgaccaatttcaggctactgacatgatgtcaccaaatgcagaattaggaagagatacacccagtaggctttcatgccagctctggcataccactgtaactactagccacattccactggccagaactgtgttgtatggctccacctaaattcaagggagggtgaaattgtgtgccctggaagtaagggaactagattttagtgaacagctaacagttttctgtcatagttggtatctctattatcattatctttagatctagttagagttcctacagagttatgttccaatctcctgcctagacggtgaagaaggcctgcctctaggtattctgagaactgattagacaggatctggtggtatctgtacatttacctaatccccatgttttcagtgtggtccctgaatttattttatgttactgtaacaaattaccacagacttagtggcttaaaacaacccaaacttatcgttgtacggttctgtaggtaagaagtcagatgtgggttttactggactaaaatcaaggtattggtatagctgcatccctttctggaggctctgggagagaatctatgttcttgtcttttctagctcctagaggccaccctcattccttgctcatggcttccattctccatgttcatagccagcggcatagcagtatatctgtgattctttttctctagtcacatctccctctgaccacagcccaggaaagattctcagattttaaagtgccatgcgatgcaattagctccacctatataatctgggataatatcttcatctcagagtccttaatcacatctgcaaaggcatttgtcatgttaaccacacatatttacaggttccagggattaggatgttgtcattttttggtgggccgtttttctggctaccacagtaccccttgctctccgaagaccctccctttgatctattcctagtaataaaattatgaacttttgttggggatggtagtgggaatttagtgatccttctgcttttcaaacaaactttccatccttattttacagtactctctttatcttcacttccagacatatgtaaaagcaccaattcatgaggtttttgcctagtttgtgacacaaattgagttagttttatgatttccctctcaccaatttaggattaaattttctgagaatactttaacacttatttaaacactttcaagattttgttgttgttgtcttcctttcccattctcctcatccttgtgtgtttatgcctttaccaaaaaagccctttaatattgtcttagctggggtttgggcaggcaacaaaggcagatgtgtgtttaatttaccatcttaattagaacacagcttgcacttttaacttctgtaccatactgccttaactttattgccttttttatgtgtaaggtaacccagattttggataatataaatggttgtggatcctgtcttctagattacaaatttatttattcaatacgcttttattggctactctacatcagccactttgctgagcatttcaaatacaaagctcaggttccggtgttagaattcagactactacaaaggaaatttgagcacattgttataagtgtatgataggaatagaaacaatactaaggaaccatggagaaaaaagggactaattttaattgagagtcaggaaagacttcatagaagtcataatgttctagctgtgtcttagaaagggtgttgctagagaatggagtgtggaagttgttcccagacggaagtgggaaaatgtgaagaaggtgaatggtaagaagttcaatgtggctggagcagatcataaaggggagaagaaagagatgatgaaacttcagggattagtctggcttagattttggagaacgttttatggcatggtagggagtttgtatttaggtcagataaaaactagagatctttaagaaaggaagtaacacggcttgcacatctttggttaaatttatttctaagttttttatttgtttaatttcttgtttgggatgatattgtgaatggattttaaaaagttattattaaaaaaattttttttgaggcagggtcttgctctgtcatccagactggattgtggtggcatgatcttggctcactgtaacctccacctcccaggctcaagcaatcctcctacctcagcctcccaagtagctgggactacagacatgcactaccatgcctgggtaattttttgtagagacagggttttgccatgttgaccaggctggtcttaaacttctagactcaagagatcatcccacctcagcctcccaaagtgttgggattacagacgtgagtcactgaaccaggccaaaattttcttttcttttctttttttttttttttttttgagatggggtctcgctatgttgcccaggctgatcttgaacttctgggctcaagtgatgatccccttcagcctcccaaagtgctgagattataggtgtgagccactgtgcccaactcagaatcattcatatttaagggcgtggttcggttctttaacttactttttataggattccattgtacaattccattccgtaattatccttctgtgactggtggacatttgggtcattttcaacttttcttattacaaacagcgcttttatgaacattcttctgtttgtctcctggtacagaggttaagagattttttttatgtacagtcaactcttgcaagggtctacttacacacagctttttttcagtaagtttattgggaagttttttggagatttttgacaaattgaaaaaacttgccaattgtgtagcctagaaatataaaaaaaaattaaaaactttggagatatgttatcaatgcataaaacacagtagatactagtttattttatcatttactaccataaaatatatacaaatccattgtaaaaagttaaaatgtatcaaaatttatgcaaacacgtagagactggacgtggtgctattctcagtacgtggtgctactctcagtggagagaactgtaaacaaatgtaaagatgcagtattaaattataactgtataaaattaactgtagtttgtactgtactactgtaataattccaacattctgttgctattgtggtaaattcaggtgttttgagaatctgcttaaaatgctgtgtgatgctaatcatctcctggtgagcaatttgtctctctagtaaattgcacatcacagtaaaaagtgctttctcccaattcctgtgtaatttgttatcatgtttgttgtaatatcataaaccttgaataacactatgggagtcatatgaagtgctactagtgatgttggaagtgctcccaagcagcagagaaatatcatgacgctacaagaaaaagttgaattgcttgttatgtaccttagatagaggtctgtggctgtggttgcccagtattcaatgaatccagcaaaaggactattgtaaagaaaataaaattcatggtcaggcacggtggctcatgcctgtaatcccagcactttgggaggccaaggcaggtggatcacttgaggtcaggagttcgagaccagcctggccaatatggcaaaaccccttttctactacaagtacaaaaattatggctgggcgtggtggctcccatctgtaatcctagcactttgggagaccgaggcgggtggatcacctcggtcgagttcaagaccagcctggccaatatggtgaaacctcgtctctactaaaaatacaaaaattagctgggcatggtggtgggcgcctgtaatcccagctacttgggaggctgaggcaggagaatcgcttgaacccaggaggcggaggttgcagtgagcgagatcatgccattgcactccagcctgggcaacagagcaaaaactatctcgaaaaaaaataaaaataaaaatacaaaaattagctgggcatggtggcgggaacctgtaatcccagctactcgggaggctgaggcaggagaattgcttgaaccctggaggtgggttgcagtgagtcaaaattgcaccactgcactccagcctgggcaacagagggagactccatctcaaaaaaaagaaaagaaaaagaaaattcatgaatctgtagctatagctatgccagtgtgtgagaaaactttgcaccttttgcaaaatccctttttacgtcgtattgaaaatccagctcttatgtgggcacaggaatgctataagaaaggcatatctatagaatatgatttgagaaaaaatgaagtcattatatgataacataaagcataaggaaggtaaaggatctaaagctggaaaatttaatgccagcaaaggatggtttgatgcttatagaaagaggtttgagtttaaaaatgtcaagatgacaggagaagccagctgttgctgaccaagaggtagcagacgagttcccaggcaccattaagaaaaccattgcagagaaaagatgtctgcctgaacagatttttaatgcagacgaaagtgccttattctggaaaaagaaaaaaatctaccacaaaagatattttttagtaaggaagaggaacaagcaccaggatttaaagttggaagggataggctaactctactgttttgtgcaaatgcattcaggtttatgatgaggactatctttatctataaagctgctaatccctgagccttgaagggaaaagataaacaccagctgctagtctcttggttctataagaaggagtggatgagaaccccttttctggattgagtccatagatactttgttcctgaagctaggaaattccttgctagtaagtgactgccttttaaagtttttttgatattggacaatccccctggcatcccagaaccccatgagttcaacaccaaaggcattgaagtggtcaccttgcccccagtcacaaagtttgtaattcagcctaaagatcagggtcataaggacctttagggctcattacacttggtatttatggaaaggattttcaacactatgcaagagaatcttaatagaatatcatgcaagtctggaagggtgacatcattaaagatgtcattgttgttatagaaaaagctgtgaaagccatgaggcctgaaacagtgcattcctgctgaagaaaaccgtgtctatatgttgagcatgacttcacaggatttatgacacaaccaatcaaagaaatcatggaagagattgtgaatgtagcaaaaaaggtgggagaatgaagggtttcaagataagggtttcagagaaatctaagagcgcatagcacaacagagtaattagcagaacacattttgatggagatgagtgcttctgaacaatgccagatgataaggaagtagacttagaagaagcagcgccagaaaacaaattgacattagacaatctggcagaagagttccagttattcaagactgctttgacttcttttaatgacatggacccttctgtaatatgatgctaaagctaaagcagacagtggaacaaggattagtactgtatagaaacatttttagagaaatgaaaaagcaaaacggcagacagaaattactgtgtatttccataaagttatatcaagtatgcctgcctctccagcctccccatccactacctccaccttttctgcctttgccatacttaagacaacaaaacaaacacctctcctcgtcctctgcttcttcagcctacttaacatgaagacaaagaggaagcctttttgatgatctgtttccactcagtgaatagtaaatatattttctcttatgattttcttaataacattttcttttctctagcttactttaagaattgttaagagaaaaagtgtagtggagttaacatttttggggagtgaaaacttatgcatagatttccaaatgcatgggggatcagcatccctaactgccacattgttcaagggtcaactgtctatgtaattgccaatgtgcaattgtttttgatcttcaaaaactggtttcatatggtttagattagtatctaggagagaaagtgctggttaataaaactgtttccccaagtgattatatgtttaccctcccactggtgagatgagagtttctttggctctacatcgttgtcaacattttttactatcatatttttatacttttgctgatatggtacatgtggagctatctcattgttttaatttgtatttcacttaattactactgcgatttagtatcttttcatttctttgtggaccattcacatcctttcctgtgaaattggtgttcatgattttggtcagtcttctattgcagtgtttaggaagcttactcttgttttgttttgtttgagatagaatctcactctgtcgccaggctggagtgcagtggcgcgatctcagctcactgtaatctctgcctcctgggttcaagcgattctcctgcttcagcctcccgagtagctgggattacaggcacgtgccaccacacccagctatttttgtatttttagtagagacggggtttcactgtgttggccaggatggtctcgatctcctgaccttgtgatccacccatctcggcctctcagagtgctgggattacaggcatgagccactgtgcccggccaggacgctgactcttactggaatatgaattgcttggtccaggttaataaatgtttattgacccaatccttggctttagatcggcttatataaagatgagtaagatggatggactcttacctcagtctatatttagtaaaggttaaacttaattggaagctccatagttctatttctttcctccattcaaatatagattagctacactatttatatctttacctttctgattcagtttactcatttgtaagataatcagctttgactagttaatatctagtttcccttttaccagtgtatgtaattcatctaatattttttcttgttggtttttgaaacttagaaatgtgttacttttattatagtggtaaatataaataattgggttttttttctttttcatcaaaaaatactgggttttgcttctgtaaggtataatttaagtcacttctccaaggacccctctcttagatggatttcccagacagatattgctacctttgattttaaaaattcttaaaatgctattaaacctatacactccatcctaatatatatgaattattcttcctcagagtgaagatacacaacagcaaatcatcagggagactttccatttggtatctaagagagatgaaaatgtttgtaatttcctagaaggaggattgtaagtaaagcatttcatagacatttctaagttttgactatgtgattaaaatatatactgtttaatcagtttatggtaaaagttttctacttttgattaattggattaggtgaattaattgccacctatgttagctataaatctaacttaaagaattatttttaaaagatatgcaatcttttttcctcttaaaaattttggaagggaattttatataaaggtaatatattaaatcgtaaaaattccaacattacagggaagtataaaatgtaaaataagaatctctcaaccttagtccttctacccaatttcttgtgtatccttctagaaaatagtttgtattgactaacatataaagtatgttatatgtgttgactaacctacaaccttaaaatttttatttatgagatcacactttgtatgctcatttgcatgttgctggttctcagtattttcaaaagctttgcatagaaacacatctaggacaagcttattctttttaatgactacagagtattcctttttgtgaatgttcataaaaattagattacattctttattttactgttacaagactgaagtctgtttttcaaatatacctaattcagctaatcaatttttctatttttaaaatgaataagaatattgccaaatattacaaacaaatacttttaaactaataacttccatgaaaatggtttgttctcaaacataaatcagtcagagaaacttagaattttctgtattttactgtgtatgatggatgagaaatactctggataacagggaatccatggtcataaggtactttttatcatgtggaacacttaacttgggtttcctgaaagattatatcatgctgtccttaaatgtccaatacatacttacaaattttgctgttaactcaaggcttctaatttaataattgagacaagtgtacctgcttctgtttttgaattttacttgtacttatttaattttagttgtctttgacattactatcacttcctctcatcctagcctcttgatttcttatctcctaggaaacttaccacccagcacagtgcactgcatgtaagaacttgattaatcttactagggtgctatttgaattagaaattgtggctggaaattgtgattgttcttttttaaccttacaaaaaatagaaagcaaatattgcagcagagatgaggcctcacatctagtttaatcctagttttgtcactaactagctgatttccttggacaggttacttaaattctcaggcctcagttttctcctctataaaatgagttatttggactaacaggatttctcagtcctgtggttttatatgatgtattacattctgtacaggaatttttgtcagtattatactatagcttaaagataagattatatttttaaaggcaaaatatgtacttgccgcattaatattttgcttgcttttaatagcattactggcctttttgaaacttatattcttcagaagtttgctgtccttttaaagtaaagcaaaagttttaagataatcactaaatcgctgattcagaatggagtaaagcctcctatttgtgttctttttgcctctttcagggaacaattgcagtcatagtctgtaaatatactctcagaatctttaaattgcatgtagatatttttaaattaaacatcttctctagaagagtatctagcatagtaggaaatttttattcttgtcaaagatcatttctccttttgctattagaagacatagaagtagtatataccttgggaagttgtttctacagaacttataagtttagtattatttttactgtgtaagaaatagatgctggccaggcgcagtggctcacgcctgtaatcctagcattttgggaggcctaggcgtgcagatctcctgagctcaggagttcgagaccagcctgggcaacatggtgaaaccccatctctactaaaagtacaaaaatcagccaggtgtggtggtgtgcgcctgtaattgcagctactttggtggctgaggcaggagaattgcttgaagccaggaggcagaggctgcagtgagctgagatagcaccattgcactccagcctgggtgacagagtgaaactctgtctcaaaaagaaagagagagagagagacagagaaagagaggatgaagggagggagggagggaaggaaggaaggaagggagggagggagggagggagggagggagggagagatgccattttcccatattctgttgggatggatgttagtttaattttggttacatatagccttgattgtaaattatgtaagtgtttaggggtcttttaagaaggtgaattcattattgtaaacttaactatgaaatagctaaactatatttagaaaaatatgtttggaatgattcctaaattattatttctaaaatactaaaattccagtcattataaataaaagtatttcatgaaagagtttagtatcttagctcagttttcttgcatttatgtcaaaacaatgtaattttggaagagatcttgacggtaaatctatccaaaacttaagaagtgtcattcttcttttttttctggttgataatcagtcttaagctgtgtaacttactgtgacgtatggagttaaatctagtaagcacttacaaatgccccatgatctaatttccgcctacttctctgactttatcatttactaatcttttcttatctactggccttttttctcttccctgaacatacatactttgttcttgatgaaatgtccttttagtacttactaccttagcctgaaatgctcttctctaaattttttccaagccaactccttatcattagatctcagcttaaatgccactcttgcttaatattcagcctgaagtagggaacccatcaatatatcatcattgtattttgattgtcagtgtaacacttgccactatctgatgatgttctgatgtgtgtgtttgttgcttcttccccactaccagtgcttggcacatagtagttactcagagaatagtttaatgaatgaatgaactgaaattaagcactggcttcttttacttgatgtttctgaagaaaacagccaccttaattcacctagtctctgaataagttcacttaaatactttgccattgaatgtcacctttcatttgacaagtggtttttaaacaaattgtcagtttgcttgagctaatgaaaatgattcgcattttgtttccaataacattacaatttttttgtcatttagattaattggaggatctgacaacaaactgatttatagacattatgcaacgttatattttgtcttctgtgtggattcttcagaaagtgaacttggcattttagatctaattcaagtaagttaacacttgcttcttactatcttaaataacagtttgacatttaaatttttaaaaacttatatattctaaattttctaaaatgatgttagtaagaaataaagcatttcataatagatattgtgttggtaaaagaggtcagaggacatagaaacaagcaaacatttgatctgattaaaactatcataactagtttaatcatgacattttatcttgctcatgtaagttacagcaaggagcttaagactcgtgggtttcttaacacatgtatccaaaactaaccctaaaccctacctctccctgtctcctgaaaatctttcataatgtccctggaactcaaggtcagtcatcagcaaatttctttttatcttcagcctcttctgttaatattactttacattttgctctaaattaaatcttgcttccctgatgatactacgtgcaaccctttgaagtagtggccattttctctcctgcttctttctgcctttgagcctggaggtgtaatcttagcttctcattgcattttccagaccattctttcttctcaaacacctccaaattttatcttatgttatcagactataccaccttctatccatttagttatagtcatcactcatctccatctctccttcattggagattttgttaagaattgtgaagggtctgagatttgctctacttgcaaactaagaagttaacctgccataatttcatggatgctggcagaaggcaggagatttctgggccagagacaaaggaccttattactaatagcaaaaacattagctaaagtgacagcatttgcttgcacgaattctctaattcccaaagggtgatatgaagaggtccagatgatacctgcacacacagtggattaaatgacagatgaggaacgccaagtttagggaactggaatcttttataatggatactaagcatgtctgcccttgtttggaaggaagactgtctcttccaagagtgtaaggaaacctatcctttgctgtggaagaagacactgtctattttccagggctgtttgatatacaagcatgcttaaaaagatagcccagaacaaagacagtcaatgcctctgctcacaatacgtgtggaaacacaagatccatctaaaattgtctcctaatagattttggttcttggttccctggcattcattccagtactgcttgttttgtaattcttggtgattccattgttcatatgtataattctcccaatatcctggtgtcttcaaaatctggaactcctctcttccaataaattttgccctccactccatctcactatgtacccatttctagattttatctttgtctaaactgtaacccctccataatctcaatttcacagttttgaagtcgttagacctattgcaaccctcagttttaaaaatccatcatttttttcactctgattttactgatgtcttactttccttatccagcttaaatttcataatcatggtagtgatatagccttgtgtacactgaactccttgcccacacccatacatctgaacatacctagaggaaaaaaaaaagtaaccatatttaccagtctcactttaaattaatgatcccttagctcattgagtcctttatgctacgcaagaatcattttctgtttccccggtccatttactctcccatacctctagatgactactcatacagtctcctctctcctaaaatatctagcacttctagcaccttgcttcccagtgcacagataaaattggcttttgaagttagcaagaaggtggcatggtttgagctctagttggcgttacagaatagacaagaaattaacccaagcagacaacttaggtaacaaattcttagcactgtggctaaggctttaaaaataaaaacattgtggccaggtgtggtagttcacacctgtaatcctagcactttggaaggctaagctgagcagatcacttgagcccaggagttcgagaccagcctgggcaaccccatctctacaaaaattagacaggcatgctgttctgcacctgtcgtcccaatcacttgggaggctgaggcgggagccagggaggatggcttgtagtgagctgagattgtgccactcactccagcccaggtaacagagtgagaccctgtctcaaaaaaaatagaaataaaaacattgttaataaaataaaaaaggagataaatgataaattgatctatttgtatgccatattactcttaaatctgtaattcttaaactgggtttttgggaggagctgggtatcaaagttacatgaaaccacaaggtaatcatggcacatattcctggtatatgtttcttctttgttttgaagattggcggcagtgaggaaatgaacgtaaacatgtatatattatgaggtagaatacaaatttttcataatatttaaagctctaagtggagacttgaaagaaattttgagcttgaggtaaaggtgccccaagatcccttgggtatatgttcactttcctcctggggcctacttgagaaacactgctgagttatgttttgctttctcaaggcttttctagtaaagaaaaagaagccaaatcttacttttgatgacattgaagggttgatcaggactatatattgcattgccttgtaactttgtttattcttacatttcttagtttatcccacctaggggagtagttaattcattttatcattatgtcaagagagcattatatttttacagaaaaaaaattaatatagaaccatgctttctatttctctgtttcccatgactgaagagagtggtagacatgcacactatgttccaaaacactgtttttatttacctgagcctagccactagaattacaggaagaaaaacaggagaaagtgtaccatttcaaatttagtctcttattgaagagaaatgttgctattaagaaagaccaaaacaaatgtgtcttttcctagaggtaaatcagaagtattttatgcttgcgtcctgagattaagtcatcaccattgattattattttgatgctgttgttgatcttcttatgagaaagtagttctatctccaaaggggattagatggggagttttcaaagaacaaacatggtattaatatatcatatccaaagtaaattctgtcatgtactcgtggaaagtagaaactatcttttgtgttttgcaaaattttttatccatgcttcacacgttgatcacttgttttgatattagataacatacagaagaaaggatttcaggaggactttgtcattttccgattactaaagtaggctagagctgtttttacaatacccctgagttaccacatgctgatgtattgtgtcacaaaaaagaagatttctgtaattcaccttataggtactatgtctgtcactatcaggaacatgttggaagttctgtggttgtgatctttccccttcaattaccacagttcattaaatactgaagagggagtgtactgagcacacatgagtcagtcactttaaaaaacatcagttgaataaacaaagatggaagtgcatagcttattatttctgcttctgtttcatcaaatagctattcagagagaactgattttcttaatttgttcatcctctagtttttagaaaggcaattttaatgtaaaaagtaaaagtggaaaattataaaccaagagagtttacatcaaaacctcttggtcttgcatattcttttagagaacagatcaagaaaactcaatatgtaactattaaacctatgcttataattttgatattttaaatatcaaagtgataccattcatataactggaagcatatattttaatgcagagagttagtgtctctaaggtatgcatatgttgtcccaaatatgactttgtatctgtataaaatctgggagaaggcattattaataaattcgttatggaatttacaccgctattccaccagtactgaatttacattggtagtccacagaatttacaccagctacccaaacgaatgatcagtttttgttttcttttgtttctttttaaaaattccttgtaagtttggaaaaaaggggtggacttttttttattgatatataccattttagtgtgatattaactgctatgtatgccatatatgctagagttaatagctagctttttaaggagtcctttctgttgtagcatattgttattggaagtgttaaaatatttacaggatgagaatagaagtttattaaatattaatgttgggttgagttatttataagcagttgtattgtccttaattagtttattatgccaagctgataatggaggcatataaattcactggataattccaaatctctgttacagttttctgtaccacatgtaacagtaatcagagcatcagtcttattcagttgtagctagattaaaaaaacaacaaaattgagaactaacagctaaactttctttaggtttagaaagatacgttctgaccatgttgttagaatgtatatttaaactggagctccatatataatatttgttattat

SEQ ID NO: 898 - DNA, 21206 bp, Homo sapiens
  source 1..21206: mol_type = other DNA
attggttgttcccttttcggctctgcaacaccgcctagaccgaccggatacacgggtagggcttccgctttacccgtctccctcctggcgcttgtcctcctctcccagtcggcaccacagcggtggctgccgggcgtggtgtcggtgggtcggttggtttttgtctcaccgttggtgtccgtgccgttcagttgcccgccatggctgagctggatccgttcggcgcccctgccggcgcccctggcggtcccgcgctggggaacggagtggccggcgccggcgaagaagacccggctgcggccttcttggcgcagcaagagagcgagattgcgggcatcgagaacgacgaggccttcgccatcctggacggcggcgcccccgggccccagccgcacggcgagccgccggggggtccgggtgagagtgcgggcgcgtttggggcgagaggacttgtctggaaactcggtccacagtgggtccgagagcttctgtgtgactcgtgctccttgctgaattaggaggttagggagcagtgcaaacaggaaacgagaccctggcccggtctttcagaaacctaggctcgagaagcctgttcggttctcagcatgtttgagtgcttctgggcgcgggcggagcgagaaagcaagtgtagggtggcaggctccggagccggaagaagcccgttcaattcagcaacttttcattaagcatttgctgtgcctttagtccggtctctgaagcaaccgcattggcgcagtttttccagacttataagcttataagtctgagccgagcacagaactcgttattagaaaaggagggcggaaaaaaataagaatggaaatatcgtttttgagagatacaaacaaaagtagcaatgcagttcagcatttaagcacttaaggtgtacagagtgttggattacgaggaggaaggagggagtagggaactcgaaagatgatctaggtctggagaaagaactgccaagcgcggtaggagtttgctatcgttgagcgattgatttacagctaggacttctggagctcttcctctgggaacagctttggtaggcaatattgcctaagcagaacccaagattagcctaaaccaatcagggagggatgaagaggtgaatagagaatgttctcagccaaactcaagtaaaaatggggcaggtaggatggcagtttgacctttggatgccttaacctgtgtgtgatgcttaggatcatgagtggaaaagacctacttaataatacaaagaagtaggaaatttagctagaagaaatgaaatacggcttttcattcacttaaaaaattccaactaagggagaatagggcactactggggcatataggagtagtgtctaccctaaattcaaaccttaaggagccaggtaggtaacatatacgagagaagctggcttgacatgagacagtagaagtgttggagactgaggctttgctgcactatagtagtgctctgtgtaaaggcattcagatccagcagtctcaagttactgtgccagccaggcggaaccttttgatggatgggttggtgggtgtgctgctagtttgcagcctcttgagtttttgactgcaccatgttgcttcctaaacaaatcagtcccccaataagaacttagtgggaacatgtaatatgcccgaatatgcaactttatagcgggtaggttggactaaactaggctgtgattgtgagatgaagttggccttaagtgattaggggatattttcattgggtggtctctaacatttgtctgagaattttaaaattgacttcttagacccttagtttaaccttcctcatttaatagaagagaagcaatcctagagagaaacgacttgcttaaaaaagcacgagttaatagctgagccccaagtctacccactcttagaatataccacattctgttgcagtgtttagttgttttagcaggggtgtagtgcgataacagacaggcagctgtggctgtcccaggtggaacagatttgggagaagcagaacccaagatctgtagttggaagattgtcctgattcaaggacagtgttacccttactgttttatctccactgcctagcagtgtgtctgacatgtagtagatgctcacgtttgacaaagaaatgggcaaaaatgtcagatccaagggtcctatgtagaactgacagatcttggtgacgggcagttagggaaggtaaaagggagagaatagagttggatgctcggtcctttgtgcatcaagccttcggcaaagggaaggaaagaaatggttgctgacttagttcctaggagggactttcttagtgaactaagcatttggtgacttaaagccagattcctgacagtgtaattgaagttggtaatatgcagtggtcagcatttcctttggagtttagagaactgattggacactttttctctcttagttttctttttccttctttttttttttttttaaagatatgctctagtggttaagattctatgctatcctaaactgcttgagtgtgagtttagctttgtgatctcagacaatgtatataactaccaccactgcccggcctcagttttctcctttgtaaaagttgcataatataatttataatgctatgtggcatctttaggattacattaaagagtgtctataaagtgcttacagttatattaagtatctagtgaattccagctactattagtgggagaaaggagttacaaggcctttaggctttgaagtgtactgagtaaattgaggttttaggcgggagctctctttctgatgtattatacagagatatataggcagtcagctatgacagattgatgagaggaaaataaactggccccagccttgcggaaagcgtctatggaggatgggcacaggcaaaaaccagaggggttagggctaagccttggatgactcctttggttgttaagagatccagaaaagagacgtaggtttagaggcaggaagaaaccagctgggtgaagtgatattgaggtaaccagctgtgggggatattgaggaagaacaggtggtcatgaaggaggcagcacaagtggagctgttgaaaagctctcaatcatgagggctgagtcggggaagagaacaggagagacaagccacagagagagtacagcagtaaggcactattatggtgttttgttgtttttgagacagtcgctctgtcacccaggctggagtgcagtggtgcgatctcggttcactgcaacctccgcctcctgggttcaagcagttatcctgcctcagcctcccgagtagctgggattacaggcgcccaccaccgtgcccagctaactttttgtatttttagtagagacggggtttcaccatgttggccagactggtctgaaactcctgacctcaggtgagccacccgccttggcctcccaaagtgctggaattacaggtgtgaaccaccgcacccggtgacaagttatttcttgtaggagaagaaagagacatgggtgaattaaagggaagctttctggagaagtaattttattggtagcagtggtggagggaagtttagggaaatctcatgcatgatagttaattgtactgcacatttgctgtataccaggtacactttcagatcccagcagtagctccacaggttaagtggtagtgtcatatttcagatgagaatggatcggtgtggaagttgagcagtgtcactaaggtagcaaggtaataaatggctcaagtgcagcttcaaacgtaggtctgcttgacttcaaatgtttctggaatgtggaaagttgaaagtgggtttgggacagtctttcacttttgaaaactggccctttttctgtctggagttcctgaaaggccctagaaagtttccttctgaagcatcgtgttgcttagtttagttgttgtagtaagtcaaggccctacatgtcctttctgcatgtttccacagcaacagacgatcccttggcttgagccagttgattcttgtaagaatgttagtgcagtaatacagtaactaataaagaggaaagcagatgccagtgggtctggaggagccttcagacagcatgtgatttttaaggagatgtgggatgaggattgcttcttgttttgtatatggagtagtgatcaaagtctctcatattccagcccagggctggactatattagtggatagttggtatgtcaattgtactatattaaccataatgtaggcctggccagactagccactgtaggatctaggatttaaaactatctcactcttctgtcttacacaaaaataaattccaggtggattaaagagagacatttaaaaagtaaaagaagaaaagtgagtatttgtctatctcataataggaaaggccttcagcataaaagcagatacagaaatcatgaagaaaaagtcgatcatgtctacatacacaaattaagttgttccaagtgttaaataccataaaccaaatcaaaagagaaactagggaaaatatttgactattagagagcaaatacttagagatcaaaaaatagcaggaaaataggcaaactcagaaaattcagtaaagaagaaaatcaggtgtcgggtatgtgattacctcactggaaataagattggcacaacaaagccaccatgagtttgttttttttttccattatcaaattagcaaaaattttaaaacatgatcaagcacagtccctagtatcagggaaggtctaagaaatggggcacttgtgctgctagtagtaatataaactggtagactaataggaacaagtgggtagaattttagaagtctttgaaatacatatcctgggccaggtgcggtggctcacgcctgaaatcccagcactttcggaggctgaagtgggcggatcacctgaggtcaggagtttgagaccagcctgaccaacatagtgaaacctcgtctctactaaaaaatacaaaaattagccgggcatggtggcacgtgcctgtaatcccagctattcgggaggctgaggcaggagaatcacttgaacctgggaggcggaggttgcagcaagccgagatcgcgccagtgtactctagcctggccaacagcgtgagactccgtctcaaaaaaaataaaaaaatacatatcctggctgggcgcagtggctcatgcctgtaatcccagcactttgggaggctgaggtgggtggatcgtctgaggtcaggagttcgagaccatcctggccaacgtggtgaaacccccgtctctactaaaactacaaaaaaaattaggtgggcatgatagctcacgcctgtagtcccagctactcaggaggctgaggcaagagaatcacttgaacaacccaggaggtggaggttgcagtgagccaagattgcaccactgtactctagcctgggcaacagagcaagactctctctcaaaaaaaaataaaatacatatcctgtgatccagcaattccttttttttctttcttttttctttttttttttttttattttttgagatggagtctcgctccgtcacccaggctggagtgcagtggcgcgatcttggctcactgcaacctctgcctcccgagttcaagcaattctcctctttcagcctcctgagtagctgggattacaggctcatgccaccaccctggctaatttttgtatttttagtatatggaggtgggtttcaccatgttggccaggcaggtcttgaactcctgacctcgagtgatcctcccaccttggcctctcaaagtgctgggattataggtgtgagccaccgcgcccagctgtaacccagcaattctacaccaagaaatttattacagaggcgaaattgaatatgcttcccccatgctttcactagtttgataaacttcatatttccaaaactttatagagtgcttaaaaaactacataggtaggtggcacatgccttaaagtggtaaaaggccactgacaaactataagaaactcatttttgtactgacatataggagtaaaagtcaactaggaaaattaagaaaaatatgagaggccaggcatggtggctcatgcctgtaatccaatactttgggagaccgaggcgggtggatcgcttgagtccaggaaatcgatagcagcctgggcagcatggcgaaacccccttcctacaaaaaaatagaaaaattatccaggcgtggtggcgcatgcctgcaatcccagctcctgtggggactgaggtgggaggttcgcttgagcccaaaaggtcgaggctacagtaagccatgattgggccactttgctccagcctgggcgacagagcaagactgtctcaaagatgaagctgcaggtctctgctcactatgggtgattccaggccacacttttttttttccctcatgcagaattttcatagagaaacactgttctctttctgctagtcttccatttgttaccactgtaaaatagaaaacagaaaataaaatcaaaagcttttggacttgggagcttaaggacagatgtgtacacattttggtgaaatttgtatataagcacatcttggttttatttgttgtatatagcacctaccacagggatagcatttagtagctcaaggttcatacagcatatgatgctgtattctactgtacaaccctttggcccagtgtttgaccagtccttattgatagaccaaaatcttatgtcttgcagatgctgttgatggagtaatgaatggtgaatactaccaggtacagagtactctgattctgttcattgatagtgattgagaatcttcctttcctgtgattttaattgactgacctagaaagaaaccccagtcctttgactttcctgaatgtattactggctggtgtgttatctaccaaagtggaaagatttaaagagaggtagcattgataaaaagagaactgtttaaaaatgttatttacctgcccctagtgttatcacctttattctaaagaaatcaccattcaaatgatactgtgttgagtgcagtaagttaatactaatactttaaataattctccttccatctttgtttatagtctgattaggttaacctggtaatattaatattccttagttcagtgagtggcatatggaataattttgtaaagattaacatttatttgagtctttttttttttttttttttttgagacagtctcactgtcgcccaggctagagtgcagtggcacgatcttgtctcattgcaacctccaccttctgggttcaagcgattcatccacttcagcctcctgagtagctggaattacaggcgcatgccaccacgcccggctaattttttgtatttttagtagagatggggtttcgccatgttggccaggcaggtcttgaactcctgggctcaagtgaccatcccgccttggcctcccaaagtgctgggattacaggcgtgagccaccgcaccccgccagagccaccgcaaccttggctcactgcagaacccgtttctaacaacaatggcggcttttgtaaaatgttaaaggattaccttaaaagcaacaacacaggccgggcacggtggctcacgcctgtaattccagcactttgggaggctggggtgggtggatcatttgaggtcaagagttcgagaccagcctggccaacacagtgaaacccgtctctgctaaaaatacaaaaattaaccaggcggtagtggcatgtgcctgtaatcccagctactggggaggctgaggcaagaggagaatttgcttgaacccggggagtagaggttgcagttggccaagattgcgccactgcactccagtctgggtgacagagtaagaccctgtcccgtccccccttcccccaccccagaaaaaaaaaaaaaaaaaagcaaccacataggccaggcgcaggcacctgtaatctcagctactcgggaggctgaggcaggagaattgcttgaacccgggaggtggaggttgcagtgagccgagatcgtgccactgcactccagccttggcgacaagagtgaaaactctgtctcaaaaaaaaaaaaaaaaaacagaaccaggggttctaactcaggtgaagtgcattttaggaaggaatttttggtattaatatagcacaattgtgttttgtgttaaggaaagtaatggtccaacagacagttatgcagctatttcacaagtggatcgattgcagtcagagcctgaaagtatccgtaaatggagagaagaacaaatggaacgcttggaagcccttggtaaggaatcccttctgtgttttggtgtctgttttcagtggagtagttgagctggactctacttttattcctttttagctcacattaaccagtgtcattgtctggtctttgggaagatatcttctcagcctgaaggttacaaggctacctgcacagagatgcctaatcacaggccattgtgtgaggagtagggtagccggagatccccaagatcctctcacaggaagagcatagtgatgctgctcctgacctcaagagtagcctcaggtggtgtttatagagtgctttataaacttgaaggattcaagtttcctatgtccgtggactttaacagtccatttttcttttttcttttttctttttttttttttgagatgaagtctcactctgttacccagggtggagtgcagtggtgcgatctcggctcattgcaagctctgcctcccgggttcacaccattctcctgccctcagcctcctgagtagctgggtctacaggcgcccgccactacgtcccgctcattttttttttgtatttttagtagagacagggtttcaccgtgttagccaggttggtctcgatctcctgaccttgtgatccacacaccttggcctcctaaaatgctgggattacaggcgtgagccaccgcgcccggcctccattttttatttgaaggctaaatgaatttaaagtaacacgaggaaaatgaggtatgttaggaaaaaatgtacaatttgtttttcctaccttaatatctctgtaaggtaagttttacaattttacaggtaagaaaagtggaggagaggtagaataagtatttggaatactcagctaaggaatggtaagagtcacaatttcagctgaagtctgccttgcttcaaagtcactacccatccccatcagccacattgctttctaaacatttaatgtgcgtggccatctagccacacagcctggcctttgataaagagatgtgtacgtggagtgtcacctgttggttcatgatcaggggagacttgtgtctgtacatggtggattggagaagtatgcagagtgtgaggatataatccacattgtggccttttctttgttttttctttttctttttttaatcagctgactttaagattcatcttttctcaactttacagaacaattgaaaggaggaaaataaacatgtgcacccccagattcagtaattaatggattatctttatataaatgatatgttttagacatacacacacacaaattgttttggctgacctactttaagataaagacatcatatactttgtgtctaaatatttcaatgtacacctcctagaaataatgacattctcctatgtaaccacaacgtcagcagtattattccctcttgggaactgttgaactagtgaaaacatgagtccttatttttcagatgggataactgacacccagaaataggaagggacatgacccagatgacacagccaattagtgccaaatcatttatctctctagtccaatttaggtggctttcagaacaaagaatgcacttagtatttgaacctttatagcaccattcattagtgatttctttggtggaaatattctgtatctgtgctgtctcgtatggtagccactaaccacatgtaactgttaagtacttgaagtgtggcttcacaattcaagtgtgactgagaaactgaattttaaattttctttaattttaataaatttacattgaagtagccacatgtagctagtagctaccatattggacagtggagctgtaggaagatgaaaataggtcctaacagctttggtccttgcttgttctttgtgtctcttgagtatgcttagaggcaagatttagctggtcttagtactgctgtagtatttttcatgttacagaacccaaatttatcttttctgttttaccaagctctagcagtttttcttctccatggagagagtctactttggtgtctggaaagatttaatttttcaattatgaaattgggtacttggggaatactcttatgagctgttttcttaattcaaagtgctttttttgagagaagtacaacatttggccttgcattccaactgaattgaattcacttggttcatgaacaaggtgttccttcaatttcaccttttttccttgcaaaaactgtgagaaagcacgcgatgctaaaaatagagaaccggtgccagtggttttcagcctagctgctggctacattctcaagtaattttcttttctctgaccagtaacgagggtggccagaagggaaggcacctgtgaatgtgctttgctctctaaggggactcttcctcttcatcctctgaggggaagaattctaaattagtattgcagtggcactaaagctgcaaaagccagaagaccaatttaaatgtactattttatgcagtaaccacagtctgttcaggaggtcaccatttttatttaatttcatttttcagagataaattttatattttagtcctaatgtatagtaaatgttaacatcaaaatacattgaaagaaaatactgtccaatcaaaaaggtaattatttggaagtaatttcaccatgattgaaaagggggccttacattttgaattaggtattgtcacatggcacttccagcccacagcttctcattgcagcatagctaaatcttgcattccacatctgtacttcatgccatggatagacacatattagatgtttactgtagaggctaggtggtgtggctcaggtctgtaatcccagcactttaggaggctgaggtgggaggatcacttgagctcaggagttcaagaccagcctgggcaccatagtgagaccctatctctactaaaaaaaaaaaattagctgggggttgtggtgcacgcttgtggtcccagctgcttaggagattgaggtgggaggatcacttgagcctgggagattgaggctgcagtgagctgtgatagaactactgcagtacagcctgggctacagagcgagaccctatctcaaataaaacaaaaaaaagtttactgtatatactttagagtcatcagtgaaaaatctgagaaaatgattcttctgaacgacagatcaccttccgacaaattagataccgagatgaacgttcctactaacctgaaacttgggggagtttctagctgctattaggctttttcttatagttacacacagccttttgcaggttgttactataagacctttcttgcaaaggccctaaaaatgcccaagaatacttcatttttcatcccttctagtagttacttgacaccgctactgctatctactctccttctcaaagacactaattacagtttgggctcttggtctgcactttcaaaactctgtccagatcactggtggtcacgttttgtgattatttctaggcttgcctccctttctgtccctccctttggaggaagcataatgaggtaagcaaagtgtaagctttacagccagatctgggtttgaatcttggctctgtcacttactataacctttaggaaattcactcaaactttctgagctttagtttttctcactgctgaaaatgtgatcagagtttaccttcttgggattgttgtaaagattgagttagatgtctataaaacacctgccagacagaagaacttgtttaaagtgaagtatcaggttaacttcaagtgtcagctgcctcagtagctatgacatgtatttcttttttttttttttcttttttgagacagagtctcactttgttgcctaggctggagtgcagtggtgcgatctcagctcactgcaacctctgcctcccagattcaagcgattctcctgcctcagcctccccagtaatccccagtagctgggattataggcatgcaccaccacatccagctaattttttgtatttttagtagagacgggattttaccatgttggccaggctggtctcgaactcctaacctcagatgatccacctgcctcggcctcccaaagtgttgggattacaggcgtgagccaccacaagcagccggcatgtatttctttatctctcactatctactgatgtatgtctcttcagcttagtgtcttagagaaaaccatatttagtcctcagaaacttcatgtttcatgtttgagaatccaatctagcaaacctgctaggtatgcattttcttgctgtcatttctagaacctttaggttaactgttagcaatgatcccatacctctaccccctgcacttctctccagtggagtttcttttgtagctctgccctggctctgccacaaacacactgcagaccaagtaggagtagatgctttgtggtcctctctagtgctaatattctgtgttctatcattctctggttcctgaatcatctctacctttggtaattgtcctaatagcaccctgcctcacagaagtgcttctaccatatttagttatgagagtgccaccttgtgttccacaaaaccattgtcaaacctggaatatggactagtttgggagaagaggtaaaagattaagatgaataccctactatgaactaatattggcagcattggtaaagaatcatctataattgtttctcccccaattggtgcccagaaggcttttttcctattaataatagaagtcagtatttccacatacacccttctcttttgctctgcccaaaacaagacaaaacaaaactaatgacccactaagatgtcagtggactgggataagaccaggaataggactgtgggaaagaccaggcaggaatagaagcactgaaatcagagttggttgtgcaaacagagaaaacagaagtttatcttcccctctctactcttctcccccaacaggcacacagacatggacctgcacccaccacaagttcagcaagaccaaaataaactgatgaacttcagtttgcactttgcctcaattgtattgtctttctcttctctcccttcaaagatgccaattctcggaagcaagaagcagagtggaaagaaaaggcaataaaggagctagaagaatggtatgcaagacaggacgagcagctacagaaaacaaaagcaaacaacaggtcagtccgtggtggttgtagcacactttgttttccaaaattgaatcaaatccattctcagcatccagtctcggtttttggcttctgcctcctttagtgtgaaatgtctgcagtttttaaagaaagtgcttgaaacaggttgcaagtctctcgggtcttgtgagcataattcaccctattgtttagccatcccaattgtagtgagcttagctctctgagagtttggttaatatgcataacctgtaatggtgtgattcagccaagggaaaagttactttccatggaaccctgaaacgaaagctgggtgtcatgaatacacccagatctagttactttggatatgattatagacttggtcatgttgagtctcctcaatatagccctgccccctgaaagccacttcatgaaggggtccgttggcaggaatatgtgctttgtaattaggcagccaaggatgttccaacatgattattttagaattgagggttctgtgggtacttatttgtgccttaaaaagtcttgaattgacttcttaaaaatgttctgtttgaaatagattttatttagttactgatggttaaggagttgtgaggagaaaaacgctttcattctcatatcactactcaccagcagctgggctttaatgccctacacttagagcccttcttggaagcagcaaagagaggatatgtggtgttgcttccctcagggcaggcaggttcagagcccaactttcactgaatagtcaatccattcacttcagtgtataaacgggccagaccgagcctggggatatttttaattttcagggtagagccttgggttctcgtatgcagaggcaggaagcaggttgggttaagtgcccttgtctctggcagctctgttagacagagatgtggcaggagagagagctaacggctttgccagccagccagtgctattgtgggtccagtatgacagagcagttggactctcttttatatgctagcagcccttcagctcattggattccggcttgagcctgtgtcctggtcactttcctctgggggcggtgtgctcaaggagtgcctgtcaggttccatgtggagtccacaggactccacagtcccagtcccacaggactgctctctggtgtgcaggctgggttgccagtggtgatggcttccatcagctacgtggggctgttgttgagcctgtggtcagtaggtggtgctgacaggtccaggctcctgtgtcctctgctccctcaagatgattttctcccaggtggaagttcagatcggtaaagccgagtggggactgtgtgcaagcaccctgcgagccctgagaactcccccagcctgcgaccccagcatttaagtttagtctgaagtactgtagctgtgccgaccctccccgctctgggtctgtgatgcgtcaataacttaacacaagttttcaaacttagataatgaatatgttggtaacagcctttctgttgcagaaatttttttcaaggaagttttgctgaactgtcaagaaagggatattctctgtatacagaatccgttgttctcagagggagtaatgacacctgttttttttttttttttttttttgagatggagtcttgctctgttgcccaggctggagtgcggtggtgcgatctcggctcactgcaagctccacctcctggattcacgccattctcctgcctcagcctcccgagtagctgggactacaggtgcccgccaccatgcccagctaatttttttctgtttttagtagaaacaaggtttcactgtgttagccaggatggtctcgatctcctgacctcgtgatctgccttccttggcctcccaaagtgctgggattacaggcgtgagccaccgcgcctggccatgacacctgtttttaggagctcagtcttaaaagtttagtccctccaggcattgaatttgggccttggtacctttctgtacttggaactgtagaatgctgggtaagctggtctcacagatgaacctcttaagttccagagagaaggaacttccccactgctcactgagaatgtagagctgcttaggaagcaggtcacttgccttgtgggaaccttgcagcacagggctgactcttgagagcataacgctagtggcacactagccattgtcaccagggctctaggacagaagagatggtttttacagtttattccagtgattcttcactggttggaggtgggatccatttgagagtcactttgggggacttcttccaagggtctacaccctcccctggagatttttatattgctgactactccccctctccatccatgtttgactctaaactttagagttcaaaggaataggtcccatttagatgtataaagtaattcatccttgttatctgtctatgggtaaagagtgaatatttttagaaaagaaaatgggggccggacaccgtgactcaacatctgtaattccagcacattgggaggctgaggcgggcagatcacttgaggtcaggagtttgagaccagcctgcccaacatggtgaaaccccatctctactaaaaatgcgaaaattaactgggtgtggtggtgtgtgcctgtaatcccagcaactcgggagtctgaggcaggagaatcactagaacccgggaggcagaggttgcagtgagctgagattgcgccactgcactccagcctgggcaacagagcgagactcagtctgaaaaaaagaaaagaaaaaagaaaacggggtgctcatttcaagcaagtatgattctctctgggtgacttctgcagtagctagatgttaaggggacccgagagataaggcagaaagatgagaagtttgaaagaggaaagtcggagacaggaagggcatccagttaattgtgagagcatcctcaggcctcctgccttccagctgcctcaccactgggtcaccaaagcactaggagcacgtcgcgcctggcactgcactgggggtgggtgtgctgtactctattgtcagtccccagactgcatctcccttcttttatcccaagttgaggcctaagtgtcacagtacaagagctgtgaattattcagtgacagccatggaaaagaatttccttttcatagccagccagccagagcagtgactgactcctgcagctggatgagtttgctcatcaagaacaaccccagaacatttcccctattacaggtagcacttgtgcttgtcagctctttcaaggcttgagaaggtttggggaacccacagttctcagagatggcaaacatttttttctgtgcccactttgaggctgtttatggaatgaagttctgcattgtattcgtgcctccagagcttgtcctaggtcaggtattcctcttccctcccctctcctaagcctccctgagccccttcctgccttggctgaggattgctactttcaagtgaaggacaaataaggggagggccacctgtgtgtgtgtctgattttctgtttgttctgggcctgcaaccttgacaggggatgtgcttgtcactgaggagctctttggtcttgggctagctgcaaaggagcaagagcctgacattcaaacttttgttgtcttagtgatgatttgacaggagtcatgaaacctctactcttcttgtggagggaaacccaagttgaaatcgatcaggtttagtcctttgtgtaaactaaaagggttatgggtttataagccagcctgccttgccttttcctcccactcattctgcccacaaacaactctgttttcctgctgagtcactttaagttataatcagcctgctctttttgctttctttaaatttccacaaaacacctcctgtgtataaaacaaaatgggaaagaaggaagggcatgtgtgagcttaaaaattaacttaaaattactagaatttgccttcaaataagtatgtgaggttagcttaatgaccaggcatgattatccttgaaaaatgtctttccccttgcccaccccaaatcgacttgacaaaggacagggtaagactccatgagggaggttccatgtccagccacagtggagaagagtgggctggcagagcccagggagtcagtccaggacaacagagtcaaagccagcctggcccctgctgtcaaaatttatccacccagtctgccccctccttcctgtctgagagccctgccatgttgagagttaagaagggatgaagttctggattctgggctgcaccttatcaaagccaattgagtctggtgtaaaaatattcagaaactgtacccgcttcttgagtagagagagagccatattcaggaacaacagaagccagggccaggatcctagtccagtgttcttcccaccagaccactcacctccagccgttttttcctgtaaggttgagattttaaaatgacgatatgtgttcccaggattctggaagtgtatcccacccagacagtgtggggaagcagtagttagataatccaagataaaactggctttgggtcctagcgcatctggtgtctggcagcattcctgcccagtgcattaactgaaacaggaaggtggcgtggctttctgggcacatacagcagggaagaagcatgactatacagtagaaagagccctggacttagggccaggctgccttggttgtgagtcctgaatgctgccactgtggtgtagctgagcaagttgttcatctctaagcctcagttacctcatctgtacagtgggggtgagaacagtcagggtcataggttgttaacagttaaggattgaatcaacataatgtatgtgaaagggcttagtccatgattgggtgcttaataaatgcccgtgttgctggggtgagccaaagggatgaagttggcagtgcttgctctgtcgtggagcagtccccacgtgggaaggccagcgggaaaccaggcctgctgaagtctccagcgctggaagcctcacgggggttaggaaggagccttgggagcagctcctcagagcacagttgtacctcaattgtggattttagatgtttctgcttctcaatgttctctcttttttcctgcctgcttgcctgccttttggacctcttgctgtctagggtggcagatgaagctttctacaaacaacccttcgctgacgtgattggttatgtgtatgttgcaaaactaattcctttttctacatctgattctttctacttttgtttagagttaatgctccttttatgtcacaagttgctttgctttttaaattatttcaaattggcactttgggggctgcctaagaattgataagcggggtatgatctgttgatgaatcttccagatttgtgactccctgcatcctctgatggccatttttcatatttggggttttggagggaagaaagctaactcgctttcaaaatgtgtcatttgcgatcttatctgggaacggtttgaggctcgggggaactctgctctcttgctcttggctgccatcactgctgccatgccctgttgcctgcctgcctcaggtgggaaggaggtttccccacctgggagcaggtggcagtcccaggaggttaggagccagtgagcagcagcaccttgcattgccaaaatcagagctgtggggcagcattttccatacttggttcattcaaacaatgtggggtcgtttgcctctccctcaggcagaagagtccagagcagagggggttgtctccagtgggtgtctataattgttcctctgtggtcttgcatgtcagaaattgctatttagtggtcagcttctgatgtcctgtctcctagcacagggaagcccccagctttgagatcaggatagtcaaagtgtcttgatacgggccacttgggcttctccccctgacccccccaaaagaaacctgcatcttctctggagaaggtgtttttcttattcttttttttttctttttttcttttttcttttttttaaggatttcttttatcaaagcagtattgctgaagagttggaaacagttctcattgtctcctccttaaaaattagggctggctttacatgagaagtaagggtggaatggaagaggagaggaacctgtggaaggtgggcgatgagctcaggtctgtagagcctctcagggcctatgaccttgagatgttcatccccttagaagatagaactgggtttcctgggcccccagatgcatttgcagtgagacttgtgaaatgctggacttacaggtggtgtttgatttgatttctgcacattctctctggagtagaaatggagactggaaaggtcgagtctggttttgctgggcagctgggtggccagcaaagccagctgcacgtccccaagcacagatagagtggcaagggcatgtccagcttactgaccatctgcattgagctcattctcattttctatatctgacttaaagtttctctcgtttcttttcttctcttcacctttaagcacaaacataaaccatccttgctacagcctagaacagttaagtaaacctttctcactgcccctaactgtgtgtgccatgaagtcgcagtgttgtagtggctctgggcttcagcggtgtttgccacggccatccctgtgatagtgccacccctccgtccccacagaccagtcatctccattgcttttgctttgcccgtgatgcttgttggagtagatgaatatagtgtgtcttagcgctgtcctttccggctgtagctcccaccagttaattccgaactgggggtgggctgaccttgatgtgaaagaatgttggagcagcatcctgccaaaaagcaactcacgttggctctcctgccagtgtgccctgagtggccccaaggcacctggctggagggaaaatggcaaacttttggctgaactggagaatgtcctaacaaacccccttccagaatggctttagtctctagtgcttgctagcatgggagctttgtcttgaattccttttgatctgccccgtttctctccagccttaggaataaatctagaggctattgtgcaatgatctgtgggctttttagaagtctctaaatttccttgaaattcagtacagcccagcataaactactcaagttcttgatcagcctgctgctttgttcttattaataaaagcagtgtgtagctggctaaggacttgttttattaatgctccacaggagcagagacagacagagagacatagtgagccttgaaccaaacacctgtattccaacattttacacagcggtctgggcaccctgtgcctaggagagccagctacgtgtctacctgagtctgacctgggccaggggctgttatcttgggaaagccagaatgtcattaagaaagggacaaataggcagttgcttgtgtagcaaggcagccaccaggttgctcaaagggggttctgcataaaccaacatattttgttgttgcttccagggcagcagaagaagcctttgtaaatgacattgacgagtcgtccccaggcactgagtgggaacgggtggcccggctgtgtgactttaaccccaagtctagcaagcaggccaaagatgtctcccgcatgcgctcagtcctcatctccctcaagcaggccccgctggtgcactgaagagccaccctgtggaaacactacatctgcaatatcttaatcctactcagtgaagctcttcacagtcattggattaattatgttgagttcttttggaccaaacctttttgtctttagagttgttcattgtttgtgattgcatgtttccttccttcaactgtgttctccctggcattcagagaggagggagaggaggaagaggaaggggagggaagcttcccaagagtagcctcaacctgtgcttctgtgcattattctgagaataaatttctgtttcaaactgtatta

SEQ ID NO: 899 - DNA, 32744 bp, Homo sapiens
  source 1..32744: mol_type = other DNA
gactggcgaaagtgatgagtctaaaaaagtagtccctccggttcctctgtttccccccatgtggcgtcaggaagcgaggcaccgggcgcactgcgccccgaattcctgcgcccgccgcgcgcggcgctccgtggaggggtacataaggcggagggggtgaggcgactgggcggagttctgtcgccgggatccttccgctgggctcagccgtttccggagtctgcgctgcgcccggttccgccattgcggctctcctggcccctggagcctccgcccccgacccgagctctttcgtctgcctgccagtttcctgcgtccccggagaggatcctgctgagcccagcctcccccctccccttctcctcctctcccttggagagcccgggcagccactgccccgcagccccagtgacaggaggagaccataacccccgacagcgccatggcccagattctgccaattcgttttcaggagcatctccaggtgcggccgggcccgggctggtgagggctgtggagaaggtggtaggaaggatggaagacgctggagtctgggcccgagcagtatcggagctggaggggcgggggggttgtcggtgattggggtaggtggaggagggggcactatcttggaaagcttaaaatattaaatgatgtggggcttggatggaaaggacaggagttggggtgcaaagagctgcaaggaccaggcctggatccaaaggcctctcgatcttgcttcctggatggccagaactgcgcgtacaaactctctccccattttattcatttcattcatttgggtaggggagtgggagggggattctcccttgtttctaccagagcaaggattcttatcccctgggccagtgcggggctgtcaccttccattgctctcctctttccctcatcgtgtctgcacccaggagttgtggggcgggtgggttggggaggagcaaccttttttttccctccctctgcggctctcaactgagaaaggcaccttctccggtggtgggggttgggggtggtggtgaggcggtggcttttctcttgccttccctgaggcagtagggacagaaggtcactgaaagaacggaacgagggtagaatgggagaacgcatttcttagagctatgtcaatctcagagtgtgtgcggtcaaactccctaaggaaactcgcctccccttccccctttttttatttctctggggatgttgtggctcttaacccctctttggttctggaaggtaggaaagagtgatacagaggttatcttttagtcttctcgagtagtagcaggtagttttgaatatcttcttcaggatcgcatggaattgaacagagccctggggacagcacagctgctctgagacctgcagggctatttggtctgtgactggcttccctttagtaagttctagagttcttccccatggttccttatcctggaggcaacatattgttatctggcaacatgccagtggcgggcctaggcaggtgaccattggaaggcttcactgaattaaacctcttcagagcttttgattttcctgtgtcaccaatcctgttttttactgtagcttaaataatttattcctattaatttgctttcttcccaaatatccccttaaagaaacctgcctcagctcagtcgtctgaagggctaattccataatgacagggaatgcagtggtttgacatgacactgatatcagtgacctattagacactttaccattgaagaccatttttatttacatttccccattggcatagcatacataaaggattcttgttaataaaaggttttaacattcaggctataagtaacataatttcatatttctttgcaagtattaccatgtttgcactagcaaggacttattttcctttaaggcttgaaatgtaaagaataataaatttttacccataaaatgagttaaataatgcactttcctcagtcatctataattttcaaataactcatctgaagtaatggaatataccttggcaataaaaacacttttacagagggttaaaaatgttaaataacaaaatggacatttttttttgatcaatccaagtttagttgctgtggttgcttttgttaaagtggggtggcaaatgaatgtggagagttgaggggtgctgttcttaagtgtgaggggaaaacgcgggcttattttcatattaaactgcatctgaaatatctttctgcagacaaatgtttataaaccacacagagaatcaagtacagctgctctttattttccacggcagatgtgtagctcactactaaatcttgtggtggttggagtaatagcttttcatttcttttaaagaggagacaagaattgttaaatgatcccaaagattcgaacccaaccttgtcacttattaaagacaaatttaatacatgtctgttttgtaactggatcaaagtttctgcagatgcttgaatgaagccattttcttctcaaataatttgaagattttgaatataaagcgatttgcaaattgaaaaattcagtcctctgtgttttggattgctatgtcatgcctaaacttaagcttgcttagctaatatgactgtgctccagttgattaattgtggagcccaaataactacagcctctttcatgataatatatctcctaacttcatatcattatctcctccctttttaaaaattaataagcattttgtttttttgaggagacagggtttttgctggaggtcagtggcaccatcacagctcactgcagccttgacctactgggctcaagccatcctcccacctcagcatcctgagtagctgggactacagccatgagccaccacacctggctaatttttgtattttttgtagagatggagtttcatgttgcccaggctagtctcgaatgcctgggctcaagcaatcctttgccttgacctcccaaagtgctgggataataggtgtgaaccaccgagcccaactaataaggattattttaattggcatctttggtctttgacctctgagcttctaccagtttgctaagtagcagaaaactttctgaaacacgtaggataaaaactggaaacaagaaatggggaacttaagtgtgagtgtagagttaccttgtgaaactgtaaatgaacttatttttataccctttaactacattgtccaactgaaggatctcttgtcatcaaagcttggacctacagcaaatgaatgtgaatatatgaagatttctcttttcctagactgtttagactgatagcagttaataaatgagtgcctatttgagcaagatactgttggaattgaagattctataaaaatcctaggctacatatataaaatattgcctgtgattcttaattttttggtgattttcaattttctggcacattaagtatctttaggccacttgacacattccattgtattcctagattctttgggtcttcaattaaaaatctccctaccctgttctttcccctttgatccatagatgcaggcatggaatgtgttgttgagtcaaatgttaggggttcttgctatagttagttcggattgtgaatagaaagcaatgctaagtactgggatttactacatgcttagttgtactctctggaagaggtagacttcctggaattatgcggcagtctcctgggaatagcttctaagtttaaaatgtatcatattcttcagaattttcttgatggtcagtttacccagcttaaagtgtgtggttaattttagtgaaagtgctttcactctgattaggaaataagacacagaatggtgtgtatgtagaacacaatcattttcatttgagtatttaggaaaattcacatttcaggaaccatggtagttgctcttgaacaattgtttctgaccataattggaatttgtaccttgcttttaaaagattccatttatatcgaatcctcagcttctttgcaaaattgttttttccatacatatgtttatatgttattcaaattatatttaacaaggtgttttccctgtcattgttaccgttgtggctttttctctttgagttattgtccagtagaactttcttcaatgatggaactgtctaccagctacatagggatattgagcacttgaaatgtggctgatgtgactgaaaaactaaatttttgctttaatttctttttaatttaaatgtaaatagccacatgtgacaattgactcctacattggactgcacaattataggccatgctgatgtgttttgtaagtttgaagatttatctcaccactcatgtttatgtatttagaatatttcgttagctaaaattaaaacactcattgttcaaaagttttaactgaatactgtctgtcttggaaagtggtggtgatgaacaatgactagcagcagacttcttgagaccttattatgtgctgtaaatttggctaggtactttcagatcttcactcaatccccccagacacctttctaaaaagtgagactcataaagtagtgggaatgctgtccgaatgggatgtgtacctgagtcttctgacacaaaatatttcaaagaaattggataattgaccttaaaaaaagaagttatacagtatcctagagtgctttttgtctgttggacttaggcccagagaggtgagttctctctacttgtttatagattaacaatgtggtatagtagacagaacagggagggctttaggggttgttgaaacaaatgctgtccaatagaaaaataatatgagccacatactttttttttttttttttttttttttgagacagagtctcactctgtcctctgtcacctagactagtgtgcagtggtgcgatctcggctcacagcaacctccacctgccaggttcaagtgattctcctgcctcagcctcccaagtagctgggattttaggtgtctgccaccatgcctggctaatttttccatttttagtagagatggggttttaccatgttggccaggctggtcttcaactcctgacttcaaatgatctgcccacctcgacctcccaaagtgctgggattataggcatgagctgctgctcctggcctcatataaataattttttaagttttctagcagccatattaaaagtgaaaaaacataaaattaattaattttgggtttttttggtagagacagagtcttgctatattgctcaggctggtctcaaattattgggctcaagtgatctgctcgccttggcctcccaaagtgctgggattacaggcgtgagtcaccatgccatgcccagataaaattaaatttaatatattttatttaacttgggatatgcaaaatattatttcaatatgtaatcagtataaaatttactaatgagataccttacattctttttcatactaaattttctaaatctagtgtgtgtggtttttttttctttttttttgagacaaagtctcactctgtcgccaggctggagtgcaatggtggatctcggctcattgcaacctccgccttccaggttcaagtgattcttctgcctctgcctcccgagtcgctgggactacaggcgcgtgctaccacgcccagctattttttttttatttttattttttggtatttttagtaaagatggggtttcaccatgttggtcaggatggtctcaatctcttgacctcgtgaaatgcctgcctcggcctcccgaagtgttaggattacaggtgtgagccaccgtgcccggctatgtatattttgtacttagagcatatatcaattcagaccctattttctttggaaatcctggtccgtatttagagttcataaaatttacagttagaaaggcagatttggggctgggggtagtggctcatgcctgtaaactcagcactttgtgagccaaggtaggagcattgtttgagcccaggaattcaagaccagcctgggtaacagagttaagacctcgtctctatattaaacaaacaaaaatgaagaaaaaggaaagcagatatgcaatacttcagtgatcccaaacatacttaagttttccagtaattgaatcacttactggttattatttaattttaattactttaaaattacggtaaccacatttcaagtgctcattatggtatgtaggttgtgacttgtggttaccatattggacaacacaggttaagtctaacctcttgcttttttttctctgggaaatgggcatacttatctcacaaagttattatgaggatctgagatcatgtatgtgaaagtactttacgtagcattttaggagcattaattattggctaaataatttttgtccagtacattttattcaggtatctcaaccaatgacacaatattcatttacagatccagtgttttatggtgtataagtatttggggttaacacatttacctaagatttgagtacttactgcagatgaggaactgtgttagactctagggacaaggtggtaaacaagatggactacaccttgcattcatgcttccattgatgagttggcaaaggctgtacacttgttattccaaccattgatgttgtctacttgattgtggatcttttatgtgttcgaacatttgatattgtgcacagtttaatacaaatattgatatgatacaaagttgattacactctgaaactgccccccaaaaagaaacttttaaataaatcttttattatgttccacgagtctcattgtgtgccactggtacattttaaattagggttccttgaacagacatatttgaaaaaaaaacttaatgaatcatatcggataaaatacccatatggaatgccggtcaggcgattgttagagttattgtatgtgttgtatgtgtccttttttagggtggtagtgttgaagtgaatcttctcacttagatgagcagtaggttcatggctgatattttagtcctgtatattagaatgaggctgtttctctaagttcatgcactatatgccatgccaaaactacttcatgaaataaacctgtcttctgagccacagcaaagtttacagctctgggtgtcttgtctttgcttcttggttaagtgcctatggctaatgctcttaactcaaaagatggctgaaagcttggacctaaatgtgttatgcaaaacccatctgtcagacttttgtgagtctcttcttttgtattatctccttaaattaagacataatttaagatatttttgtcctactttttttggggggtggggacagggtctcactctgttgcccaggctggagtgcagtggcatgatcaaggctcactgcagccttgacctccctgggcttaggtaatcctcccacctctgctccctaaatagctgggactacaggcgtgcgccaccaaacccggctaatttttgtattttttttgtagagtcggggttttgccatgtttcccaggatggtctcaaaatcccgggctcaagcagtccacctgccacagcctcccaaagtgctgaaattacaagtgtgagacaccaagccttgtcctatttttgaggcagtaactattcaaatcttaattgtcctgtaatctaatccataaaatcaaaatacatgggccattatagttgtttgagcacctattacgtgccaagaactgtattaaatatttaatgtttattatctcatttaattagcaagagaacccttgtgcttaggtcagattagccttattgtagagattgggcaactgaagttcatagtaggtaacttttagagtcacacagctagtgagcagtcagacttttaatatttattctttcatttggctcattgcctcatttggtaaatggtctgtatcatttgaattgcaaaatgtaccacaattgtttatatctatgctgtgatgttctttgattctagtagtactgtcgtttgtttatcgtgaaatattttttatattatgagaaaagtaggagacagcaaactaacatctgactttatgccttgaatgattatttagctgtatcttttttaaggactttatcctgtttcctattggaaaattgtgcaggatgattgggatccggttaacttgtaaccaggattgtctgcatccctctcataagactgaacttgtcacacttttctatagactttttcttactgaaaagaatgagtgtgttccagtctgaagccacttgtgaaaggaggaaacttctgctttctattttactgtaaattcatgtttttgtgtttatgccaagaaatagaagcttgaactcaacgaaggcagttgtgcatgaaagggataggaaatgaaggtgacaatggaatatatttgctcattttgagtagcatcatggtagaaaggaaaatggttacagacttgtagggttgtgctttggaggcagactgccagtactgttaatacttcttgttcctaatccttaggtaaataaggattttcttcaagttctgaagtaagacggttttaaagattattgctgaaagaataggaaccagatccattaaagccatattttgtcacattaaaaaactctgcagtgtgctattctggaaaatgtctcagatgtttaatctgggcttatctattgattatgtcaggttttcaacttgtctcaacttcctcatttattaaaacaatatttcctggcaattttaaagttagactacagtatgtttttgtatttgtagtataatatttagccccttaaccccttacaggcactcgaatattagttcttcccctccaccctggaagagtttccctttgtccacttgagttgaatatatgtgccgtactaaaggagaaaaactaccatctacccagttattgaagccaagatcttgaagttacaccagactctctaatttctcattttctgcatccgtcgatttctggagttcctcagtgatgcacactgggggtctcagggatgacagtttttcatgaccctaggttgaaactgggagtcatagaagacgaaaaaacgagaattggattgggagttgactctgttgcccaggctggagtacggtggtgcaatcttggttcactgcaacttccgcctcccaggttcaagcaattctcctgcctcagcctcctgagtagctgggactacaggggcccgccaccaggcctggcgaattttttttgtatttttagtagagatggggtttcaccatgttggccaggctggtctcaaactcctgacctcaaataatctaccctcctcagcttcccaaagtgctgggattacaggcgtgagccatcgtgcctggccaacttgcatttatttctgattagctgctcatctgagaaaggtggcttaaaaaaaaccaccaaagtggacagactgaagctaaagactgtcagtatatatgctctgcttggcaaacagctgactttggatagatctcattatttaaagatgaataataagggggaaaaacgtgtagagagaacatggtttacaaaaacccatctctttctccagtctctgcaatattctatatttggtcatattgaactatgaaaatctaaggcaggtttctttattttaccacagatatcctcaggaaagagtctccttattaaaagccttactgaatctccatagtattgtgtcctctcacagttgcttctgttctgagcaccagaatgctgtttggcaaaggctgctgtaggcttgaaatcaactggattagtgagagacaaattttacacatctaaaattctcctgtgtatggcctcacagttggaactgttggatgttataagcagatgatttaaatatcccgtgaaaagcagtccattcgggcatgtttctagagatcataattttttttttttttttttttgagatggagtcttgctctgtcgcccaggctggagtacagtggcatgatcttggctcactgcaacttctgcctcccgggttcaagcggttcttctgcctaagcctcccaagtagctgggattacaggtgcccgccaccatgcctggctgatttttgtaattttagtacagatgggatttcaccatgttgtccaggttggtgttgaactcctgaccttgtgatccgcctgctttggcctcccaaagtgctgggattacaggcatgagccaccacacccagcctagagatcataatttacatagaaagataagagaaaaacaactctcctgataacgcaaatagatttgatgttacaaaactgcaccattatgattgctctgtaatggatttttgaaaagcattgtgaaatggagatgactttccagtgctgatgtcaaaaatgcatatgcagagtttaaatataattttgtgtgttttgttttttgagacagggtcttgctctgtctcaagtggagtacagtggcgagatcatggcttaccacagcctcaacttcccaggctccagccatcctctcacctcagcctcccaagtagctaggactacaggcgtgtgccaccacacccagccaatttttgtatttttttgtagaaatgggctttggccatgttgcccaggctggcctcgaactcctgagcccaagcaatctgcctgcctcggcctcccaaagtgctgggattacaggcaggagccactgtgcctggcctaattttataattttaaatgtctgtaaagtaagcaaaatgactagttgaattgtacattaaatatatctaatccctaagagtttataatgaaaagggatcaaaactttttcaattgcgataaaactcacataacaaaattaaccattttaaagtgaacaatttagtggtatttagtgcattcacagtgtcgtgcagccaacacctgtatctagttccaagacattttcatctccccaaaaggagaccccatacacgtgaagcagtccctctcccatccccctcctcccatccgctagcaactgctaatttgctttttgtctctatggatttacctgttctggatatttcacataaatggaattatacaataaaggaccgtttgtttctaacttctttcactaagcatccatgttatagcatatatcagacttcattcctttatgactgaataatactttgctgaatggatatatcagtgttttatttgtcctttcatcagttggtggacatttgggttctttctaccttttggctattgtgactagtggtgttgcaaacattcatgtacaagtttttgtttgaatgcctgttgtcagttcttctagatatatacttagaagtggaattgctgggtcatatggtaatttctctgtttcaactttttgagagaccacgaaaccgttttccacagtggtggcaccatttgacatgcccactagaaatatatgagagttccattttcttcacatcttctgacagctttttggggtgttgggatgattcgtctaattgggaaaataagtaccttatttgggcctatatggtatttttaattctgtgtgtctgctcccaaactctgtagccctgccctcccttatattgtgtatcctgtttcagattgtttccgtttcttctgagacactgcatatacccctacatgtatctgtgctaggcatacatccctgtaacttcatggcatttttgtaattgctgtgtacctgttacgtatactgagtgggagtgtctcatttgctgtagaactctctgcattagtgtagtgtctggcacacagtagctgctcaggcattttttaagtatatgattattgggaaaactacagagctagggagagatctgaagaaatactagaaatttttttctgcaaagaaaactttagaaaattgttgacatcatctgtggcatgcagcaaaagttgatgtaaaaggaacagaaagacctatggagataatgggatgtaataacagaaaacatacataaacaattggttctgaaatcagttaagagcagaactggaattcatactctgtggaatgaatcagcaatgtggaaggagtaacaagattttttaaaaagattttgaatttaggctgggtgcagtggctcacgcctgtaaccccatcactttgggaggccagagtaggtggattgcttcaacccaggcattcgagactagcctggacagcatggcaaaaccctatctctacaaaaaataaaaaattagccaggtgtggtggcatgcgcctgtagtcccatctacttgggaggctgaggtggatggatcacctgagcctgggaagtggaggttgcagtaggctgaagtcatgccactgcactcaaacctggcggacagagtgagaccctatctcaaaaaaaaaaaaaaaagattttagtttagaagtaaatcccagaattaagtaaaagtggtgtgtgtgtgtttgtgtgtgtgacagaataggttacaaatttaagaattttagaaaccgggctgggtgtggtggctcacgcctgtaatcccagcactttgggagggtgaggcgggcggatcacgaggtcaggagatcgagaccatcctggctaacacggtgaaaccccgtctctactaaaaatacaaaaaattagctgggcgcggtggcgggtgcctgtagtcccagctactcgggaggctgaggcagcagaatggcgtgaacccaggaggcggagcttgcagtgagccaagatagctccactgcactccagcctgggcgaaagagcaagaatccatctcaaaaaaaaaaaaaaaagatttttagaaaccaaaataattggaatggaagctcttttcaatgaaagaaaacttttgtaatttgaaagaaccaaaattaaaagggcttagtgtttggaacaggcctgaagaagttgtaataccatgaatttaaaaaaacaaaacaaactcgggaggccaaggcacaagaattgcttgaacccaggagccggaggttgcagtgagccgagattgcgccactgcatgccagcctatgcgacagagcgagactctgtctcaaaaacaaacaaaaaaatccctaaaactataagcatctagggcacatcctcttcctgaccaaaaaaatcaaagtaatactagttttttaaccctgaattttagatagtgaagcagtgtctatagtttttgagatggaaagtgtcttcacttgtttttagaagacatgaatcacaatttgaacccccaaagagcctctgagagcctaaaacctgttttttctcctataggttgtttcctcactagtaatgacaaagttataatcttagcacaaaataagcaaaggggacagtttcacacaaaaattgtacttaaaatattgagtttgtgttaagttgctaaataatggatgctcaatatgtattaattgaaagcaaatcatggtggttgtcattttaatcattttaatgtcattttaatcattttaatgtcattttgaactccctgaatttgttaatattaaatcattttgagataatctgtaactcctcatgctgattgttagttaattcattcactcatttgaaaacagtatttgtggcatttaagctcacaggaaaacactccaggctgggtgcagtggctcactcctgtaatcccaatactttgggaggccaaggtgggtggatcacttgagatcaggagtttgagaccagcctggccaacatggtgaaaccccgtctctactgaaaaaatacaaaaattagctgggcgtggtggtgcatgcctgtagtcccagctactcaggaggttgaggcaggagaatggcttgaacccgggaggcagaggttgtggtgagctgagatcatgccattgcactccagcctgggcgacagagcgagactccatctcaaaaaaagaaaaaaaaatactctagtgactcaattgtaaaataaaatggttctagtcttataacttgtagcacctggtagactgagtatgccttaaatgattgatctaactagaataatgtgggatagagcataatgtctaatttcctggcaggtccctcagtatagggtagaaagataacatgaatatgtacaatagtgatggggttgacagaatgtaacactaggctcccacttaaatgtacattttgtgaagtcgctgggaagttgtgtcatagaatgaagtttatcaaggatctttataacttgaatattaaggagactgtccagatgttttattcatatcaggaaaccaagcctttaatgtctccctggttacattcatttataacatcctttatgctaagtcagcaataagtattatatatattttttgagatggggtcttgctctgtcacccaggctgaagtgcaggggtgcagtcacagcttgttgcagcctctgcctcctggactcaaacaatcttcccacctcagcctgccaactagctagaactacaggtgcacaccaccacgcctggacagtttttttattttttgtagggacagggtctcgccatgttgcccaggctggtcttgaacacctgggctcgagaggtcctcccaccttggcctgcaaaagtgctgggattacaggcatgagccactatgcctggccttgaaccctcaaagtaagcccatttggtaggtttggatatattctgcacaacttctcacccctgccattgaatgtagctgtggttgttttgtgctgctgaattgcatttatacggggggcataatcttggtaagtcatatccatctccaagatttggggcataaaaactcctgtatttccctgcagcttggttaacattggcctaattgatctgatatcatctaattattggcttattttttaagaatgcattaaatataaagtttttgaaaatttccaatcagcagttgattacaagtaggaaaaattctttgagtctcctggtagtttaccaaagctaataatagtctgacaacctctctccaactgtggttgcttcctgaatatattgcttaaatttggagtttgtgaccagaatcaaaaattctaagagccagtgattctctcaaaggctaacatggagtagaaaaaaactatatgtttaaatgtggggacagcaagggttaaaggcatttttatttgttgcttgaaatctgtggagcctacagaaaacagtggttggtatcctgttgatggaagaactaaaggaatgctgcattctcagcatttcttatttcctgtagaatacagcaactgcagtttttatttgacattctgctagtttccaggaagggctcaatgaagtgactgctgtcagcatcttttttcaccgcgactgatactagagaaggtagaggatgtttaggagcttttaaaggaaattatgtttagtgaaatacttgggttaggaagttaaccaaatctttaagtactgacttaaaaatgcttgtattgagagatgaatggtatcagaatgacatacaagtatcagcaggtctctcagattgttgacctattaactctacagtggtaacacttctaaagtccttggtaagatacaagattcatttgcagaaaatagctccatctgaaaaacagtagctcatacatacttcctttacattttccctattcagatgaaacaaggaggatctggaaaatgtgaagccaagcaataattgtgaaacataagtccttagtaatgctgtcataaaccagttttcatgtagtttgattttcagctgataaagctggtaaatgagttatactacaaatctatgattcattaggaagcaaactccttaggtatacttacagagaagccaatttccaatgagtttattcttaactaatcagatgtgagaactgctggttgaaattagtaggctcaaagcaaacctattactcctttaattatgtggcgtctgtaggcacaaacagatagattatgaatgattgctgagagtgtgccttggtgctaatggagagttgtctttagatagtttaagaattgggccttgaaaaaattatggttttatttggttgtatgtcttaagctagcattttctgcccttcttaaggtatatagtattgaattaaatatattaataggaccatggcctctttggtcctcttaacaatattttcatagtttgatcactaatatattctgttaagatgctcatacaacaccattaagtttcctgattccttgatgtatcagggtttccccattctgtctttaggagcatgtgaacaaagcgaattggcccaggtaaggtttgagtatataacagtagcatgatgctaaaaccagtctgtttaagaacaatctatatcggccaggcgtggtggctcatgcctgtaatcccagcactttgggaggccgaggcaggcagacacctgaggtcgggagttcgagaccagcctgagctactccggaggctgaggcaggagaatggcttgaacccgggaggtggaggttgctgtgagccgagatcgtgccattgcactccagcctgggcaacaagagcgaaactacgtctcaaaaaaaaaaaaaacagtctatatcataataccatagtcccagaactagaagttcatcaaataatggagtgctctgtgctcccacactaagtgcttgatgtgtgttaaatcaccttaacctttcatggagcacctaggcatgctgctttgctccctctcaagtaaggatggatactttttttccctttccattttccatatttacaatcaaatggagtatatttttaaaaccaagacaggaaaaacaaagtttaaaccattaaaaactgatgagcattcaacgtagatttctgagtctcattgctgatgtgttttttatttttattttttatttttttggagacagagtcttgctctgtcgcccaggctggagtgcggtggcgcgatctcagctcactgcaacctctgcttcccttgttgcccaggctggtcttgaaccgaactcctggcctcaagctatcctcccatctcaacctccaaagcactgggattacaggtgtgaaccaccatacccagtcttgtatttgcttgtatttgtttcttttgcttaaacattttaaataaagtcaggctatcatattttacctgtaaacacttcagcttgcatctttagaaaataaggacattttctttctttttctttttgagatggagtttcactcttgttgcccaggctggagtgcaatggcacgatcttggctcactgcagcctctgcctcccgggttcaagcgattctcctgcctcagtctcccgagtagctgggattacaggtgcccaccaccatgcccggctaattctttttttttttttttttttttgtatttttagtagagatggggttttgccatgttggccaggctggtcttgaactcttgacctcaggtaatccacccaccttagcctcccaaagtgctggaattacaggaatgagccaccgtacctggccaggacattttcttataatcataatattatttatagctccctgatatttaagaacaatatcagaaaaccagtccatattcatattttcctcattgtccctaaatgttgtttggtttaaatcagaatccaagaaagctcatactgctttcagttatgtctctgaagtttcttttcttttttttgagacggagtcttgctctgtcgcccaggctggagtgcagtggcacaatctcggctcactgcaagctccgcctcctgggttcacgccattctcctgcctcagcctcccgagtagctgggactacaggtgcccgtcaccacacctggctaattttttgtatttttagtagagacggggtttcactgtgttagccaggatagtctcaatctcctgacctcatgatccgcccgcctcggcctcccaaagtgctgggattacaggcatgagccaccgtgcccagcctgaagtttcttaaaaaaaaaaaaaaaattttttttttagccgggtacagtgactcatgcctgtaatcccagcactttgggaggctgaggtgggaggatcccttaagcccaggagttggagaccagactgggaaacaaagtgctgcctatctctacaaaaaaaaaaaaaaaaaattagctgggcatggtggcgtatgggtggtaccatctatttggaaggctaatctattatcagtagttaaaagaaattcacacccagagtttcagccaacctatggacagctgaattaagcagcccaggaggttgaagctgcagtgacccatgattgtgccactgaattccaccctgggccacagagcaagaccctgtatgagaaaaaaaagaattggaagtcctaaagtgtaatttccttttctcctcacttccccaacaaaaacaaactttaaaaaaaaaaaggcatttcatagtgtctgaggcagttaagcacccagagaccactaatctagtatcagtagttgaaagaaattcacacccagagtttcagccaacctatggacagctgaattaagcagataataaaatgcaaatgcaaaaaagctaaccttgagctggcttaaagtactgatatgttgtatgtattaatagttaatatcagtgagctctgggttgcttgatcccaggagtttaaggatacagtgagctgtgatcacatcactgcactccagcttgggtgacagagcaagaccctatctcttgcactccagcttgggtgacagagcaagaccctgtctcttaaaaaaaaacagaaggcaatatctgttgagctgttagatgtcaggcattgttctttgcattcacattaaatcttcacacctctgagatagatactgtcatctcaaatgtttcatatgagaaaacataaacacagcctgtgttctctagatcagtggtccacaacctttttggcggcaccagggaccagttttgtggaagaaaatttttccaccggttgggggtgggagtgggggtgggatggtctcagatgaaattgtttcacctcagatcacaaggcattcgttagattctcataaggagtgagcaacctagatccctcgcttgcacagttcacaatagggttcgcgtgcctatgagaatctaatgccgtggctgaaatgacaggaggtagagctcaggcggtgatgactgctcattggctgctcaccttcttctgtgtggcccagttgctaacggaatactggtctgcggcctgtggttcgggatccctgctctagattatggggaagccgaagtactattttctcattataaaaacagaatcctaccttttactccccacctccccctgttaatagaagttggaatggagaaggaaggagatgcattttaaaatcatttgtaacatgtaactccagggtacttcagagttttaaagaataaatagggaataaatttgtttaattgcctttttagatccaggtttaggtgtcaagtcctaaagtagtgccacttgcagaccaaaatcgaatctggaaaccaaatgagttacaaagtttgggtgcttttctgtaaaaacaaggaagcagtttatttgtatacttttgtgtcttgtgccattctgttggaaaagggcggaggaaatacatactttcatatgctacaggataactctgaaatgcaaaagtatctctaattgcttaggggagaagggtattactggaaagacggggtgggtgacttttcatagtataaccttttgtaagattttagtgctttactgtatgcacgtgataactattcaaaaaaacaagcccctttttttggacccagtttattgactccatattcttataacagcaaaataaaaattcttttaagttaaaaaaaactttatcataggaatttccaagcatatgttaaaataggatatctccagcttcaacactaatggcattttgcagattgagaggataataaaatgtagctgtagtttggatacatgtatccagatatattacatgtatttcagatatgtcctctgaaaatacctgcaagtttatagagaatgttgtatatgtcctttgactttatccatgcttagttccatagtgtataattcagtttatggctgggtacagtggttcatacctgtaatcccaacactgggaggtcgagctgggaggattacttgagcccaggagttcgagaccagcctgggtaacatagggagaacctgtctcttaaaaaaaaaaaaaaattagccaggcatggtggcgcctgtagtctcaggtactgaggaggctgaggtaggaagatcacttgagcctgggaggtcgaggctgcagtggtaccactgcactccagcctgggcaacagggcaagaccctgtctcaataaataaagaataaaaatacaattcagtttctgtggtatagcttatatgccatcacacctttataactgactgagaatactttatggttactatgtgctgttttgaaaataaaacctgtttaaaaatatgttgcattttaaaagttttaatctatattgatattactagacatagttatatagtttggccaccctgttacatgctcctactgtaagggtatacctaaaccagacttgcagttaataagagtgacttgtcctattattgtgtgctttggcatatttctcttttgagtatataacaggaaaatatgggaagaattgctgagtgttctagacattctcactcaaaaggaacatcagtaaggaaaacaatcttacctaccttatttgaagaggtggaagcaaatttaaccttctcttagccaatacggtcacttgaagttcttttttttttttttgccaaagtcttgctctgtcactcaggctggagtgcagtagggcggtcttggctcactgcaacctccgcctcccgggtacaagcgattctcctgcctcagcctctggagtagctgggactacaggcgtgtgccaccatgggcccggctaatattttgtatttttagtagaaacggggtttcactgtgttagccaggatgatctcgatctcctgacctcgtgatccacgcccccttggcctcccaaagtgctgggattacaggcatgagccaccacgcccagccgaagttcctgtctttttttcctcacaattaggaaggctatataggaaggagcagggtcctgttcagttgtgtaaatgaccaccacttaagtgtgcttttttaatatgtttaaacatgtgccattattaagaatttgacacggctggacgccgtggctcatgcctgtattcccagcactttgggaggccaaggcggacggaacatgaggtcaagagatcgagaccattctggccaacgtggtcaaaccccatctgtactaaaaatacaaaaattagctggacgtggtggtgcacgcctgtagtcccagctacttgggaggctgaggcaggagaattgcttgaactggggaggtagaggttgcagtaagccgagatcatgccactgcattccagcctggtgacagagcgagactcggtttcaaaaaaaaaaacaaaaaacttgcaacttcagaattatgttcatgtttgctggtgttttaactcaaactgggacataaatcctagggaagtaacccatatcactgttgttctaataactgcattcgtagtagaataacactacattcactagtagaggctgagggagagaggaaaagaaggaattacaggttacaggctacttttctgttcttgtctagactgaggctgactgacttgtctagactgaggctgaggcaggtggaccatgaggtcaggagatcgagaccatcctggccaacatggtgaaactccatttctactaaaatacaaaaaattagccgggcatgttggcgcactcctgtagtcccagctactcgggaggctgaggcaggagaatcacttgaacctaggaggcagaggttgtagtgagctgagatcgagccactgtactccagcctggctggcgacagagcaagactccatctcaaaaaaaaaaaaaaaaaaaaaaaagagtttgtcacttgcctcctgtttaattttgcattttttaaataaagtatatctattccacatggactattttgattagtaccaatacattcctgaaggagatcaaagatatatatgcatagctctcttggtagcatatgtttaatgagaaagtaatataaggattacatagattagggttgcaggcagttctgtcactttaaagccagatcttttatttaccttattttttaaagtttttgcagagatggggtctcattatgttgcccaggctggtatcaaactcctgggctcaagtgatcctctcatctcagcctcccaaagtgctgggattataggtgtgaaccaaggtgccaggccaaatctttgttgttttttttttttttttttttttttacaagtaaaataccctgaggctgaaggtcattgctaactgatgcagcgtgtttttcttactgctttttttctggggatctaacaaggaattggaaacacaggtttttgactttcctttttcctcctcattgttttctgatagtgttttcttaaagtcatcttccacctgcctctgaagttgagaagtaggaaggaatctgttagaatcacttggggttcagttagtagtgtctgtggtttgcttccttttgtggttttgaatttaatttcactatttgactaacactatttttactccgacttcctcaaacactgtgggacttaagctgtgacaggtgaaactcagtgccttagatgaaggcttggtagagacttagaaacatagaattcttacagggtagcttaggattcttacagcataacttactgcttttaggtatatagctctatgaactttatgagcccactggaatgttttctccaattatcggaaaggataattatcaattaaacttaaggagtctaaggaccctctactcagaaaaatagatgtgagatcctgtctcaaaagaaaagttaaagtcaggaagaagttaaaattaatggtttataaggctttactataactaaatacattataagttacatactttaaagctagtgtatttgccttgcattacagcatatacttgagcttgtaaagcaggttaatctactttattacgatgtttgtattaatggttagagagttgtttgacttcttgcccctatattcagtgactgagttactgtaactacactttataactgagttataacattaataacttaataccagtagtaattgagatagaagagtgaagagaaagtaaaatgtagccttgtagtcttatgttatatcttattcagagcctggcctggttatgtttaagcactattagcagaagagtttcagaagagaatttaaataaaatacagttaacttggctggtttagtccataagataatagtgacagtggtggtgtttgtggaggaaaactgtattgctagaggacaagggtgacagaaagacttgatttttttttttccatgctttttcttttctggggtgtgtgtgtgtgtgtgtgtgtgtgtgtgtgtgtgtattttgtaccatgcgaatttattatattacctttggaggaaagggggataaaactagtctggccaaggctaataaaataaagcctccatgtagcttcttttagtaggacttaatctgttacaacatagttagtcacccagagtattaataacccactatggtagagatttcttcctagtaacaagtgacttttgttcttacatacttaattggtttgcaaagacctaccatctttagatccactatatttgtttagcagatactttagtattttctgagtacacaaagcaaatctaattccattattttccttgttaaaatccttaagtagctcccttcgcctgtagaataaactcaggattcttactgaggtatgtttagcttgttggtctggcccttgctcatttctctaaccttaattgtgtactccctcaatcctatagtgttacaaaagtacttgtagttcccttagccaaccacacttttacgtctctgtgctttaccacatgctctttctgttgagaattctctcgcctgcctcctttgaacacattgctttagctgtgtagcctttgacaagatccctcttacatatctttgttttggcactttttgcacagaattagaacttgtttgctcttgctattcaagttcctttatttagatcaagaattctgtgacattttagatctttttatgcttgtaacttaatttttcagcttcttgaagcgtgaacaaataactgctacatgttaaggggggtgagagaggactggtccaatagttccaaggtcttaaaataaatcaagaaactcaattacctcaaatcccttgaaccatgcatgctaccttgcagatgttgctctttcctttaacttcatctgtatttgttctgcctcttatttgaaacagttgaatggcatgtttgtttgaagaagagaaggtccaatacttggctattaatagtctctctttaattaacataatgtagatgttattgtgaccttgaagcattaatgttaagtgaggatttgtgttgatgagcatatatgaatgtcaagtctttggaatccacttggtaacatggtttcttattattttttctagctccagaacctgggtatcaacccagcaaacattggcttcagtaccctgactatggagtctgacaaattcatctgcattagagaaaaagtaggagagcaggcccaggtggtaatcattgatatgaatgacccaagtaatccaattcgaagaccaatttcagcagacagcgccatcatgaatccagctagcaaagtaattgcactgaaaggtataaaagaatgtgggttttccttaaaactcttcctatgtttttgtttttttttgttttttttttgtttgtttgtttgtttttgagacggagttttactcttgtcacccaggctggagtgcaatggcacgatcttggctcactgcaatctccaccccccaggttcaagcgattctcttgcctcagcctcccgagttgctggaattacaggtgcctgccaccacaaccagctagtttttttgtatttttagtagagatggggtttcactatgttggccaggctggtctcgaactcctaacctcatgatccgcctgcctcggcctcccagagtgctgagattacaggcgtgagccaccacgcccagccagctcttcctatgtatttatgcaagtacaataactagggtttacctttttaagtatattgattaagtttggttaaagaaaatagatctgctaataccgaacttgatttaaaccactttaattacttttacttggaatgtatctgtggaatgtcttaacatatatctacttagaataattttaagttttagaataaatgcatttaaattttgtatctggtataaaactgtgctaaacatatctctctacagaggaaagaaattagtgattcatattctggaatagaacatactttactaatattagcacctaaacattgcagaattttgttatgatgataaacttgcctttgattctgtgcttttttttttatacttcgggcttgtgtttcacttagattattgggttctagaaatggcttgaatttacagtaattgtttaaagtgtgtttgtatttaggtggatattaaagctcttgagtgaagggtatttgagtttattcagactaactttttaattgtcccaacaagggaactgtgcagcttaagtctaaacagagttcaaagactcttagactgtcacggaagctgtattcctttgaactttagaatgagactaattgaccctttaaaacagatgtttttaagagggctcggtgacaaactgactcttaaaaaggcattcgattgcctgctttgtttttcattttgatagaagaaagaagagttcaagttcgcagtaatttgttgataaatttgtgactaagttattagaggtgctgaactttgacttttctttacatgatttaaactttgtatatagtaataatactagttggagagtgaatagggttgggtaggactaggatattcaaacaaataagtcactatcacatatctaagatagaaactcatctcatctcgaggaaaaatggtccagctttcacataggaccagatgttttgtgacagtaagtgttttacttctattacttctatttagggtattaagcttccttcagactctttaaagaatttaaattcaggtccttagcaattcccatgcctctctattaaaaggccatcattttaattttgccaaaattcttttctatttttaatgttattgttatcttatcacatttcttaatgctttcttatgtgtgcagatggtgagttatcttaaattagattgtattagttattgtcctgttctataaaaagaataaattgaaaagattttcggagcattgtacaataacatcatagatttgtccctatatgtctgcactatggagtcaagctgtcatcccttgtccccctccccaagaccaccccacttatgtatatattccaacccctaataatctgggagttgaggaaggcagcaaaggaaagtaagtcattccaaaatactgcttccctctgaagccagttttgaaccccttggcttctttttataaacaggactgtaactctcacaatttttcaagtctggttgtggtttacatactgtgtgggatgggaataacattcttcattttatgaaagaaatttttgcacatgtgttacggagggttgtagtacaaagctgtatgttttgccccccttctttgtccccccagcacccgaatcttaaaattttggtccttcaggagccagattctctgtgtctcaggaatggtgtttttcttagtctttaaagactaatcttgatagcctagtgatagttgtaggctttggcctctattaatttataccaaatcacattttgaactgatggatttcaaactacaagtacaagcctttgcatctgactcagtggactcttaacactcaaggcaaatttcatccttttttaactaaatgcttgctttcttaattggatgaagcttgcactttgttcttatctccagtatattaacagcatctgaaactatcctcttcctttgtctccctctcctttcctccagcacctctaccttccctttgttatcttaagccggttaaatgtagcaggcacttctcttacgtgctagtggcaacaagacagaattgaagcagatcctctttttaaaaagcagtttccacaagatttatttagatgagagatgactgcctttaaaaaaatacattttctttcccccatgtgtttgttatcagagttgctttgtcttgtgtacatgcaactaagtttatgtgtaaagtaaacatacttaattacaagtatgaaggtgacagctttgttttcaattattgttaagaaaactattcattaggcttattttcagttgggatttagaattccatggaagtcatactatctgtttaaagtgtgtttattagaggtaatgtagtttttgcttaaaacgtagatgtagattgtttgcttagtcttagctgttacctctttaatggttgctgctgtatcgatgcaactcgtctcgtaatagaactatttttgtttggaagtgacagagctagtctaggtaggtattcattctaaactttactcttttaatgatttataattcttgattttgtttttagctgggaaaactcttcagatttttaacattgaaatgaaaagtaaaatgaaggctcataccatgactgatgatgtcaccttttggaaatggatctctttgaatacggttgctcttgttacggataatgcagtttatcactggagtatggaaggagagtctcagccagtgaaaatgtttgatcgccattctagccttgcagggtgccagattatcaattaccgtacagatgcaaaacaaaagtggttacttctgactggtatatctgcacaggtaacattttaactatttttttatgaagaagaggtttagaacacggttgtgcccagaatgcagtttgattttgaaattaggtctttctatactcaatcctgttgaatttcacttattttggaagactttttttttccttcctcccatcccttctcttctccttcctccctcccttctcttcttcctcgctcccttgctatactgacatataatttcagaatgctcttaccaagcgtttttagctcttctgtggagattgagtagaaattgagtttctgtaagaatgatttgggatttattatggagtatttactgcagaatgaatgcttctatacctttttgtttaagacgtatatgaggcatattttaaacatttatgttaggctttaacaagataatgtttggggctgattttaagttaagaagtatcaaatctacagtgagagatgaagtgacaaataattataaatcctgctaaagatgacaaagcattctaattatttcattacttgatgaatctgagagtttttgatttatgggtcttcaaacgttattctctttgatcctttatagcaaaatcgtgtggtgggagctatgcagctatattctgtagataggaaagtgtctcagcccattgaaggacatgcagctagctttgcacagtttaagatggaaggaaatgcagaagaatcaacgttattttgttttgcagttcggggccaagctggagggaaggtaagttttggctttggtaattattttaatgagaacttgtatttggctttctgctatgaattagtcatctaatttcaaaatagccttctcccttcctaagtaattttagtattcacatttgtggtgacttaatttgttcaaattttgcatctagtgatacttgtctaaaatgaataatgttctttcacaactcgttctgttggctgtttatattctttgattgctaaagtgcacatttatatgctgtacatctagagagtttgatttagtaggtgttgcctataattttttttgtttatttgttgctttttgagacagggtgtcactctgttgcccaggctggagtgcagtggcgcagtcatgggctcactgcagcctcgaccttctgggctcaagtgatccctctgtctcagcctcccgagtagctgggactacaggcatgtgccaccatgcctggctaaattttgtatttttgtagagacagggtctcactatactgcccaggctggtctcaaacctctgggtccaagtgatcctcccgccttggtctcccaatataatctgcattttaaataccttatatggcttgatatagaggcaatgtagactacaggtgaataacactgacttaagttagaggttttcaaccatgactacacattggaatcgcctggacagattgtagtactttgtatattagacttagttgcaggtaatagaaacaaggtctggttgattagagcaatggtctgtttagtgaaggatattggatagtttacaacagctggggaggctgtaaaaccaagactgggaaatgaggagaaataatggaaaatgagcagtggtcagggtcccagccaacaactattccacagaactctgaggacacttctggatccatgattgcatttctggatgcttggaaattcgatttgactactatttccactaccagagtagcatctctgaaatcctaatacttttgtgttcctagctccctgttcaaagtctagttttaggcaagatcagatgcccacatcttatgtctgagaggtttggaaataattatttggtgtttggtgctcctaaaacagaaggctggttctaccaccaacaaaacttgtaaagagtatcttccctcttgttgtcccatcaggaagagggtttagattctaggcagaccaaaaaatttgaacttcacttttgttaggacatgtgtctctctctttgtaagtaagcagtttttaaaaattgagatagagattgcttaagatatcatctgtagcctgtcaggagagaggaaacagtaagtaatgacatacaattctgcttaaaatttcacgatagcccctgaattgaggataatgctaccaacacctcaatgtgacagtggtagaaagcactgatatttagatctgaatagatgaaatttaaacagaaaaaaacacatagttttagaaattagatattatccttaaaacataaggcaggacatttattgaaaagttctactagaaaaaagtttcaatgtcattttgaacagtatctggaaacctgtttataggttattgagcctattatttcatacatggtgctatcctgtctgccatggcttttgaaggaagataccaagtttttcagtatggctagtcatcctaatgaaggatgatgagaccctataacattcatatggtatgtgtcttggaaactgaatttttttttgtctgagttcatttctggcatgactaaggaaaatatatagtactttttcattgagattatttacttttctcttgcctggcttatgtgcagcattggatattttaaaccaaaatgttctcatttagtttatgggatgtttgtgattagagagacaactcaaattaggtatatacattcattctgttttagtgtatatgtataggtagagaagaatttaacaacttaggtttctatttggaaatactaaattaaaatttaaagctaggagaaaagtaccattgtaggtaatgtattacccttctataccatttatttcaggtagattatttgaggtatgattatttcagatattcagatgacttttttttttttttttttttttgagatggagtcttgctctgttgcccaggctggaatgcagtggcacgatcccggttccctgcaacctccacctcctgggttcaagcgattctcctgcctcagcctcccgagtatcagctgacttttaaaaatgcatttatcttaaaataatacagatttataggaagctgtaaagacagtacagaacagtcccctgtgttctttacccagtttctcccaatggctacatcttacacagctgtagtacagtagaaaaaccaggaaattgacattggtacaattgtataattctgtgtcattttatcatgagtagataactattttatcaccacagtgatttcccttatgactgtagcgtcacacccactccccctctctcacaccatccctagctcctggcaaccactaatttattctccatctctataattttgtcactttagaaatgttacataaatggaatcatacagtatgtgaccttttaagattggcttcttttttttcactcaccataatgttcatgaaagtttgttcctttttattaccaagtattccatggtatggatgtaaccaaaaccatttaacattgatcttctgtagaacatgttggttgtttccatttgggggctacaaataaagctgctgtgatcaactgctaatgtataggtttatatacattttgattttcttttgaacagttacatattattgaagttggcacaccacctacagggaaccagccctttccaaagaaggcagtggatgtcttctttcctccagaagcacaaaatgattttcctgttgcaatgcaggtattttaagcaaaataaatgactttttaaaaatctctcctcttaaaagaaattaacccaaagactattcatggtagatataatttaagtgatgcttaaaagaatacttttttaaagtttattagtgaagctttgtaaaataataccttggcttttcatgtacaggactaccttaggcctattatgaggtttggctccagaccaccacaataaagtaaataccacaacaaagtgagtcataagaattctttggtttcccagtgcagatcaaagttacacttaacactatgctgtagtctactgtaaagtgtgaaatagcattgtctagaaaaacagtatacatactgtaatttaaaaatactttattgctaaaaaatgttaatgattatttgagcctttagtgagttgtaatctttttgcttgtggaaagtcttttctcaatgtcgatggctgctgaataatcagagtggtggttgctgaaggttgaggtggctgtggcagtttcgtaaaataagacagcaaagaagtttgctgcatcaattgactctttcacaaaagatttctctgtgcattgctgtttgatagcattttacccacagtagatctttcagaattggagtcagttctttcaaaccctgccactgctttattagctaagtttctgtaataatctaaatcctttgttgtcattcagcaatgttcacagcacctttaccagcagtagattttatctcaagaaacctcttttctttgcccatccttaagaagcagctcctttactaggagattacagtaattcagtcacatttttaggctctatttctaattctggttttcttgctatttctaccacatctccacttacttgctccactcaagtcttgaactcctcagtcatccatgaaggttggaatcagcctcttccaaactccttttaatgttgatattttgacttcctcccatgaatcatcagtgttcttagtggcatctagaatgatgaatcctttccagattgaccgttacttaaatttactgtggtgaatcctttccagattcacttaaatttactttgcccagatccatcagatgaatcactgttcagggcagctgtggtctt

SEQ ID NO: 900 - DNA, 32744 bp, Homo sapiens; identical to SEQ ID NO: 197
  source 1..32744: mol_type = other DNA

SEQ ID NO: 901 - DNA, 32742 bp, Homo sapiens
  source 1..32742: mol_type = other DNA
agccatttgcttcctgagtggccacattccagctgtgcagactggtcatagcacatctgccaatcagaacaggccctggagggaagcccttggatactgagtcttgtttacatgcatcgtgactctgtttctcccttcctcttgtgtgttgtaccactaggaagattagtggggaaatttgctattacatgcctaagtaaactatgtaactaggatcacagccacaggaaatgatgttctggacagagttttagctcggctttagccacaggtaagagttgttgctttgttatatgaggatagctaatctgtattcagtttctggctttactttgagacattatacttcatttttgtagcgaagctagcaggctaaaaactggagaatgattgagagaaatgatttaaatgtgccctgcgttactatgactttaaaatcttaatactcatcaaatgaaaaacatgatattttcatttaagggaggggtaaaaccaagttaaattaaaacagaaaagttttaaaagctgcagtaatactaagtcacagtgtagaaaaattggaaccagaaatgtgctaacactatgtgtttggaaatcattatatctaagcaggcatgctttattgtgaatctttttacttattagtctttcagagaacagtgttttcatgagtactaactctttggctttgaaaaacatttcttttttattatgaactcattcagaaagaattgttacatacgtttaactgtgtaaatcctattccttttcttccatatttctttctagaagttttagagtatgtttcataatcctcttattctgttctaacagcaataaaattaaggaaaaactaaaagcattcctgtcttaatctttacgttgccattaaattctatcttgttagcattaattcagaagatactatagaaaactgtattttgataatattccataggattttttcttaacgtcattgcttaggatatattgtggtttgtatattgcttcatattgtttatttttgcataacactgcggccttttacttcatttatttttaattcttaagcatatagtggaggaaaaattgttactcaggttcaaaaaagacaacctgtgggttttatggttctcttgtatatgatagtctcaaggttgattaatagcatgttacagcagtctagagagtcacttttgaaaagttcaagcatctgtgctcttatttcttaccctatagcagggtttctcgacctctgcactgctgacattttggatgagataattcttttggtgaaagggaccgctctatgcattgtaggatctttagcaacattcctgctttctacccatgagagttcccttcttcccagttgtgacgatcaaaaattttatatagagagcacattatatctaattactggagaaacattgaaatccaacttctgaaatgttctgggtggtagatagttaagggtgaagctgtattggtcttagtatttgcagatgttgtagctgactgctcatttttccccctccccattctgttagaagcttctgccaaccatgattcatggaatgatttttttgagctgagtaatctgtggctttgcagtttccttgctttctttccttagctaaatctcttctagtgttagcaaagtatttagcacaggaaagatcttataaaatgaaataatgcatgtaatgatgcattttccaagtagatgattttaacaaaccgtaagcttttatgcctgtccttcattgtgtcttttctgcctctgtcaggcgaactgtgatgaagagccttatacttaggaagacacaactacctttgaacagtcctttgtgaaatctaatggtatggcagctggtatttaaaaacttctttccagagcttttaaagaaccttttgacacgtaaccatcttctttctctacagatcgcaacgaacgaaataaaccagaacatcgttcttcaaggtatgaatttacagtatctaataattctgtataaagcttcttatttgaaaagtattgtttggaagcaatgtaagtgtcctctttagagttactgtctattggaatcttctgtagcattcagagaagcttcataagggaaatcttattcattctctgaattaaaatttcacataaaactattgactacctggaaaacatgttttattttaggaattcccatcagtgacagatatattttcgtaaaaattattttactctcatttattagtttttgtgacttattttcctcccctccctttaaccagtatttttgtaagtgtgtactgctgttttcctaatcataaaactaatataggctcactgtagaaatttaaaagatattttaaaaatacaaagcatgaaaaaagcagaacaaaacaaaacccagactgccttccatcagccagagatggctggctattgctaaaattttggtacatttctttctagacttttagattatatatgtatgtatatattcaaatggattattttatgtttttgttaggtatttcaagtggccaggaaggttgtatcacttaagctctcaaccacactgagtgtatttcactagaattctccaacactgaagagtacattaaaaaatccttgtcaaacttataggtgaaaaattgtctgacttctcataggcaggactgacaggctatatttaatatttgtaacccagtactatgaaagattataatttttctaatattaatttctttttattccacattctaccaccttttttgatgttttattttgtgggaattgttaaagtaatgtactcattggattgactgctctggtaagccaaatcctggtgctttttcaagagatcaaaccctagagtgcattgacctcaatcaataaaaatataagatctataaaaatttcattgcttagaatagcaatgcgttttgcagaaattgtcaatcaaaataagttagtgagacctaatctgagagaagaatatagctgggtatttagaatattgactgattttttttccaggtacaatttacatatgttaaaattcattcttttttgtgtataatcttactagttttgataggcatgtacaattatgtatctaccaccataatcattaaacagttcgtaagattcttttatattagatacttaaagaaaaatagcagccaggcatggtggttcacacctgtaatcgcagctacttgggaggctgaggcaggaggatcgcttgagcccaggagttcaagactagcctaggcaacatagcaaaacactgtctcatctctgttaaaaataaaaataaggcaatgtaagagaaaggactttgacagcatgcttaactgtgagtgacataaagttggaagagtcaaaaatacttaggatggtaaaaccaggatccccaagacctttgacattctgaagattggactgaactgagcaatatgaattttaataggcacaaatggaaacccttagaatgaaacaccagtggaacataaaaagataagggagatgtgacttagcaatatttttgaaaaagtctgaaggatttagttcttcataaatttaccatgaatcaaaaatcttatgtcattacatctaccttcccccaaaaaagtctgcaccgatttgattacactgaaagaagtttaatgttcaggctaaaagtggtagctctagatcatactttttttttttctttgagatggagtctcgccctgtttcccaggctggagtgcagtggcacaatctcggctcactgcaagctccgcctcctggattgacgccattctcctgcctcagcctcccgagtagctgggactacaggtgcccgccaccatgcctggctaattttttgtgtttttagtagagacggggtttcaccatgttagccagggtggtctcgatctcttgacctcgtgatccacctgcctcggcctcccaaggtgctgggattacaggcgtgagccaccgtgcccggcctagatcatacttttgatattctgttcaatttggggtccacaagaccttgaaaaactgaagtatgcagtggagtgactgtatagataccacatggagaccttaaaaaacaaaacaaaacagaatcccatgcccaaccccagatattctatttaataagtctcaaatgaatcctcaaaatctgtatattaaacaagtcccccagtgattctgatgcgtagtcaggttggggaccactggtctagaatatagcagctgagttgggacagggaagatgaaaaaaaagagtaagataaaagtcaaagctaaaccataggaagactggtgtgaggaactgggagaacttagcccagatgtgaaagtttggggaagtgcatgggatggaaacgataactggcttcaaacacccagaggctgatacgtggaggaaactagcagaattcttcctaataaatgctgttccctactaagaggaatgctggccactggaggaatggcggattctgggtctgggctaagggaaaatacaagatgatcctggacatctagttgtgatagaaagctaggaagtgctcaactaatggggtcatgttgaaaagacagatggtagcatcaagggattttcactggccaaattttggggtaatttgagtatccaaaaaaaatgatgataatggatcccatgtaggagaaatgacagaacttagaaaatcatcattttgtaattctcaaagtaatagttgatgcaggcaaagatcatcagtggcagctaaaacttctgtaaaaagttgttgggaaacatcaaaagataccagctgctgttgaaaaaaaaaaaaagttgttgggaaaagttgttaaaatatcaccccacagatcagtttttaattgcaaagggggaaaatttaccatttcaatggagagacctagtggtcaccatctaaatcaagtagtcaacatgtatattatcactagtgagataagcagtacacttatgtagtagtcctaaggaaaaaaaaaaaaaaaaaaaggctgggagaatattccaggtaacaagagaccaaagaggccgggcgcgttggctcacacctgtaatcccagcattttgggaggccaaggcaggtgaatcatttgaggtcaggagttcgaggccagactggccaaaatgatggccaactccatctctactaacaattagctgggcatggtggtgcatgcctgtaatcccagctacttgtgaggccaaggcaggagaattacttgaacccgggaggcagaggttgcagtgagccaagatcactccactgcgctccagtctgggcaacagagtgagactccgtctcaaaaaaaaaaaaaaaaaaaaaaagagagagagagaccaaagagatattaacaaccaaatctaatatgtgaatttaaaaaaaaaatctaggactaaaaaatcccaactttaaaaaaggttggggaggggataatttaaacatggatgttattttaaataatattttattaaacattactttttaaggtgtagaatagaaatgttattatgcaggagaatgtgattcttaggagatatatgccaaagtattaatgtaagggtgatatagttttatgtttgcaaataaatctcaattcagggggaaaaaacccaggatgagcaataaagaagcagatattggaaactgttaataattggtgaatagatgaaaggcatataggtgttacttatactgtttcttcagcttttttgtagacatgaaaatttcaaaatagaaggacacagtggagagaactgttgtgtgtgttcctgggagtcccagagggaggacagaatgcacctctgtgggtggaacttggagggggatatatttctgcacaaaatgaggaagaatttcctgacagagctggtcaaaaatggaatgggctactctgtgaagtaatgctgtcaaagaaaagctaaataagctagcgctggaaataaaaatagagaagattcatgcatggctaagtcattattctagatggctccagctccttgctcactaatagccaataaatatctcttgtgagtctctgttctggctcagaatacaatagaaaataagaaaaagtctccaggttgaaggagggtccattgttgtggacttacactcccaatctctgagaatctattgaccctaaagtgaagttcccagtctttacagttatattttaggcaatgctgtggtacctttgagggtattcggaaagtattctcagtatttttaatctcttatttatactgtcaagttctttaggactgtgctattggtcttggtaaccctgacacttagtagattgcctggcccacaataaacaataaataattgttgaataaataaatgccaaaggtattttgaggagagaaagggaaatatcagtatttttaccttacaaatcgggaagaacctgactctcaaaagctcgcccacgactattattggatctgtgtgttacaacagcaaggagtgatgccctataagaaaggagaaatgttttttcaggaaaggacatcgttttctgtccagggtatctgctgacattggcggtgacctgttctcctgccatcctcagctgagcagggctaccccgccaggccagcagtgcatcaagcagattaatacctgctgcatcaacagagcagaaagaagaaaatataaacaaaaagtcatttaattttggtatgtttttcggttctcctcaggccacttggcaacaagaatgatgggctccaagcccaacagggataacagaaatgcatttctcttgtttgtgtttttagaggccaagcactcctatagctttcatagtaagaggtgaataaatctgggacgtctgcctgttctttcacctcagtgctaaactaagaaggaaaacataattcttgtcaagttaaaggaaaagttttatcatatgtaggccaacactaagaccccaagcaaaaggcatcctgggtggtttttgattactttgttttgatgttgatttgcttgctgccgattgattgatacacatgtgagaaatatctgcgttgttcttgtctcaaccttactagtttaaacacaccatttcccaaattgatgtcccacagaactctcttctgtagattattaatcagtatgtcaagaaataagtgttaatatgcagaaaagtttatgaaatggtgagttaaacaaaattagccatatttctttactgtgatgctcctcagagtctttgatacactcaagtacattataaaactccaagtgagagctatactacacactcgtttaaaaatttatttgaatttataacttcttttcccagacatagctattaataacatctaggaaaaagtaccatggagtggcagtttgggaaacgaattagagggaagtaggagctaaagataataaagaatgttaagccctatggcagtcagtgccaccaatagaaaattaagagctctttttaccatcccaccagctctaaataatagatcttgatgacttaggggtctgaactaccagctaattcatctcaaatgttttatctactacaaggaaatattttacagcagcaaaaaaagaaggcggcaaaacaaagaaccttaaatctatttctcaaaaattgtcatttgaatcttggcctccctaaagtcttcttatagtgacctgtcataatcccctttgatatccattcataaaattaaatgaaatttcattaaaaatcatagaagtaagaaaatggaaattcagcaaagtgattcttagatgtataaggaagagcaagactaaccaaggcaactttgaagatcaaagaggagaggtgaactcttttaagtaattaagacagtcttttgtcagcaaacctagaaataggttgttgaagcagactaaagagcccacagacatagatgaatgcatagagttctgtgtcatgtggtatgatagaggcagcattacggatcaatgagggaaagctggtatgtcaacagatggtgcttgaataactgattatccatatttttaatctacacggaatttgatttatcttatgacatgagataaaaatctaaagaaatgaagtaaaatggaaacatttcaaagaaatatataagaatatctttatgaggtagtgagttcttaagggtcaacaaatacaaaccatgaagaaaaagactgataaatctgactatgtgaaaatttaagatttatgtacatgaatacatcggaagcatgtgaaaagggaagtcatgactgtgcagtgcacgtaggtgacaaaggttagtatccaggataaagaaaaactacgcatacggaagaaaaagacaagtaaatacaggtagggaacacataaaagatgaaacctaagtaaccagttaatatatgaaaagattcttcaccttgctaggattaagatgtgcactaacatggtaatgagataccatttcacttccatggaattggcacagaactctcaaagactgaaaataccaagtacatatgagagtatgtaatttggtacaactgtaaggaagactttattcaggactatcaagataggtatagggacaactgcaatgggattttgcagtcggggagttaggtcgggctcaactcatgggcaagtgggaatttatagtaaaagagcagggcgtgggggtcagtggatagaaaattactgagaggagacatcggggataaaggggattatagctaagttgacctaataggattcttgctgaagtcagaccagggtgatcagacatcaccaagaggatggcaggggattgaacctgatcagatgttaagagtaatctgatattgaagatgaggattcttgctaaactgacttactgccaaaactggattttacaaggaagtacacagatgggactaggaaaagtttcagaatctttgtcagttcagagtagccctgtttgaattaaggatatgtagtatgtgagaacatggatacatctcagaaacataattttggatgacaaaagcaagctgtagaaggatagttacagtataatgccatttatataaagcagaagtcagcaaatgggtcaaatctggcctgccaccattttttaattaaaatattacaggaactcagccatgtccatttgcatatcatcttgggctgctttcacattacaacaggagagttgtaccaacagggaccacatggcaaaacacaaataatacattgtttgttgtatatttttatgactacgtataggtactaaaagtataaaaagatgtgcggaagtcataaatagtgaaattagggtattgattatcaaatgaatgggccaggaaaggatccacagggagcttcaagtgtatcttgactgttttatttcttaagctaagagataggatttgcaatattatctatacttttttaaactcctgggaattagctgggcatgatgactcatgcctgtagtcctagctgcttgggaggctacggtgggaggattgcttgatcccaggagtttggtgaactatgatcacaccactgtatcccagcctgcatgacagagtgagaccctgtctcttaaaaaagaaagaaaaaaaaaaaactctgcatagtttcataatttttttttaaatggcatcaggagacctttttgaatcctatggcaatgataaagatgtttttataggacatgagtataaaattgagtgaattctttttaaagagaaaaattgaggaaatagtcaagaatgttcagaaaaaattgattaaacacttcagattttacctgtacttatagacctgctcccatgtctccttttactagaagcatcttgtatttctctgcaaatttttctcttttttggcacttaagagttctacaactaacacgtgaaaacatgttttaatagtacagaaacatgtggtatctgcctttatcccataggtgacttaagagtggtggttcagtgtctatcctagtctgctttctatgcatatatatagcatatatttaaataatatttagaacaaatggggatatatatatgtgtgtgtatgtgtagtatgtgtgcttatatgtatgtttgtatatctgtatacatatatatgtgtttctgtcaatttgacttttttaacttatttagaaagtattaccatgtcagtttccacttcattatttttttaactactgcataaaattttccagtgtaaccttattataatttatttaaccagtcctttaggttgtttccaattcattgcagttagaaatgatgttgcaataagcatctttatgttcatatctttgtgtatagatgtgtaggaaaacctttattgttcttccaagatagattttttttttgttttcattcacaattacttttaagtttttaaattttatgtgccgtacatgtctgtttgcttcccaaatctcagatagcttcctggtgtttggtactgttccaagttctctagagcccattacaacttccctccccataatgtggcctgaaatgtcacccagcacagggagagactgaaactcaacatgcagaatatttgtagcacatagtttagtactctcagagttaatagttggtgatgttaaaactcatagcaatcactatatcattacgaatttaaaagggtcttggttctctgcattggtatccttttgttgattttatgaagatgttgaagattttattttgacactttaccatcatcacattgtggtttaaatagattagctaaaagcaaaagatttaacttgttttagctgttctcttttctaagtatgtctatcaaaataccatgctctgctggggttagtttaatactgaaattctgtagcatttccctgaccatatgttttgatacctgtacctctataaactatagctctgtgtaattactttctggcattatgttttctaagcaataagagaaacattacttttgctgcagcatctgtaatgccataaacaaggtgaaacatttaaatatatacaggttttgtgggcgggaaattcttttgcaaaggaagatgtgaaaggactattaacatttttttgtcatcctacagagaatacacacacacacacacacacacacacacacacacacacacacacacacagtgttgttttgttgtggttttcagaaatgtaactttagcatttccccctagtgtgatgggaatgaaaatgaagcatgtatatggtgtagcagttgggtaattgaaaagttttattggctggtctaccactgccatagtacttagtgtggggcttttctgaagttgtttcaaattaaactatcagcaggcagttaactttggaacagcagctggtcttgtgtttattactttttctcaagatgggcttgttggccacccatttctcagcagtccagggcgcatggaactcctggcccttaaatttttttcatcctaattctttcctctctttcccttgggttatattttatattagttatttacctttctgcagtataatttagaagtagttgtttatacagttctacaaaatgttggttaaacagcctgtagtcaagtgaagtttgtatacatctttgtggccctcaatctatccttaggttatggttttactccaactaataaatatccttgggaaagtggactttaaatttttattcaaatattttcccttattgaacacagcatacatcacattcttcaaatgtattgattaggactgtacgccacagaagcgtactagctaattcctggaaaaatcttaggacagaattactgaacagtcattcattagctcaatcacctcctgtctcattaaaagtaaactgctgttgatcggaattcagtcttgtccttaaaggtaacaccctggctgggcgcggtggctcatgcctgtaatcccagcactttgggaggccgagatgggcagatcacgaggtcaggagttcgagaccagcctgaccagcatggtgaaaccctgtctctactaaaaatacaaaaattagccgggcatggtggcatgcgcctgtaatcccagctagctactcaggaggcttgaggcaggaaaatcacttgaacccgggaggcagaggttgcagtgagccgagagtacgccactgcactccagcctgggcaacagagcaagactccgtcaaaaaaaaaaaaaggtaaaaccctttcctgaaaccagaaatcaggcctggtcccaagaattcaatttcaaggtttgaagtatctttgttgattagcagctcctctgcataataaatcagagcattcatttctgccctcatgataagtttttgccacttctaatctcattttagttgtaggccatctttccagaaatgcagagtgagcaagccagctcttttgcaacacttctaaatgcagcaacatttaaggcaggaatcctgaaggacttgtttgtgaccttgcttccttttggacaggaggattgagaatcagtatcctttgttaattaaaaaaatgaaagaatggaaggaaagtatggattgtttggaggcttcagagtaacattgtgtctacaatacaaacattccctcaactataaacctgtttcctcaagataatgttttcccttggcacactgccttgtgcaggcagttcagggatgctatcaaggaatgacaggcggacttaaagtgtatcactatctattgcccagtagtttctcttggtcatggattctgaagagaaactctaggtagaagaggccttataaactgaagtacggtcttcagaatattttaatgaggccggctgtggtggctcatgcctgtattcgcaacactttgggaggccaaggcaggaggattgcttgaggccaggagtttgagaccagcttgggcaacataaaatttaaaagttagctaggaagtgaggagcgtctctgcccggccgcccatcgtctgagatgtggggagcgcctttgccccgccgccccgtctgggatgtgaggagcgcctctgcccggtcgcgaccccgtctgggaggtgaggagcgtctctgcccagccgccccatctgagaagggaggagaccctccgcctggcaaccgccccatctgagaagtgaggagcccctccgcccggcagccaccccgtctgggaagtgaggagcgtctctgcccggcagccgccctgtccaggagggaggtgggggtcagcccccgccaggccaggcgctccgtccgggagggaggtgggggggtcagccccctgcccggccagcctccccatccgggaggtgaggggcgcctctgcccggccgcccctactgggaagtgaggagcccctctgcccggccagccgccccttccgggagggaggtggggggggtcagccccccgcccggccagccgccccgtccgggagggaggtggggggtcagccccctgcccggccagcctccccgtccgggaggtgaggggcgcctctgcccggccgcccctactgggaagtgaggagcccctctgcccggccagccgccccgtccgggagggaggtggggggtcagccccccgcccggccagcagcctcgtccgggaggtgaggggcgcctctgcccggccaccaccccgtctgggaggtgtgcccaacagcccattgagaacgggccatgatgacaatggtggttttgtggaatagaaagcggggaaaggtggggaaaagattgagaaatcggatggttgccgtgtctgtgtggaaagaagtagacatgggagacttttcattttgttctgtactaagaaagattcttctgccttgggatcctgttgatctgtgaccttaccccccagccctgtgctctctgaaacatgtgctgtgtccactcagggttaaatggattaagggcggtgcaagatgtgctttgttaaacagatgcttgaaggcagcatgctcgttaagagtcatcatcactccctaatctcaagtacccagggacacaaacactgcggaaggcctcagggtcctctgcctaggaaaaccagagacctttgttcacttgtttatctgctgaccttccctccactattgtcctatgaccctgccaaatccctctctgtgagaaacacccaagaatgatcaataaaaataaaattaaaaaaaaaaaaatttaaaagttagccagtcacggtggcatgcacctgtagtcccagctactcaggaggctgaggcaggaggattagctaagccctgagcctaggagtttgaggctacagtgagctaggattgtaccaccacacacctgggcaacagaacaagaccctgtcaaataaataaataaattaattaattaattaattaattcatattattaattcctccctccaagacaggatcttgatctgtcacccaggctggaatgctgtggtgcagtcacggctcactgcagccttgacctcctaggctcaagcagttttcccacctcagcctcccaagtagctgggactacaggtgtgtgcctccatgcctggctaatttttgtatttttttgtagagacagattgtaccatgttgcccaggctggtcttgaactcctgggctcaagttatctacccacctctacctcccaaaatcctgggattacaggcatgaaccaccactcctggtcccaatatcttaaaataagacagccatgaagtttgccacatcgattgactcttcctttcacagtttctctgcagcatgcaatgctgtttgataccattttacctacagtagaacttctttcaaaattggagccaatcctgttaaatcctaccactgctttatcaactaaatttattctaaatcctttgttgtcgtttcaacaatgtttacagcatcttcaccaggagtaaattctactttctttgctcatccagaagaaggaactcctcatccactgaagctttatcatcagatacatcaatgtggtcacatctttagggtccacttctaattctagttctcttgctgtttccactatatctgcagttacttcctccacgggagtcttgaacccctcaaagtcatccatgggggttggaatcgacttcttccaaactcctgttaatgttgttacgttgccctcctcccatgaatcacagatattcttaatggcatctacaatggtgaatcctttccaggttttccatttactttgccccagttcatcagaggaattactatctatggcaactatggccttacaaaatgtatttcttaaataataagacttcaaagtcaaaataactccttgatccatgggttgcagattggatgttgtgtcagcagacatgaaaacaatatgaatctccctgtacatctgcatcagagctcttgggtgaccaggtgcattgtcaatgagcagtaatattttgaaaggaatcttttttcctgagcaataggtctcaagagtgggcttaaaatatttagtaaaccatgctgtaaacagatatgctgtcatctaggctttgttgttccactggcactggcagaatagatttatcataattcttaagggccctaggagtttcaacatggtaaatgaggccaggtgcccctcacacgtataatcccagcacttcaggaagccaaggcaggaggattgcttgagggcaggagtttgagaccagcctgggcaacatagcaagaccctgtctctacaaaaaataaaaattagccaggtgtgttggcatgtgcctgtagtcccagggaggctgaggcaggaggattgcttgagcccagaaggttgaggctgtcatgagccttgatcacagcactgtactctggcctagatgacagaatgagaacttgttactaaaaaataaaaaaattatttaatggtaaatgagcattggcttcaacttaaagtcatcagctgcattagcctctaacaaaagtcagcctgtcctttgaagttttaaagccagacattgacttttctgtctagctaggaaagtcctagatggcaccttcttccaatataatactacttcatctacactgaaaatctgctgtttagtgtagccacctttaccaatcatgttagctagatctgctggataacttgctgcagcttttccatcagcacttgcaacttcaccttgcacttttatgtcatgaagacaccttcttcccttaaattgcatgaaccaacctctactagcttcccacttttttgtgcagtttgcagtttccttacttatctcagccttcatagaattgaagagagttaggaccttgctttagattaggttttggcataagggaatgttgtggctgggttgatcttctatccagaccactaaaactttcttcatatcagcaacaaggctgtttcactttcttatcattcatgtggtccctgggatagcacatttaatttccttcaagaacctttttttttttttttaattaacagatttgctaaatgtgtggtggaagaggcctagcttctggcctatctcagctttcgacctgccttcctcactaaacttaaccatttctagctttcagcttaaaatgaaggaagtgcaattcttcctttcacttgaacacttagaggccactgtaggattatgaattgccctaatttcagtattgttttagggaataaggagacccaaggagaggggaaaagatgggggaactgccagtggaacagtcagaacacacacaacatttatccattaagttcactatcttttttttttttttttgagatggagttttgctcttgttgcccaggctggagtgcaatggcacaatcttggctcactgcaacttctgcctcccgggttcaagtgattctcctgcctcagcctctcgagtagctgggattataggcatgcaccaccacgcttggctaattttgtatttttaatacagatagtcagatatcttatatttttacaagatagtcaggtattttgtatttttagtagagatagtcagatatttgtagtagagacagtcaggctggtctcgaactcctgacggctgagatgagatgggggttaagcctgggaggttgcaaggctgcagtaaactatgatctatactccagcctgggtgacagagcaagacccaatttcagaagaaaaaaacaacaacaaacaattaaattttgttactataaaataatacgtgcctattatagaaagtttgtcaaaatacaaaaaggagaaaaaaataaaatcattaatagtcaacaataattgctgttagtatattggtggttcagtctttcttttgtgcatacttggtgtactttaaaaaaaatactggggggccaggcacagtggctcacgcctgtaatcccagcactttgggaagccgaggcaggcggatcacaaggtcaggagatcaagaccatcctggctaacacctgaaaccccatctctactaaaaaatacaaaaaattagccaggtgtggtggcaggtgcctgtagtcccagctactggggaggctgaggcaggagaatggcaggaacccaggaggcggagcttgcagtaagctgagattgcgccactgcactccatcctgggtgacagcgagactctgtctcaaaaaaaaaaaaaaaaaaaattgggatgatatatataagtttcttttcataaaacaatagtttataaacattttcccataacatgattttcatggcatttcatcatgtagtataccaaactttttctattatcagacatttaggttatttcaagattttactattgtaaataatcctgtaatcagattcttatacctacatttttatggaccatcactgattatctccttgtgataaattcttagcagtagaattaatggaacaaaaaatatataaatattttaagacttttcatatatactaccaaattatcttcatgaagggttgcattcttacctctgtaacattctttgagattcttccctttccctgtgttttttatggatgaaccagaagaaaatggtcctacgctatttggccatagctaatagaactctgtcctagaaggtgtccaataagaatattgtttcttccagtttaactcatatttttatgttataatgctcagattttttaacccatttctgttatttttatttcaggtcccaaaagagcactttccaaaaggggtcttgtactaatccacagcctctggaaatctgtatgctcggagcttttcagaggcctttctgaagccattcaggagtcagatcacttggattcaaggcatagacaccagtgcataactcttaagcctgtatttgaaatctggactgtctgtgcccaaatttgggaaacttttagggtgatccaaagtgaattttaaaaatactctcaggtcatgcccaagtttggaggctttctagggcaatccaaaatgatttttaagaaatactttttcaggctgggtgcagtggctcacgcctgtaatcctagcactttgggaggccgaggtgggcagatcacttgaggtcaggagttcgggaccagcctggccaacatggtgaaaccccatgtctactaaaaacacaaaaaattagctgggcgtggtggtgagcacctgtagtcccagctactcaggaggctgaagcaggagaattgcttgaactcaggaggcagaagttgcagtgagccaagattgcaccactgcactccagcttgggtgacagagtgacgctttctcttaaaaaaaaaaaaaaatactttttcgattgtttaggttctgcctgtattggtagaaccactcgagaagctgtgggatagtgtgtgaagtacttgggtccaggcatcaggctgacggggttagaatcccagcttcaccacttgggagctgggttccctgggaaagtttcttaatctttctttacctcagtttcctcatctataaatggagctaattaaagtacctatctcttggggttattataattatttagttgctttatcagtcagggttcaaccagagaaacaggaccagtaggagatgtatattaaagagatttactggccgggcatggtggctcaagcctgtaatcccagcactttgggaggctgaggcgggcggatcacaaggtcaggagatcaagatcatcctggctaacacggtgaaaccccgtctctactaaaaatacaaaaaattacccgggcgtggtggtgggcgcctgtagtcccagctactcgggaggctaaggcaggtgaatggcgtgaacccaggagacggagcttgcagtgagctgagatcatgccactgcactccagcctgggtgacagagcaagactccatctcaaaaaaaaaaaaaagagatttcctggggccgggcacagtggtgcatgcctgtaatcccagcactttgggaggccaaggcaggtggatcacctgaggccaggagttggagaccagcctgacaaacatggtgaaaccccatttctactaaatacaaaaaactagccaggtttcgtgccgcatgcctgtaatcccagctacctaggaggctgaggcaggagaatctcttgaactcaggaggcagaggttgcagtgagccaagattgcacctttgcactccaacctgggcaacaagagtgaaactccatctttaaaaaaaagagagagataaagatttattgcagggaaatatttatgtgattgttggagctgatttaggcaagtcagaatttcgtaaggcaggccatcaggaagggcaggctggaactctcacccatggagtgaagctgccatccacaagtggaatttcttttcattatggaagcctcagctctgctcttaaggctttttaactgattaaatcaggcccacacagatttcatagaataatctcccatactataccctgataaagtcccatcaactggtggactttaatcacactgacataatgcctttatagtgacgtgtaaattaatgtttgattaaataactggagactgtagcttagccaagttgacacatcaaattgattatcacagttgctttggacctcagttaagcaggctaaacccacttggaaatgattttcagtgttatctctgcttttcaaggtcagggctcttcaagtctctgtaacccagaagttctttctgacatatcagtttgatgtttgttagttttgtcataagaaactacaattgcattattattgtcctaaagaattctctcaactcaagccagggtgtgtggtcatggtgggattctgtgaaggagcataagccagcatctgcataaacaccttgatccaggcggtatttgctcttatacatttgtgctatcccttcgtgcttggagaagcacactattgttacatatgcctgctttgtatgaactggtaaagtctggagttgataggaactgttgagtagtcccacaggcctctgtcatagtggcaaaatattacctttggctacctgaagaaaagatacagatttggtcctctcttttcactagtgctaatttttccacacagtgatcaacttcctttagggaagctcattgcatttctttgagcataacctaatctcctctcattctgaatgcaggatgtcttctttgccctctaactcaaagtaggaaaagataggccactcagaagtaaaatagctaatggtaaaagcatgataaactgttaggatacttcctggtggccttgggtttcaagcttttaccaatcactctggaaacaactcctgtaattgttcctcttgtagattctctaggcctgcatttcagtgtttagtttttttccatagctttgaacgatgaggtggtgatgcactgctactaaatcttatctcatgcatccctgagaactgcctcccaagcctccagtctcagctgaaagaaaggcacctatggccaggtttccacgtggtcctaccccatttggccatagctgatagaactctatcctataaggtatgctaatcaagttttttctcatgaaagtttaaactaaaagacagagctgacagccatggtttctggaggtttaaaattatttagatttgggcttggtaggatatgcatgctgatgaacactggccaggtatgccagtgaatgagcagggagttcaagagaagactgcaaaaactgaagcggaggtgatgtagtcccaaagagaaagtgaggaagaatgagagcatgcacgagaagctgccttgtttcccagcactgcccaaagttcagctgcacttcctgttcatacccattcccaggatacctttgtatgctcataataaaaacccctttaatttaattcaagtttaaaggggtttcagttgttttaacctcacaagtcaatgcaataccattagaggaaataatgataacaataccgtaatttagaaatgaaagtcacatacctaacatactcatgttggttttaggactaccaaaactatagccttgattctagaatttatttccatatagattagggtgccatgaatatattgagaaaatagagtagggtagtactttacagtatttatggagaaacaaaagccatgccatataatatgttgtatgaagagggaagtgtattgcttgtcttatgaacactgacatcagatctatgccagtgagtaatagaagactttattgttttgtcttctttcatcaacaaaaggcaaaacacacacagacacacacacacaaaaaaaaccttctttaatgtaggattttctgaaacaacacaaaatacagccagacctataaatatcctatcatttatttgtatatactccctgacatgttatattttgtgaataaatcccaggagtgataaaagtcttaaatcattttctgatactatttaagattctgccccctttcctccaccgttgcttctgatttaactcttccagccatgggatgttcagtgaaagaagacagttcttaaggttctttggtaattaaatcacaattctcacctaatgtgttttgtgtgtgtgtgtgtgtgttttcctctcaacagtcaactgtatgtgaactttttgtgagatagtgaagcacagtagcaaagaactctggccctgcctagagtcagactgtccaagttccagtcctgacttcaccatttaccagctatgagtcctttgacatttaaattatgtaaactcttttttcatctctaaaactgggatgataacagtaccttcttgtacgggtggatgtgtggattaagtgagttaaaagatgtaaaaccattagtgtaggtcaattagattagctatttctttattattattggaatggattaaatatcaagtccagctcccttactgcagttggattaagtaattgattcttattaaatgaatttaaattggaatcttggagtgttttaagtttcatattttaaaaattttagacctagtgggtagaatagagatcatccaatccaataatgtcatgttacagataaggaaactgacatgtgattatactcatggagtgagtaaaggcagagctgaaattgggcttgtcagacccccagactcctcacacagttcacgctctgtctgacaaccatcagggggatggtcctacattctctgtgtctccaagaattcactgatagcctaaaacaaacagatgctttatgtacaaagacaggaatgccagcaaacaatcttcaagtgtagcagaagatgtgaagattgaagcagagatgatgtggtttcagagagaaaggaagaatgagagcttgcacaaaaagccgccgtgtttcccagcactgcacaaagttcagctgtacttcctgtttgtacaaattcccaggatacctttgtatgctcacctcttccctcttctctttggccttctatttgcgtaaagaacagacttggccgggcacccttggctcatgcctgtaatcccagtactttgggaggctgaggtgggtggatcacctgaagtcaggagttcgagaccagcccggccaacatggtgaaaccctgtctctattaaaaatgtaaaaattagccaggtgtggtggtgcgcacctgtaatcccggctactcgagagactgaggcaggagaatcacttgaacccaggaggcagaggttgcagtgagccgagatcacaccactgcactccagcttgggtgacaaagtgagactctgtctcaaaaaaagaaaaaaagaacagacttgatctcagtatttaaataaggtactgctatatttctttaaataatgattgttaaaaatatcacctttgagtttcccatagatttgttctgcttaagcctgaggcaaaacaacaactttagtttatgtaggcctgatgttggaaagatcatgattttaaaaataacatctccatgaaacattgatgaatccatatttgacatcaaatggcagatgtactggagtttctgcactatgatatgttttgttttgaaagtgagattcacttacattcaaaagatatttattgtgtgtgaaaagcattttgctagacactgaggtagtttatactaaatgtaaagacttggaaccctaaaaaataaatctacagaaatttttcttcaccctgatttactatgtaaaccctattaagagttagcagtcttcctgccttctgcatttttcttccttttactagtacttctttgtaaaataccaacccaaatattctgtctttgtatggagctagtcaaagtggtgagtcctgtgaatgggcctacttgtcctcactcctcgatttggacatgactttaccttaagaaaatatttaggttttgacatcatttttgctaacaatactgtcactcagtgtttacagttcagtgttatgctaattcatgtagggttttttttctattactttctataaacctcttacaaataaaacatggagaagtagaatttataccagactagtttaaaaacacattgtgacaaatatattaatgtaagatgagaatagtagggaaaacagtgtggggtatgtgacaactttcttcacaactattctggaaatctaaaactaatttacaattaaaagtttatttaaaaaaaatcctcccccaaaaacatacacacaaaattattatgatgaaataaattgcagcaatttaatattagcatggtgaccagcttttattctgttcccctaaataatataaaataaaatgatcaaggctgaattatttcagtaagagaaacgtcattattcttatagaaagtcctagtttgaaaacaaacatttctaacagcaggttagaattagaagggaatacaagtacaaagtcttggtgttaaaattttaaaactaggattaaagttattatttgaaacattttgatttctcagggacaaaaacaaaccaaagacagttccttggcatacttttatctagagcacaaatgacctttataagttggtggggctggcatccccacctgagggcagtggttcatttttttatctccagccatggtccgtaatcatgaggttatcagtgatcagtgagtgtttcctgaatttagtggcaaggaaacattttcacttgaaataaaaataacagagaatctgaggacctctagaagtttattcctttttgaagctacttgcaaaaataaataagctaaagaaaacctttctggttaggttctgtgcattggtgatcttcacactgttgacttctcaggctgctgaaagtcatccagtagccccaatccccactgccaaggattgttccgtgtcagctgactcttcctgggaaagggctggtggcgatgatggggtcagtggcaccgatgctgcgattgctgggggtcctgtcatgggaattccacctgtctttttcagacctttggtgttaggactgtggcctgtgggaatgaggtgggattaggagtcaagcttggaagtgagtcttagatcctaaccccaccaccaacagtcacatttctctttcctcgtttgtctccatctcctctcccccttcaatcccccagcattcttgaaattttaggcagcattccaaatagcctctgacatagttcaacttagaccgaaacagttgtataatctctcctgggaaaattgaagccccagttttaatggtcagaatatttgtctggaagcaaaatgtccaactttatcacactagttttgggtgtttagaagggccctcatgctctgttattccattaataaaatataaatacttgctacctaaatagatggaacctaaaggtagtgggattactaaagactgtatcttgtgttttgaaagtaaggttgttaaaaagaagtctgtctgtctgtctgcctacctacctgtccctccatctatccattcacaccttcatttcggttgattcctatcattaggaatttttccaacaagaagggccatgacgcaagaaacagttggcatatcttacagacattcttatggtgacatagatattggttagaggtatgaggaggatcatctttagtgcaactaaaagttggaattagtactggactgtagtgccacaccagttctaaaaatgccagcactggactagctaggagtttgaggagtgactctggctttggctgctacagaaaagcagatgttactattcatgtatgcatagtcttgccactaagaatctattttattattattttgagacggagtcttgctctgtcgcctaggctggcattcagtggcgcgatctcggctcacagcaacctccgcctcctgagttcaagcgattctcctgcctcagcttccctagtagctaggactacaggtgtgtgccaccacgcccggctaattttttgtatttttagtagagacagggtttcaccgtgttaaccaggatggtctcgatctcctgacctcgtgatccacctgcctcggcctcctaaagtgctgggattacaggcgtgagctaccacactcagccttattgttattatcattattttctttcttttttttttttttgagatggagttttgctcttaccgcccaggctggagtccagtggggcaatctcggctcactgtaacctctgcctcccgagttcaagcaaatctcctgtctcaacctctccattatctgagattacaggtagccgccaccatgcctggctaatttttgtatttttagtagagacagagtttcgccatgttggcccaggctggtctcgaactcctgacctcaggtgatccacccgcctcggcctcccaaagtgctgagattataggcatgagccactgtgcccggcctattttattattttttagagtttgattatactttaccctctcctttagttgtatttcattgaaattggcattcatgattagttctatatttgtgatactattttttaaagactccagatgttcctaggtggttccacattttctaatctgtattaaaatcgcctgtttaaaaaattgtttacttctctgtcttctgtacttaactgtaatctctttgaatagaggggctcatcttgttttacttttgtcctcagcacctaggaaaatttctggaacgtagaaaacactcgggaaataatagctaaattaatgcttttaaaattctaaatgttatatggatttaatttgattaacaccctgtatttttattttatgctggagcaataaggggtatgggaaatacagagatttgaagttgtatgcatgctgtaattcatttttgttattcacatcaggattctgggggattttcagccctgtaatggcatctacatgtgactttgaactcagcctgctgtttccagaaagtgattgattggctggtggtttggctataatcttcattatttagaggtcatgaatttgacatgaaccagtgaatttattttgttttgtttgtttgctatagcaatttttaaaaatagcacacaaattattaaagtaattataaagcttgaaaaattcagagacacaggtagatgacaaatcattcataattctttacctcttagaatcaactattgttaacatctggggcctgtgcagtggtatgctgataaatgtgagcaactcgctctctgagcgtaattccaatatgaatgttggttgatatgtttgtttatattaatgagtaagataaacgtgaaacaaaatatgtgtcaaaaaccaaaaccaaaatatatgtcagagtttctattcatttgtcaattgcatgagcaacctctttgctgattcagatgatagttttcaaactggaagaatgtttcctcagtttttttgttcttgtcgtaatgtaacagctccacatataacatgcttttaggttgaacgtgcattattactaacattttctttgtcactttcttaagtttagacagtcaataaaatgataaagtaaaccctaatttgccagttttgtgggataaatattcccaccatggccaatttaaagctaccaatatgataccactggtgatagattgggaagagatgcacagtagcacgtcattagcagtagtaaaatttaagaaaataattaggaaatgatgaacctttaatattagctttactttaattgtaagtttgtataacttaatttttaataatggttatatttaacaactggcttgcaaaatttctgaaaattcaattgtcagctcacatgagctggctccagcacatcactgggtagatgcgttctcactttttttgtataaatgtaattatacaaatatgtgtgtggggtgtgtgtgtatgtgtatgtatgtatgtgtgtatgtatgtatgtatgtgttagtccattcaggctgctataacaaaatactgtagaccaggtggcttataaatgacaaacaaacaaaaaaatccacacttctcgaggctgggaagttcaagataagacaccagcagactccctgtctaataagggcttgcagtctggttcatagacagtatcttcttgctgtttcctcttatggcagaaaggcaagggatctctctggggcctcttttatgagaacattaatcccattcatgagggctctacccttatgacctaatcacttcccaaaggtcacatctcctggtaccaaaaccttggagattaggatttcaatatatgaatttgatggggatacaaacattcagaccatagcaaaataaatatatattttttaaagtaagattttacaaataacattgggattatactatttcgtagtttggggacttgttttccttgtagacatggattccggtgtcatttggtcatgcatgctcttttgctttggcacggtctgcactttgggccctttcacagtgcgtgcagctggtcacaaggggaggctagatgagaatagctgaataaaatgcttccagtgtggcaggaaagaagagggaatgaatggggatggggcagcctatgccccctgtgcagcaggcgagttatttcaaagtatgctgccaaatgagttttatcatttcccaggcagagtccttactttgagactatttggaaccttgctctgtccacccacaatattatgccccatcctttgttctgctgaactccatacctgccattttctactacattctctgctgtaccttcttggatctctcctgtctgcttctttaaactgaggctgataaaaggcacatttcctctctgtgaatctttttaaatatcctgaaaacagaactgtttgtttggggacagttgtactcagactcagagtctgtagtcctaatgaacagtcagtcattccccttaaatgatggtatcctcagatacataatatattaataatatcctaaaacatacttctttgtgggctcccaaatctagaaatttactgtatcttttgggtaatttcatgtaactattggtatttataattttaaatcactttaatgtccttcggctaccaaatatgttcttggtatctaatgggaaagttctccagtggctttgcaaaaaaaaaaaaaaaaagatgttagctggtgggaaggctgctagccctgcttgtctcatggagaaattgttgaatatttagagtaaaggtttcgtgcctacccactgctgaagtttctgttgcaatttccagagaagaacaaatctttgattgttaagaatgaattcagctgtttccacgttgtgtttatattcttggttaaagccttcagctttataacagtaactccttaagagctgcctatttttgaaagactcagttaaatgagtgtttaaaatgtttttttaattggtaattaaataatttatgcatttttatgaatttacattgttttgccgttatgtatatatttgttgcttcattatttctcaaccattgattgagtgtattttattttggcttagacatcactagatatttggtgaaaagctagaaatgtaatgatgtaggagcctctaaagggtcaaaggaaggcttagctaacctaaaacctttgatcaagtgatacaaagctaagaaatgggtggctagggcattcacatttgaaagatacgtatatatttttatatataaagataaatatatatttttatatatattttatataatatatattttatataatatataatatatgatatatattatatattatataatttttatataatataattttatattttatataatatatatttttatattatatatatattttttttttttttgagacagagtctcgctgtgtcacccatgctggagtgcagtggtgtgatctcagctcactgcaacctccacctctcgggttcaagtgattcttctgcctcagcctcctgagtagctgggactacaggcatgtgccaccacgcctggcttattttttgtattttttgtagagatgaggtttcaccatgttagccaggattgtctcgatctgctaacctcgttattcgcccgcctcagcctcccaaagtgctgggattacaggcatgagccaccgcacctggcctgaaagatacattttttaaagttatctgatgtggaaaaaatcttacagtgtcacaacaatttaaataatttatgtattttattaataacattcaaattttgctttttaaaaaaagtatctgcctcactatttcacataaagccttggcttcaaactgacctaatttctaggtttttagaaatgtcatttaattaatattttgatcattttcagatgcttaaaatatgtatttgtttttacttttaaaatgaccactattatcccttattagttttattttaatcgcataaagaatggagagagacaaaatcatgtttctcaccttttttctttcccttctgctgtctaaacacactgatttttcgtatgttttagaattaatagtagggttttatttttcacaggagaatattgcagtggttaattgagatgaatatgctctcgtttgaaaatatcacatgttgaggttaaggctcttcccaaatagtcacgtgcatgcacacacccccttgtttgtaacatttgttgctaacccagttccaaatattagctgcttctggaacatttgaatttttgtgctgattttgattgccacatcatcagtagatattagacacccatgccgtgcaactatcccttctgacgaattcaaagtaaattagaaggctgggtgtggtgaattgtgctgctataaatatgcatgtgcaagtatcttttcggtataatgacttattttaccctaaggtgcccagcacaatgcccggaatagcataggcattagatgtcttggttgaaaattaagattaactcttttttttttgagatcgtcttgctctgtcacccaggctggagtgcagtgtgtgatacctaggtagatacccaggagtgggattgctggatcaaatggtggttctacttttagttctttaaggaatctccacactgttttccatagtggctgtactagtttacattcccactagcagtgtcaaagtgttcccttttcactgcatccataccaacatctattaatattttttgatttttttattatggccattcttgcaggagtagaggggtatcacattgtggttttgatttgcatttctctgataattaatgatgtcgggcatttttcatatgtttgttagccatttatatatcttcctttgagaattgtctattcatgcccttagcctaatttttgatgggattgtttgttttttacttgctgacttgtttgagttccttgtaaattctggatattagtcctttgttggatgtatagattgtgaagattttctcccactctgtgggttgtttactctgctgattatttgttttgctgtgcagaagctttttagtttaattaagtcccatcaagaaaaatagattatatgttctgatgagaaccagcatactggagtattcagtatatgtttagttaaaaaaaaaaaactaatactataaatagcagatttttctaggtagtgataagctaatatcttttcctcttcccttttctccctgagaattttttcatctctggacagagggctttttcttggtgttttatgttttgtttgtttgtttttgagacagggtctttctctgttgcccaggctgggctgtggtggtgccatcctggcccactgcagcctcgaattcccaggctcaagccatccccctgcctcagcctcccaagtaactggaactacaggcaggcacgcaccaccacatccagttaattttttttattttttgtagagataagggtctcactatgttgcccagatttgtttcttattatatgtatagactctaaatatggaccttgatgggcctgcctttgatgttccgtttttgatatgaccaaatgattcctgtttgaatttccacccagcttcctctgtcctactttctcttgccaggcagtgtcccctgccagtctcatgtctgtggcagcagcttataccaggttttccccaaacgttcataaggaagtgtccgaagggatgtgtcacccctttgcatatatatagtttttgaaaccaggatgaccggtttgagaaaattcttttttcttttttttttttttttaagaacttctcttacatcttttaaagtcattgttaagtagggtgtaactggatgagtcagttgtttttcagaaactttttctttacgtatgatctaaagtattttatggcatggaatctgagcatgtcaagaggacttcttaaattgccttaattttttaaaatttgctgtaattatttttttaatttaggatttatgtgcaacatcattccaacatgtccaacatgtatatggcctgagaaggagattatattctaatagaggaactaatatgtaaaaacacctctctgataaaagattaaaaaaatatataaatgttctaattttaagaaaagcagaaattcaaatcataagctcttttcttatccacaggcttctcactagaccatgagcacctatgagcacctatgggcaggggccatgtcctagttaatcttctttctttggtgcccagcacaatgcctggaataacataggcattaggtttcttgcttgaaaattaaggttaactctttttttctttttcttttttttttttttttttttttttttgagacagagtctcactctgtccaccaggctggagtgcagtggggcgatctgggctcactgcacgctccgcctgctgggttcac

SEQ ID NO: 902 - DNA, 32744 bp, Homo sapiens
  source 1..32744: mol_type = other DNA
cccgcgcgcgggcagctcacttccgcccggcaggtgacagccgcggggctccgagccgccggcagcccggacgcaccgggagagcgagaggtggaggccgcggacattttggtgccaagccgaaccgagccggggcgccgggagctattgggacctgcgggtgaggaagcggggacccgggcgagccaggagaagaagtggggcgaggggtcaggggtcctaggtgaggggtttgcggggtcagaggtcatgaagaggacgcggcgctgcaggggcgcgagcgacgtccccagccagaggaggaggaagggctgagggttcgttcattcattcgcgcccacttggccgccggcctgttcctcggccgccccatacccgcagcacctcctggggcttccgcccggagagacaggacttaggccccgaggaattccccactggcctgagggaaaactcttcgggctctgatttcctctttcggactcacctccatggccatcctgaggcctcctcgttgttcagggcgttatctctttgccaaggttgaaaaagaagaaagaaaaaaaaactagaaaacggtcccgtgccgcccgcctccggctaggcactggcttggtcttgtttgttggagcctctaagacaagttaactgaatggagacaccggtgataatgctgcaaaataacgagggagatgcttgctagtggctatcgagtcccttctgtgtaccgggcactgtgctaagcactttccttacaatgacacatttaaacttcacagcaacctttgtggggattaaatatccctattttatcgatgaggaccctgaggcacagagaggttaaatcccacatgtaaggtcattcgggtagtagaggcaaggccaggttttctgccaggctgtcagagacctgcaaagtacagagacaaaggaaagactggagttaaggttggggtgtaggggatatttaagacttttagccagacatggtggctcacgcctgtaatcccagcactttgggaagctgaggcgggtggatcgtgaggtcaggagttcaagaccagcctgaccaacatggtgaaaccctgtctccaataaaaatacaaaaattagccagacatggtggcgtacgcctgtaatcccagctacttgggaggctgaggcaggagaatcgcttgaacccaggaggtggaggttgcagtgagccgagatcgtgcgactgcactccagcctgggccacggagtgagactccgtctcaaaaaaaaaaaaaaaaaaaagatttttagctgccgttgtatttatttggatttatgtcacgatgtagccttattgctttttgtctgatcttcataaggggcattcgacttactttctttaggataaaacaatcctacaggctgttgctattagtgatacctttcagggcaagagtctaagattttcctgactttagggaacagtgagacacaaaacaggctatccgtgaaaactatttgaagattgtcgagaacttctcttcagagtggttgagctgcattcgttttggtctaaaaagagaggaaccacatgacctctaggggatcttttggtcctaggttctggaagaaggtacccagaggaagaatctttgcctttctgagaaatatgcaggccccatggcttcttgccagagcagagcacgtcttacttgggaggtggtgagacggtttggtggctggaggactaggctgtatgaatctaagcctcattccattgcggatattcacttgcttcaattctgcctcagtttccctgacatcaacatgagaaagacctgccgccttcctgtctgctcctaggggtatgaacctgtgaatgaacccgtgagggcttccacatggcttctgaagaaagctgtatataaatattactgtaataccttttttttttaagctgtgtgatctattctcctagttccattgaattcacagaaacttaatattgtcaccttatattcccatccttccaagggaggatttgagatgaagcaacttgtcacagagggtaggaacatgagcagagctcagagcttctggttttctgtcctgagttgagcccaccagtctcctctgacctcttagaaactgtcatgaggagcatcttcagtaggtctcaaagagtcagatccctcagagattgtgtgaagatcatctgttgagtgtaggtcagtggaggcttcaccctgagctgcttcaagagcccagaggtatgatggaaagatcaccagactcccagtcagtcagccctgggttcaaccccagctcagcagcttcctggcagtgtgacctgacctggaccgttgacataggctggccctcctttacctcagttctaaaataatactggccaccctttctgactcctctacccctggtttgtgtgagggttagatgggaaaatttgtgcagggcctgtgatttttgggtgctttgactctaggcagactgatgcctgctgggggcctgtgtctgaggaaggctgccaaccttggcttctggagcgttacttccttctgcaaacagagaccttaatgtacgcaggactttttccacccttcttgtttcacttcctaaaagtagttcagaacaagttcaatttgttggtccttctggctttgagcttgggcttgcatctttttctagtcatcctctgaaactcttgcatgtcttaactacttcccaggaacttcccgtgtctggcaccaaagcctgacatgctgacagtaagcaaacatggcttgggttttgcacttcgctgtgtttctgaaggttgaggtgacatctgtgccttgcagacatttctttttctcagcaggtctttttgcctaagagacatcgttgatattatcacagcccagaagtgatttttctgttctttatgtcttcacatggagaggaacaaatactcctgagaaaaaatgtcaacagagcagttggggaatccttaaagaaaattctgcttgaaaattcatcagtggctcctagttgccctcgggctaaaactcacattccttagcatggcattcaaggccctttggactctgacccctgcctagctctcttttgtcatctctcctgctccacactcaccttttcccaagctccagtcaacctcagctacttgctacttctgcaagcaccaactctttttcttttttcgagacaggatcttggcttgttacccagactgtagtacagtggagctgtcatagctcactgcaggctccaactcctgggcttgaacgatcctcctgcctcagcctcccaagtagctagtactacagatgggtgccactgtgcctggcaaattgtttttattttttgtagagatggagtcttgctatattgctcaggctggtctcaaacccctggcctcaagcagtccttctgtctgggcctcccaaagtgctgggattacaggcgtgagccaccacacctggcctcccaactctttatacctctctgtctttgctttgcactcttccctctgcctgaacaccatttcctgctctcccaaccttacctgcctagctggagtgctacttggttcttcccatctgatcatcacccctaggtctgagctagatgcccctccttgatgccctctggcaagggtcacagtgggttgtgattgtttatttggctctcttctaagtaaatagctctttttttttttccagacagagtctcgctttttcgcccatgctggagtgcagtggcgcgatcttggctcactgcaacctccgcctcccgggttcaagcaattctcatgccttagcctccagagtagctgggattacaggcacctgccaccatgtttggctaatttttgtatttttagtagagatggggtttcaccatgttagccaggctggtctcgaactcctgacctcaagtgacccgcctgcctcggcctcccaaagtgctgggattacaggtttgagccaccgtgcctggccagtaaatagcttttaatccttgacgaagacctgccttaactacgtctccagcacctagtgaggtgtctggtacatagttggtgctcagcaggtgttgaatgagtgaatgaatgaatattgcattgaattgttaggattccttgactcctaaggggttcaaagcactttctagattatctcctgtccatcctcatgtcacctcatagagacagggagaaatctgatcagtgctgagactactttcaaactacagttggtaccaccagacagccatcagggtgtttcagggcttccagagacctgggaatctggtacggagcagggaagtggtaaactctctctctctcggtagtagtaatagtggctaacatttatcaggcattttgtgggccgggcactgctaagggctaggtatgtattgacttgttttagcctcacaaacccttcaggcatgtaacattgtagttcccattttacagttgtgctgcagttgtgcctgtttgctttgtagaacctgggagagcccctgtcctacctgcaatggctgccttcacctacccactccttgtgtttagattgtcccctcttatatagtggagctgaggaaggacttggctatggttctacactcctacacctcatgctgtctgggtctttagccttggacttgacctctgacctctgtcaggaagggaggcctctcctagttgtggtatgagtgtggcctaactctgggttgaccccacaaggcccagaattcatcagttactgggatgccttagtcactgatcccccaggttaccaccaattaccacagtctaccctgtggactcggagctggaaggtggtaggtttgaaagtcaggtctcaaaagcttttttttttttttttttttgagacggagtctggagtgcagtggcgtgatctcggctcactgcaagctctgcctcccaggttcacgccattctcctgcttcagcctcctgagtagctgggattacaggcgcccgccaccacgcccggctaatttttctatttttaataaagacggggtttcaccgtgttagccaggatggtctcgatctcctgaccttgtgatccgcccacctcagcctcccaaagtgctgggattacaggcgtgagccaccgcacccggcccaggtctcaaaagctttaaaactgaaccttcagtgttcatttttggcatttcagtagctgagttccatagaggaatagacttgggtggtagatactttttaccacaccctccttacatttaggatcttaagcctattgggagcagaataacacaatttcagtagagccagccttgggtctgctgctgtggtggtcttcattgcccgatctccgagtattgggtggctggctgctgggacactgaggacagagactttctaagtccagtattcattcagtatttatcgaggcctgctaatgcctggtgctggcctatgctgataggtcaacaggccagatatggcttcaggcttcagataagccctctagttgcttacttcattttaatgggagagagagacaaagaagtagagaaaaaaatgcaatgattagaaaaaccaataagccacaagggaaacaaaaggcatagcagccagaacttattaaaatataggtcagatgtcaggactcctctgctcaaaaccctccagtggctccagctcactcagtaaaagccagagacctcacgcttgatcataaggccccctgcattctcctgtgacttcctgacccactgttttcctcattgctcactcagccacattcacttcccttctgttcctcagacatgccaggcacatactcacctttgcactggcgatctcttttgcttggcaggctctttcgcagacagtgtcacctgtcaccttctcaaggaggccttctatggccaccctagttaaattttaacttcccttcctcccctctcccctccctatcctccttccctcctcttttttgcctccattgtgtttatcactatctaagatgttatatattttactcacttatcttgcttacggtctctttcccccattaggacataaactccatgtagggaaggatttttgtctgtttctttcactcctgcattcccaacatgtagaagtgtttctggtacacgaaagatgctcaggaaatgtatgaataagaacactgaaggatgtggacagagaaataccttcttaaggttgtacatgcatggccaggtgccgtggctcatgcctgtaatcccagctacttgggaggctgaggtgggaggatcatttgaggccaggagttcaagaccagcctggataatttagcgagactccacaaaaaacttgaaaagattagctgggcatggcacacgcctgtagtcccagctactcaggaggctgaagcagaattgcttgagcccagtagtttgatgctgcagtgagctatgatcacacccctgcactctagcctgggtgacagagcaagactatctgtctctagcaacaacaacaaaaaagatagtacatgtaggaaaggtattttttttttgtttctttttttaagcatcagaggtatcacgctgaagggaagttatctttgaaatgagatcatctaagctgagatttgaaggataaattggagcagttaggagaggataatccaagcagaaggatcagcaagggtagagatagtgaagagttggctgttagaggaacaaagaaggcatgtgggcctggaggcaaggacctggtacttatatcctgtgccagagccccccaccttctgcagctctgtcactctgagctgatacctatgggagcaggtgagagtgacttggcctcactgaacgtttctcccactggagatgttgccacctgatcttctacccttgccatttcttctctctctcataatttattcacttaacttccatttattggctgtaaatgtgctaggggtctggcatgttcaatttcagtatagttagaatagcttgacaatcagagcagatgtatctctgatcctggataaccccgtgaatggaacatggagaagctgctctagcagaggttggtttacaaaacatgaaatttgcccaagaagagagttgagcactggtcattcagctacttattgaacacctgtttgccaggtaccagcctaggagtcaggaatatgatagtgaacaaaatggacaaaatccttacccccatttacattagggaatttatagggggagaaagaatagacaacgtaagtatattttatagtgtgtaggtaataggtaataagtactttgaagggaaaaagggcaaagagggttaggaagtggtggggattatgggggaggggtatacaattttaaataaaatggtcaaagaaggcctcaatgagaagatgacatttgagccaagacctaaagaggtgagggactgagccatgaggctgtctggagaaagagccttcctagcaaagtgaatagcacgggcaaaggccctggggtggatgcatgttgtgttcgaggatcagtaaagaggcctgtgcggctggagctgagggaatgatggggagaagagttcaaagggtaatggccagcagggtgcatgcgtgagagaggaggggcatgcatctcttataggacctgtgggctatgaggccatggtagggactttggcttttactatgagtaagacagagaaccgttggaagacgttgagcagaggggtgctactgtctgatttggactgtaagaggatcatcctggctgttgctgagatggggtgtcagcaaagcagtgtgggagcagctttgttagcactctaaatggaaggtgatgctggcttggagctggggttagtgatggagctagtgagaagctgctcatggattctagattcattttgaaggtcggaatccaataggatttgccgatagatttaaaggagagtatgttgttaagagtgactcaggtttttagcctgaggccctcttaaagatggtgctggcaggaactagatgatgtagactgcagggtgagccagttggggaaaggaaggaagcaggaggtcagtttttatcccattgtttgagctgcctgctagtcatctccacagtaatgtggagatgtcagttacacagtttggacatgtgtgcccgggggttctggggagaggttgggctatgtggatggtatgtaaagctgtgataccggatgatccaccaaagaggcaaaatagcatagatggggaagagaagaggtaccaggcctgagccctggggcacacagtgttgaaggagaaggagaggaacaagcaaaggagactgagaaggcgcagacagtggcgtaggagggcaggcagagagcatggcatcctagcatttgagggaagacaggttttcaggaaggagggagtgatcagtagtgtcaaatgcttatcagcatgagacttgtcatttgacatgaccattgtgtcttctcctggcaggacccaacacacctggcatccagaaccatttctgaatctcattcttccttccctagcctcgtctgctcctttcccttccaggtcctttccttcagccaggcagcggggctcacagacttcttgttttggccttaggtaaatcactcatctctcagtgtctctaattccttgttttttaactgaattaccctgagaattaaatgagaagggttgtaaatcacttagcaagaagccgttccccagctagtgttgatttaattgttgtcagttccctccgttgtcacattggcaatttcgtggtgcatctctttgccacctccactcttgcctctctaaatctgacctgtctttttgcgtcagccaagcccctcttcatctaagagaacttcccttgctgctccacctatctcagaaccctcctcctctggaggcatgatcactctgccgttcccctgcagtcctttacctggcctctaaatctgtaagagctcagtgagaaaagactgtcctttgtttactgtgtgcatgcttccgtgtggggcacagttccaggcatggagcggatggtgctctacactgttaatttgacagatcttcagaaagtgttcccattacatagatgggaaaaccgagatcacaaagagcgttgttctgtagtctctggcctctttctcctcatctcgattaatttaagtattgttcagaagaagccttacttactttattttcaagtccagaggaactttttctttttttgagatggagtcttgctctgtcacccaggccagagtgcagtggtgcgatttcaggttcaagcaattctcctgcctgagactcctgagtagttgggactataggtgcgagccaccatgtccagctaatttttgtatttttagtagagataggtttcgccatgttggccaagctggtctcgaactcctcacctcaagtgatctgcccacctcggtctcctaaagtgctgggattacaggcatgagccactgcgcccatcacttttttttcttcacagcagatctttccgcacattacggcttatagatcagttcagaactggtacctgattctagaatggagttctagagactcaaagccaatataagaacgtttgcatgtgacatttgtctgcctttagttccttttcattctgaagtctttaattgctagtgggcctcaggaaactgacttttttttttttttttttttgtgggacggagtcttgctctgttgcccaggctggagtgcagtgacacgatctcagctcactgcaagctccgcctcctgagttcacaccattctcctgcctcagcctcccgagtagctgggactacaggcacccgccaccaggcccagctaattttttgtatttttagtagagatggggtttcaccgtgttagccaggatggtctcgatttcctgacctcatgatccgcccgcctcggcctcccaaagtgctgggattacaggcgtgagccactgcgcccggcctttttttttttttttttttttttttgatacggagtttctttctctcgcccaggctggagtgcagtgtcacattcacagctcactgcagcgtcaacctcccaggctcaagcaatcttcccacctcaggctcctgagtagctgatactacagatgtatgccaccacacctggctaattgtatttttgtagagatggggtttcgccatgttgcccaggctggtcttgaactcctgcgctcaagagatctgtctgcctcagcctcacacagtgctaggattacaggtgtgggtcaccgtgcccggccaggagattgattttgactaatcagttttcatccaaatcccaggaggcccataacttggcaagcgcacccagataggctttcactaggcacatgaccaaacttgacgttccctgttgtccaaaccggctgggctggccctaaaataacctgtaattcaacatctgagggactctgcagggatgtgtggcaacccatttcacataccctttaccctagagcatgtatatttctgccagggcttcattcagagaggagcagttagttgccttgctggacagagtgggacatgtgtgaccttattagggggcagcagtggagagtgccggcactgccattttctagctgtgtaactccaaacaaatgccttgacctccctggtacttcagtttcctcatctgtaaacttgtgataatattaaaaccttcatggattatcgtgaagactaactttttttttttttttttgagacagagtctcgcactgtcacccaggctggagtacagtggcacgatcttggctaactgcaacctccgcctcccaggttcaagcgattctccttgcctcatcctccagagtagctgtgattacaggcgcccgccaccatgcctggctaatttttttgtatgtttagtagagacaggtttcactatgttgaccaggctggtctcaaacccctgacctcatgatctgccagcctcagcctcccaaagtgctgggattatagatgtgaaccaccacgcctttccacgaggactaactttaaagctctttacatagtgtctgtcacatggtgcacatccatttaccattactactaccactgccacctttgttccaaatttcatgctgagcctaaagaacacagattattttctcatagtgattgaactgacttggaagagcctgtctgaatttggtaaccacgttttctcagagagaaagtctgaaatctggtttttctactgctgactcaccttttagtcttccagctggccttacctgtttccctgtctgtaaagtgaacttaagtatttacctataaggacctttttcctttttttttttttttttttttttttgagacagggtctcactctgtcacccaggctggagtgcagtggcacggtctcggcttactgcaacccccgcctcccaggttcaagcgattcttccacctcagcctcccgagtagctgggattacaggcacctgccactacacccagctaatttttgtattttcagtagagacagggtttcaccatgttggccaggctggtcccaatctcctgacctcaagtgatcctcccacctcggcctcccaaagtgctggattgtgggcatgagccagcatgcccggcccctttccctttttaaaaggagattgtcagacaaatgaggagtggtgaatagcgtcatcatctctaacgaactctaagctttgtgggagcaggtacacagtccagggcatggcacagagtagaggaatacttgtcaaatgaattaacctctgcctttgaaacagaaccaaagcagcaaaacacatggaatgaacaaagtttggcctttctgctccaaatgaagaagaaacagtggcatcaccccagcccctttttttccactcttccctaacttcctcttgactgtccatgagctaacaggttctatggagcaggtttctgacagctattcattcattagggaagtgtttaacagtggcagttccagtaccaaagttggaagccaccaacatagaccttcagagatcagttttccctgcttgaatgtccttgagttcagagatagagatgcaactggatctgaccttgtgaaatgtctctttccccttttcctttcctaaagctttttctctgcctcatctcaccacactgatggtctccttcattaattcactgagtgccaagagtgtgcagtgccttgtgctgccaccaccaacttcacacttctcatctgattgaagagcatgggctgctctgacatgaatcattgcccggagactagaaaaggccttcccctgacattggctggccatttggagaaattgaaacactctgttgtttggcttcttactgttttccttcctacagaagacctaatggggtttgctggccttggctgcattctgaatttgttctctttttttccctttggaaacatcttatgtcatgttcttagaatgatcatactctacttcctcgtgtttgacacctgggaagaacactcattggtagggaaatgggcccctcatccagcagagaatcatagaatgtgagatgtgggagagatttgtcattcagtagactggttttcaagctttgctccatagaaccacgggatgtctgaagggccgtggtgaggatggggagaggtaggcatagtgaaatgagccaggctctaggcctcccacccttctttccaccagaacagttccacttttatctgtttgaaatggtttaagagtagagagggacttgagccattgattaatcatattcttttgtttgacatttggagaaaggcaggcccagagatgggggtagttgcccagggtcacacagctgttggtagtagggccagatttcctggcagccatcttgacattgcatcagccttgccatgttaactgcaaagccttatgttcccagtctggtctgcccagtcatcactgtctggcacttgtcacagctctctcatcttaatctgttttgggcccttggttttgtagcttctctgggaaactgtcttttcattcattttgccagcaaacatttggtgagctcctagaatgtgccaggcatcgtggcagtcactgggttgacagcattcaacaggacagatcccaaattaggggaggaagtctgtggggaaatctgagatgctttttttttttttttttttttttttttgtgatggaatctcactctgtcacgcaggctggagtgcaatggcacagtctcacctcactacaacctctgcctcccaggttcaagcgattctcctgcctcagcctcccgagtagctgggactacaggcgtgtgccaccacaccgactaatttttttgtgtttttagtagagacggggtttcactatgttggccaggctggtctcgaactcctgaccttgtgatccacctgcctcggcctcccgaagtgctgggatcacaggcatgagccaccgcgcccggccagaactgcctattcttttgcatggttgtatagtattccatatgtccatatgctgtgctatcattttatttatgtatagagttggggtcttactgtgttgcccaggctggcctcaaactcctgggctcaaactatcctcaccactcagcctcctgagtagctggagccacagatgtgcccagctctactgtgctgtcattttttaaaacaatcctgtggatggacatttacagtattttgctattagaaaggatgttgcatgaataattttgtatctacgtagttttccacatgtaaagtcctagaagcagaattactgggtcaacgggtaaggacctttgcaattttaatggctgttaccgatttgcttcagaggttgtagcgtttcagactatcactagcctcaaatgagggcgcctatttacctatgtcagctccaacatggggtgttattagactcttggctctttatcagttcagcagctgacaggttatatttcaccgtagtttcagtttctgtgtctcttagaaataagcttgaaccattatattaattcactttctgtgaactgtccacatcctctgccattctcctatttgtagtcactttttatataggaaaataggccttgtctgcaatgtgatgcaaatgttagtgagtatgtttatcatacggcttttggctttttattgttttggccatgcaggaaaactcaatttttatggaattgaattcatggttcttttaagatttccagatttgatgtcacactccaaagactttcctctggatgcaatgtttcattcttcctttcttctccagatttgagttttattttgttatttttttaaaaacaaaatttttttttagacagagtcttgctctgttgcccaggctggagtgcagtggcgccgatcttggcttactgcaacctctgcctctggggttcaagcgattctcccacctcagcctcccaagtagctgtgattacaggcatgcaccgccaccatgcccagctaatttttgtatttttagtagagatggggttttgccatgttggccaggctggtcttgaactcctgacctcaggtgatccacccccctcagcctcccaaagtgctgggattacaggtgtgagccaccgtgccttgccttttttttttttttcagaccgagtcttgctctgtcgcccaggctggagtgcagtggtgccacctcagcttgctgcaacctctgcctcctaggttcaagcgattcttgtgcttcagcctcccatgtagctgggattacaggtgcccactaccaggcccagctaatttttgtatttttactagagacgggtttcaccatgttagccaggccagtctcgaactcctggccgcaggtgatccacccgccttggcctccgaaagtgctgggattacaggcctctgcgcccagcacattttttaaaatgtctgtttaatttacaccaagtgacatgcttggctcttaagtgtacagtgtgtccagtatctgcatcaggatgcagatcatttcccttactgcaggggcccttcatgcccactttcagtccttcccacccagaagcatccactgacctgactgttatcaccgtagcttaggtttgcctcttagagctttgtacacatgaaatcttgtgatatttatgatgtttacattttttcttgtcaacgtgctttcattctcacattagcccttgtcagaagaaatatgtgaaatacacagaagagcaggtacagcagtccccaccccccactctttttttctttttttgagacacggtctcactctgtcacccaggctggagtgcagtagtgcgatgttggctcactgcaacctcctgcctcccaggctcaagtagtcctcccacctccgcctcctgagtagctgggactacaggtgtgcaccaccatgctaatttggtagagacaggatttcaccatgtttcccaagccagtctcaaactcctggcctcaagcaatttgtccgccttggcctcccaaggtgctggtattcacaggtgtgacccacaacacccggcttgatctccccattttaaagagggaaattgaactatggagatgaagtagactcagttcagcatactttccttttaaaggttgtcaccaattttgagacattggagaaaaattgaaatactatacttagtacccattttcttatgtttttatttttttcattctcaaaggaggtgattttcttatgttttaaaaatagatataaattcattttattagcttaaaacacagaaagatagtctatatttcttgttcctaaaattatatttagatatatgaagacaaaatttgaaaaatattgagaactttttttcctttaagcctaaccctaacttcagcagctaaaaaccaaagtctttagatggaaatgttttttcttcttcccttttttttccttaggacctaggacctctttttccctctcttagatcatgttacatctttgtccctggacactgtttccaaaagtctcaccaagggcttctttatacatctagaaaacataagagagaaagctactatattttaggctttattgctcagttccttttcttttcttttttctttttttttttttttttgagacccagtttcgttcttgttgcgcaggctggagtgcaatgctgcgatctcacctcactgcaacctctgcctcccgggttcaagtgattcccctacctcagcctcccgagtagctgggactacaggcacccgccagcatgcccggctaattttttgtatttttagtagagatggggtttcaccatgttggctaggctggtctcgaactcctgacctcaggtgatctgcccacctggacctcccaaactgctcggattacaggcgtgagccaccatgcccagcctcagttccctttctttaattctaaaaaatgaagttaaccagaactgtttctgggatgtgacatcaaagtcataatctttcaaatgtgggtgtgagaaatattaagattaagagaggacagccacactggctcctcaagggtgaaaccagttgttccaggtatgcccctcttttaattttgaccatgccatccccttgaggcatttcttggcctgtaaatgctgaaattgagggggggatcccagcccagaatgctgtctccttagcaaagtgactcattatactggccagagcagtttctgaatcaaaaattccccgtaattaaccactttaaaaaatttgccctgacacttccaaagatggaatccaaaccctaagctttttcttgcctaaatttgctggctttttttttttgagacggagtctcactctgtcgcccaagctagagtgcagtggcgcgatctctgctcactgcaagctccgcctctgggttcatgcttctcctgcctcagcctcctgagtaactggaactacaggcacgtgccaccacacccggctaattttttttatttttcatagagatggggtttcaccatgttagccaggatggtctcgatctcctgacctcgtgatctgcccacctcagcctcccaaagtgctgggattacaggcataagccaccgcgcccagccgctgcctgctttcaaatatgattcgtgtacccgatcagattcatcagagaacaaggtctcagcccctttggcctctatggggtagggatacagtgcatgataacagccaagcaggtgccaggaaaaacaccagtctttctcatggcatctatgagtctgagccccgttaggactgaactgtagggttttttccattcctgcggagagaatgagaaatctcttgcactgatatccatccaagaggcaactgcaagaccaggtaccagcattaggtgctcacaatggagaaaggacacgaggagatagctgccctcagtacatcactaagctgtaggtagggaatcattcatggtgaagtgaggtgttttgttttgttttgttatctgtgttttggggtggctttctaaagcgtttcacttttctccgcatctcctcccttctctactttaatttcctgcatatgaaacaacttcagagggatacatttctgcatcatcagtcccattgggccctctgcagagggatatgtgaaacagatactgcggaaaaaagctgcagccagcaccagtgcactgagtggcagttaagtttgtgagtagttgcttagcacctgtaaaaggaagactgtcacggaaagctcagcgctgttggggtatctgcagctgtgctttgaccagctaccctgcagctgtgctttgaccagctaccctgcagctctgtcactttttttttaaatccccagaaagaaaggctttctcacccgtttctcctcttggtcagttgcatacagcacccatctgtcaccagcaggttgcgtcctgggaatttagggccctctgatgttgtattgggcctgcaggggaggggacaggctctgacggctttttcttctggagaggcaagaaattccgagcagctctcacattagttatctaaggtattttgtttgttttattcacttttctttctttctttctttctttttttttttttttttgagactgagtctcactctgtcgctcgggctggagtgcagtggcacgatctcagctcactgcagtctccacctcctgagttcaagcaattctcttgcctcagcctcccgagtagctgggactacaggcacatgccaccacgcccagctaattttttgtattttagtagcgacggggtttcactatgttgcccaggctggtctcaaactcctgagctcaggcaatctgcccacctcagcctcccaaagtgctaggattacaggcatgagccaccacgcccggccacttttgtttctttttagatttaatgttggagtggtttctgtgttactttctgtgtttctttgtggcctgtgagttttagccccttttgtcttcagttatccctcttacactcaaccttgagaaatgatattatcctattattttggatacttttggcagttacactctcaagtctgtgacttctggaaccatgcagatctttattgtaagacagaaatcccattatctgatttacctgcccattttcagaggtccccaaagaacccctaggttggtgaggtttctttgagaaaatggctttatgtgtgtgcaaaaaaaaaaaaaaaaaaaaatcgtttttaatgtcggtaaattcctgttggaaacaaatgctaactagttacgtaacagggctgccagagagcaggctgaggctccctgggattttcagtggccccttttcatttctttcaacaactatcaattgaatacttgctatgtgccgggcctgggccaggcatgaaagaggagggcgaacgggagctgtgagcctggcgcatgcggggccttcctttgtggatctgtctacagccatgactcatgctgggaggaccagcaagtttagagtccccactgtgggacttgcaacatcagacgcagtgggctcttctgctctttcctgcagctcccatagaaaagtgccatccttccttttcaactttgcaaagcaaaagggaagtagaattgtgcctttttttgtactgttttgtcagtgaagcctttattcctttattccttcaggatccacaaaggatttaaggtgaccccaagacagtacgtatttgtttcccagtgattactgaaacaaaatctatgggtgtctctcggttgggaggcttgctcagtgccatcctgccataaatacaagcttaatttggaaaaatccaattgggctggagaggaggtgctgtgttggcttggtttccagaggctgtgaaatgactcctgatccctcacatccgttgcactagtaactttcatcttgcccccgtatagtaatgacttgaaaggagatattggtgggttatttgtttgagtcccttccatagacgcaacaaaagagataaagtgaagtgggttttctccattcaaatgtctgttttttggagttgtgtggttttctataccacataaaactacaggtaggattggaaggctgtacttgaaagtctcaatgtgttttttttttgcgggggtggggcggggagacagagtcttgctctgtcaccacactggagtgctgtggcacagtctcagctcactgcaacttctgcctcctgggttcaagtgcttcttgtgccactcagcctcccaagtagatgggactacaggtgtgcaccactgcgtccggcctcaatttttttttttttttttgactgaatcctttagccactatcagggaactgtcctcctcgtcagaagggggaaacagaattccttcaatagagcataggaactaagctcaggtaggcctgagatggtctcccagcccagccacttacaagccatttgaccttgggcacgtcatgtaacatcgctgagtccgtttcatcatttgtaaaatgggattcaaagcagttacattattgacaagattaagtgagataatgtgggcgaagcccctgcctttaataggggctcagtaaatgatagattcttaataaatgtatctagggtatcttggttcctgtgtaacttcttttctttcatctgttgcccagaagaactactgaggtacataggagatgctcagtaaatttttgttaaatgatttttgttaaatgaatggcagagcttcagtactttctttgtcctattgtcttttttttttctgagacagagtcttgctctgtctcccaggctggagtgcagtggtgtggtctcagcttactgcagcctcagtctcttgggttccagtgattctcctgcctcaccctcccaagtaactgagattacaggcacacactaccacgcctggctaattttttgtatttttagtagagatggtttttaccatgttggccaggctggtttcaaactcctgacctcaggtgatccacccgcctcagcctcccaaagtgctgggattacaggcatgagctgtggtgcccagcccctattgtctacaatagtacttcacgctgtgagctttgcgctaggagatgtcctgagagagcctttaagaaaactggccaggtagatttgggaactgctgtagagtacagattctagccctttccagagatgaatcaggcatgttactattttagcagcttagaaaagttgtggggagaagaagtctccctagccttttaagcttggtattttctaatcttatttgactgtatagggtaatatcgtgccttgatgatgctgtgatgaggctcctaatgagttaatgtgtgccaagcatttaggacagtgctgagcaaagtgggtcccacaaaggggctgctgtaagcccatccatccttgtgcagatatttttgtgggaaagatttctagaagaggcacattcaaaaatttgatgggatcaggtgtggtggctcacacctgtaatcccagcactttgggaggccgaggcaggaggattggctgagcccaggagtttgagaccagcctgggcaacatggtgagatcccatctctgaagaaaaaaaaaaaaaaaaggttgatagattcctcagaattacttttcaaaatctaatctgccatgatctaaagtttgtttctccaggaaatagataagcagctgttttcctgtaccacatgtgttctggatccttctcctccctctgcaccataactgaagatgggatggagcataactgaaagtcacccctctcttctctctcttgcagaagcctggctacagataagggaccaaaatgactgactcaaaatatttcaccacgaccaagaaaggtattacttgtttaataatgggccttgtcctatgctttctcttcctgtcccttctgttttcctcctatggcggtagggagtaggggtgggaatgaaggcctggaaacatgtggcaggaatggcctagagcttgtggtagatctagaaaattgaactgttgatgatataagaaattgaccactccttttagagctcagaaagggaagaacattagctccaagtgtggggaaaaaaagtgcccttttatttcccatggcttaaaataattatgtttttttccaggggaaagaaaacacagaatcctatcaacacccccacagcagttgtgtgtgtgtgtgtgtgtgtgtgtgtgtgtgtgtgtgtgtgtgtgtgtccttatccaagggcacgtgtttttctttttttttgagacggagtttcactcatgtcacccaggctggagtgcagtggtgcgatcttggctcattgcaacctccgcctctcgagttgaagttattctcctgcctcagcctccggaattgctgggattacatgcgcccgccgctatgcccagctaatttttctttcttgtttttttgagacggagtttcgctcttgttgcccaggctggagtgcaatggcgctgatctcagctcaccacaacctccgctttccaggtttaagtgatactcctgcctcagcctcccaagtagctgggattacaccaccatgcccggctaattttgtatttttggtagagacggggtttctccatgttggtcaggctggtctgaaactcctgacctcaggtgatccgccccctcagcctcccaaagtgctgggattacaggcgtgagccaccgcggccggtcaggcatgtattttcatcgttttaatcctgtttttcatttgatgttttgatatcataaacatttcccaacaattctaatgactcactattaagtctattgagtagctacactgaaatttgctaagctaggcttatatcattgggtattttggttgtttctgcttttaaggaaatggaggatgtcgtcgtggctgacaaatgtgctttaaccctgtaagcatctttctggccagccctttattcctccctccttccttccaagtgatactgacacatgcctgccgaccagatgaaaagagtctgttgctggatcagctgatccaggacccgaagtctgcccctcatcaggcatttcatgtattggtctagctggtttttactgagaacctaccatgtgcagtggaaaagaaacagagcctctgacctggtgttgctcaaggttgagcagggaagacagtctgtagagtagtaaccacactgaagtgtactgggtccaggggggactgtgggagagctctgggtggagctggccagatcgatgggggataggaaggggaaggagtgagtgctgtgcctgtgacacatttggggaaaggaaggtagtgggcatgagctaccgaggagggtgatacaagaagaggttagagccaggcacagtggcgccccaggtggtggcttgggtgggaggattacttgcttgagcccaggagttcgagtctagcctgggcaactaattgaaaaaagagagaaagcaattggagaggtacgcagggatcagtcttgtggagcctggtgagccacagggtgaacgtagtgctgagtgtattggagtcccaggggtgggttttgttgtttgtttgtttttttttgagacagagtctctgtcacccaggctggagtgcaatgggaagatctctgctcactgcagcctcctgggttcaagcaattctcccaagtagctgggactacaggcacgtgccaccatgcccagctattttttttattttggggttggggttttttagtggatttcttttgggaagagagatgtgtggacagacatgcctgggttcaatgctccagccaaagagacaaggaaacaggtttaggaaagcaaagtgggtatcttgggtaggcccaagcatagggattgagagcatgggctttggagctagcagacctggttttcagtttcagccctgccccctaccagcattggctatacgttactgagcctctcacagcctccatttgcaaaacggagggaaatgcagagttgtgaggatgaaataagaaaatgtgtgggaacaagttagtatgggactaggcttagagaagggcttagaggggccgggcatggtggctcaggcctgtagtctcaacactttgggaggctgaggcgggtggatcacctgaggtcaggagtttgagaccagccgggccaacatggtgaaaccccgtctctactaaaaatacaaaaattaggagggtttgatggtgtccgcctatagttccagctatttgggaggctgaggcagcagaattgcttgaacccgggaggcggaagttgcggtgagccgagatcgcaccgctgcactccagcctgggtgacagagtgagactatgtctcaaaaaaaaaaaatggccgggcgtggtggctcatgcctgtaatcccagtgctttgggagaccaaggcgggcggatcacgagatcagttcaagaccagcctgaccaacatggtgaaaccccgtctgtactaaaaatacaaaaattagctgggtgtgatggcgcacgcctgtagtcccagctacccggtatgctgaggcaggagaattgctggaacccaggaggcagaagttgcagtgagctgagatggggccactgcactccagcatgggtgacagagcaagactctgtctcaaaaaaataaaaaataaaagagaaggggtcaggaaatgacatctgccctcctaacctgttatcagggtcctgactatctgtccatggcagggccagacaaccctgcttcctcatttgtttttttcatgtcatgaagttcttcagaacaattgatttcatgcttgagctctcatggagcagctgaattcctgttttcagagctgagcaaccaaccacttgtgtctcaggaagtgaaaccctgaacaagctgttttaattagaggtttgaggaaaacaggaaaggccttcatgtgggaatccacaaatcctgctctcaccccgcaagccttaagtactcaggttctattgcactgagccttttaagggtcttttgttgagtgagggtagctgaggacagctttgccttccactggggttttagctccctggctgagcagagcctgccatcatgtttttgatgcttttgtcttcctcagaacctttgtagcttccatggttcctgttgcttcaatccagagtggcctctaaactttttttttttggagacaggatctcactttgtgtcccccaggctggagtgtagtggtgtcatggctcacggcaacctcgatctctgggctcaaacgattcttcagcctcagcctccagagtagctggcacggcaggcacatgccaccacacccggctaattaaaaaaaattattttgtagaaacgaggtctcactatgttacccaggctgatctcaaactcctgagctcaagtaatcctcagcctctttttttttttttgagatggagtcttggccctgtcgccaggctggagtgcagtggcgccatcttgcctcactgcaacctccacctcccggattcaagcaattcccctgcctcagcctcccgagtagctgggattacaggcacgcgccactatgcccggctaattttttgtattttaatagagacaaggtttcactatgttggccaggatggtcttgatcttctgacctcgtgatccgcctgcctcggactcccaaagtgctgggattacaggcatgagccactgtgctggccaatcctcagcattttaaagtgctgggattacaggtatgagcgactgcacccggcctacaagtttccatcttgttaattcctgtcctaacagtcatccctcactgttgcctggcccacctgaggccaggcgcctgaagcttccctcagccaacagcataggatgtcttacgtgcctccctccggttcttttggaagttagatactgggaattgtcccctgccagggtagggagggatcactcatgcttgcctcctttccttaggggagatcttcgagctgaaggcagagctcaacagtgacaagaaggagaagaagaaggaggcagtgaagaaagtgattgcatcgatgaccgtgggcaaagatgtcaggtgtgcaggagtaggcctggtggcagctagaagctggctgacaggggagggtttatagcttgggtccacttcagtctctcctttagggtgtctagggacccatgtctcccctcatacagctcccttcataaaactttcttcccaatagaaggttttgtttacacaggaatcatgagcccagacactgacaggtcaggtggttatggagtgagttaactggagtaggtgggaaaggcagcaggcaatggagtgggtgtggcatgaaccctctcagaaactccagaggatcagtactggctggggaagaggacccagtgtggccaggtcttctggtttttaaaagaatgggaaatctgggccaggcgcggtggctcacgcctgtaatcctagcacttggggaggcccaggcgggcggatctcgaggtcaggagttcgacaccagcctggccaatatggtgatatcctgtctctactaaaaatacaaaaagtagccgggcatggtggcgcatgcctgtagtctcagctactcgggaggctgaggcaggagaattgcttgaacctgggagacacagggtgcattcagctgagattgtgccactgcagtccagcccaggtgacagagcgagactcagtctcaaaaaaaaaaaaagaagaatgggaaatctggatttttcattttaaatctccctgtcttaagtggccagatgatattaaacaaacactgtgtggtgcaagtaaaacacacgtgcagattggatttctctaatttgtcaccggtgtgcagcctctgtcgcacctgatggctaaagccggttgtgtgtagagcggctgccgcaccttggctcatgcttcccctgtgggagcgcccagtgacccagcttgtcttcccatctttaaaaacccattcgaggccggatgtggtggctcacacctgtaatcctagcactttgggaggccgaggcgggtggatcacgaggtcaggagttcaagaccagcctggccaacatggtgaaaccccgtctctactaaaaatacaaaaattagccaagcgtggtggtgggcacctgtaatcccagctacttgggaggctgaggcagagaattgctggaacctgggaggcagaggctgcagtgagccaagatcacgccactgcactccagcctgggcaacagagcaagactccatctcaaaaaaaaaaaacattcaaggtctgccttccctgtgtttccttccctgatcaccccagcccactacctcaaactcaaagcatttgctgtctgttcccatcacccagcactaaatggaaactgttctcttgttatgtgtacttgtgtttacctgctcaccagattgtaaaatctcaaaggcagagactggattttaaaacagcttgatatttgcacagtatttgagagtctgcacagaacattttgagatttgttttctcagtagttccttacaattcccatattgtaggtaatgacagttttactgccaaagaaataaaaacataaagtgactgcctaagagtcacatggtttatggcagaactaggactcaagcccagttcttctgaaatccaaatccaggccactttcacccatgccctcgtggtgcccagccctgtgcctcataacccgggtgctgaggtggagcagctcccatccaggtcccaagataggctcccactgctccagacgtccccatggatcgccccccaagcaaaggacctcctgccagcagctccgggaaggggctctgcagagagccctttggaagccagagcagaaaggaaacaggtacctgctggacaactgggcctccttccaagtcagattccttccaggacaaagctgctctccttcacccagcacaccactgtcacctcctcacagaggagaaacatctttgttcttccatctcaaaagagctggctttgctgatatgataagccccaaagagcgagtcggcctcatcagcagtttttcctcctccctcctccccattcttcctggtgcatcatcttccaaggtgacacataaattttggctttggcaggactcctgcctgttggggatcaggaagttcactttgacctcctaagtctctatgttgacacgtcctttcctataaacacataagaattgagaggggatatgatgatttcagagatagaaaattgatctctaaccaaatttcacatcttaagaaggcctgtgactctgggaccacgggtaccatgttgagaagggttccacccagtggtcatgagcacggaccttgttctcagacctgattcctccaggcaggttatttgacatttatgaacctcagtgttctctgaaatggggatcatcccctgacttctgagggcagttaaatgagatcaagcatgtaaagctcttagcaccaagcctggtgtatggtgtgtgctccatgcatgctgtgctggttcttaccgggtgccagagcttgtggagaaagcagcatgagccatcctgcttccctgcgaccctccagaaccagcagcccaatgtaaggggccacattaagtatcagagagggagaaaggatcattttcatttactcagcatctcccagatatcaaggaccagatacctaagtatgttgtctcattcagttatcataaaggccctgtgaagtgagtttctgttgcgtctttcttggaagttagaaaattgagactcagggcgagggggcaggtgacaaaggaatttctccaatgtcatatagctagcaagaggcagtggtgggtttgatgggctccagaactcatgtttgaactatatgaaaagaatcaaggactttcctgcttttaaaattaccctttgggattccctttctatcaataggtgttgattgttaacagcagacctgaaaccctcccttttaccaggaagtccagtgtgtctctcctttctctcctacccactgtcctctcacccactagttagcagcctgaaaatcttcctcttcctttgttcagcctttcccatgctgacaccattttgaccttccagtgccctcttccccgatgtggtcaactgcatgcagacggacaacctggagctgaagaagctagtatacctctacttgatgaattacgccaagagtcagcctgacatggccattatggccgtcaacacctttgtgaaggtgagcagacgcttggtgggcgtggggacattgggtgcttaaggctctgtctcccctcagtctctttggggcggggccctgtggcactggatggagtccagaccttcagactgcccgcgcccgcccagcctgcaggcctcttcctccagcagagggctcccactctccagaaaatcagatgctaaggaccctgcgtaactcatcctgtgtgaggtcctgccaggcctgttgatcccctcactgccctgattggaccctgccctgcatgctttgctagggcaggaatcagcaggtgcccgagagcttctctgttgcccttacagactgctgctttctccattttctgtccttcagattaaattgtcagctctgtgcacctatattttaattttattttctcctaatgttcagtacctctgaatttgtatacctttagaaccttagctcccctgagtcctgtccgtgctcggatatggggaaatgaggcttctgtggcccagtggaaagaccgagggctgtgatgctaggtggatgtgggtttgaatcacggctctgctctgtggcttcagatgagctcctagcctttctgagagcctcagtttcatcatctataaaatgggacccgtattgtatttctactgtgaggatcagaggagatggtgtgcagagctggcatgggtgctggttatatagcatttacttttgctgttgttggctgtagttggtgaagatccacagcagccatctgatgtcgctcagcctagcagggctcagagctgcaggccagggagaatatgaagccacagatggctcatcccacccctgccctggccgatggctggttccccccaggactgtgaggaccccaaccccctcatccgagccctggcagtgcggaccatgggctgcatccgcgttgacaagatcacagagtacctgtgcgagccactccggaagtgcctgaaggacgaggatccatatgtgcgcaagacagcagctgtgtgcgtggccaagctccacgacatcaacgcccagctggtggaggaccagggcttcctggacacccttaaagacctcatctccgactctaaccccatggtaagccactgccacccaccgtgctacctccaccacctcctgggttgcttgggaagacattggcttgactcttcaccaggcagtcctgagtacctagaagtcggagcctggctgggggtgccagttgttcttgtgccttttggtggttcaggcaccctctctggagggagctagacctagattcccttctcctcaccctctgactagctgcgcaacctggggcaagctgcctaggctctcttttcttcatcagtgagatggatctcattctacgtggctggcaggagtgctgtgaaggtgacgtgcctgggatggcctggtaacggtgcaccatcaatactagtgccctccttccccttctagtcactgttattgttgctgtcttctcaccaagccaatatgctgcatgtgtggtgcttttcccttcccccatctttgttgggttgtagagggtcacccttgaagtagcatagcctggaagacaggacatcaggatgtagctggatgtggaaccccacagtccccttacccacaatggtggcagcagtttggagggcagtttggcagggcctgtttaaaatgaatgcacaaacccagccattccccactctgagcagaaacactgagcaactgccatacacagtactgagcggccagtacagggatgggtactggagcactggatggttcacagagaaaagttggaaacaatgcagaacacccttaaaaacagctgcctgggccgggtgcagtggctcacgcctgtaatcccagcactttgggaggctgaggtgggtggattacgaggtcaggagattgagaccatcctggccaacatggtgaaaccccatctctactcaaaatacaaaaattagccgggtgtggtggcatgtgcctgtaatcccagctactcaggaggctgaagcaggagaatcacttgtacccaggaagtcggaggttgcagtgagctaagactgcgtcactgtactccagcctggcgacagagctagactccgtctcaaaaaaaaaaaaaaaaacagctgcctgaggccgcgcgcagtggctcatacaggattacatgcctgtaatcccagctatttgggaggctgaggcgggtggatcacctgaggtcaggaattcaagaccagcctggccaacatagtgaaaccctgtctctactaaaaatataaaaattagctgggcatggtggtgcgtgcctgtaatctcagctacctgggaggctgaggcaggaggattgcttgagcccaggaggcagaggttgcagtaagccaagattgcaccactacactccagactgggcaacacagtgagactcaatctcaaaaacaacaaaaacaagctatgtgcagtggctcacgcctataatcctagcactttgggaggttgaggtgggaggatcacctgaggtcaggagtctgagactagcctggccaacatggcgaaaccccatctctactaaaaatacaaaaatcagctgagtgtggtggtgcatgcctgtaatcagtcccagctactcgggaggctgaggcatgagaatcacttgaacccaagaggtggaggttgcagtgagctgagatcacaccactgcactgcaacctgggcgacagagcacaactccatctcaaaaaaaaaaaacaaaaaacaaaaaaaaacaccttcctagtggaaatggattgagggcctggagcttcacctggcaagcccccatccactcccagtagcctcgaggagctctgcaggaatcccctagctctgagaagcacagctgacaagcattgaagtgaggtgctgttgctggtagacaggcgctgctgtgttaggaagctgagaatgctttctgtggctaagcccttggagctaggtctttcttgtttttctaaatggcaggcacacttgttttgttccagtttgcagaggagtcagcagggtgagtgcttggagtgggtctcgttgcagctccagaccctgcccattgggtcatattcctttcaggatatttgacctctgaccagccagcatcattaatgcactgccccctggcctgtgagcagcacccccagcctctgcccctcccaccctctcaaccaggtggtggccaatgcagtggcagcgctctcagaaattgccgagtctcaccccagcagcaacctgctcgatctgaacccacagtccatcaacaagctgctgacagccctcaatgagtgcaccgagtggggccagatcttcatcctggactgcctcgccaactatatgcccaaggacgaccgcgaggcccagaggtgagcgggctgcccgttgcttgccagcccagcttgaggaccctggtcctcaggggctccaaccaggcactgggccttgggccttagtgggcccctttctagtgctttgccccataacccaccctcagacacacctaaagggaggcctgcctgcttcccacctctccagagccaggtagacaggagagttgccttgggcagctatgggcatacgcatggcctggccttggagctggcagaagcccagggcacctcttttgagttcaataggtgggtagcgccagagccactgctcattgaattctcactgggtgtctggggctctgccgggtgctttccacactttagagtctttaatgcaacttttatcatcatcccccactttccagatgagggagctccagcttagagaggtggagggaatagtgcaggtcccctggctggggctcacctgactcatggtcttaaccaacaagataccctccaagtcggaggaagtgaggagttgccatctatacagtatgtactacatgccagtactgtgcttgttctttttttttttttttttggcagggtctctgttctg

SEQ ID NO: 903 - DNA, 32744 bp, Homo sapiens
  source 1..32744: mol_type = other DNA
gctctgccaggagcagtcgcctcctccttggcaaatagtcctcggcagggtccgagttcttggataattcgagagaaaaggcacgataagttgcagtacgaggacacggaaacgaccaggagaggaggacagggagcgaagtttcctcaatagtgtgtgaagttagttaaaaactccctccttcctcaggatccctccgcctgcggtagcggtggtgaggccgagggagccgccattttggatgttcggttcctgctgccactgctgccgccgcccccggagctgctggtttcattcgaggtttcgggccggtgagtgtcactcccggcgctgagagcatattgctgcttttgccccgccgctgccgcgggcgctcgaccggaagcttcctttcagtttcaggggtccagtcccaggctgtgggtgttgagaagagaagacagagaagctgggccaggagaggccgggagccccaggggctgctccgacttctggagggccgaccccgaggcctcggaccgggaggttccgcgcgccgcggcgttccgtgttgtggcgttgccccgccggtacgggcctccttgaacccttgactttctcaggctgcgatctttgagggctcattcagggagcctggggtttagcggggcgggccccacccccgcgtgtcttctctgagccacgtatcagcgttcttgtgtcttgtacccgtgtcaggtctgtcagataactcccagcatatccaaatgcccagttaatcgctgcctgcccctgcagtgccgtcctctcggaaccggacatcggcctcgcctctctctaaccttccgaccaacttctttcccaatttttcgtgtgtgtgtgtatatgttgttgttttgtttttttcaacctacctgcgagtatactgtttacccttttctcagctcctggccctgcggacgtcagcgtctaataattctcccggtcttcctgattgcctgaaagagtcgggacggttcggttgattgtgtttcccggttaggactcggtgtaggagatccatcgaaccactcgctcagggtaatgtttatgaagcagattatgtttatgaagcagattaaatggcttttgggaggcaagagctgtcaaatgttttctcatatgtggattccctccctgtgctgaatacttagctttttggtgcttactgacacttgtgtggtatttttttttctcccctattatatatccctgagcacggaaatctgtccatggagaaaaatattaatctgaggtaggtagaaaggagagttgggctgctttacagtgattagttaacagaagggaggagttagtgctttcttagtgaccttaactttgaagtgtttgtacagtaatgatctttgctgactgattctaaaaaatacttgtaatgatttcatgtattgggtttttctggggatagctgaattttaaatattcacttccaccgttccctagaatacttgtcaaatacctaacttgtcacacaccctaactttcacgtttgaaaaatatgaaccctctaagtactcgtaatctcgtcacttttattctaaaggcatgtttgcagtctagcatgcttgaataaaaagtatgtctttatttttatttatttattttttgagacgaagtctccctctgtctccaggctggagtgcagtggcacggtctcggctcactgcaacctacgcctcccgggttcaagcagttctcctgcctcagcctcccaagtagctgggactacaggcacacgccgccacgcccggctaattttttgttgttgtattttagtagagatggggtttcatcatgttgcccaggcagatctcgaactcctgagctcaggtaatccgcccgcctcggcctcccaaagtgctaggattacaggcgtgagccaccgtgcctggcaaaaagtatttcacagttattcactgatacatttcctacgtttcaagttaggcgagtgtgattgaatcacccttatttcatctcagcctgggttttcacatctgcaaaagagaaattaacttatttgagatcacagtctagtggttgaagtttaaatttataacttgaattgagtcaagctttttaatattgctaagccacttatagatgcattattattatcaggttattgaaatgagattgtagataaattcctctataggtcatatgatgtctcagaagaaaacaatattttcagtttaaatactcagtgatcttgttatttaagcagatttttcaaaaatatattagttactattagatacgtgagttctgtattaccctgaagcaatggaattttctcttttggtttaaaggaactgtcaaacactgaacacctatgtaatgctcactcatttagtaagtatgccctcgcagttactactgaaatgttccatttctgacttagacttttcaagtaaggtgttagaagagctatcacatagatgttagttaactcagtgtttttcatgctttaatatattggtatttaaatgtcattcaggcgggcgctcagtggctcatgcttgtaatcccaacactttgggaggtggaaggtggatcccttgagcccaggagttggaggccagcctgggcaacctaatgagactccgtctctaccaaaatatttaaaaatattaaacttttaaaaattcattcttagatagtttgcattcactgtagaaagggtccttttgccttaacaaattcctagcaaagtgttgtttagtgcaccattgatcagtgcatatttgaatgtctgctttgcgtttaggaaacctccgttttcttttgggggcagttgcttgttctttggtctgacctctgtcattgatagcagttctagatttgagggcagattttagagtgaaactttaaagtacagaatttgccaggaatgccttggtgatatttcaccccagtgtttatttaaaaaaggagttttaaaaatcagtggtatgcaaacaaaaccaacttctttatgatttataaaaactctttttttttttttttattatttttattgtttgagacagggtctcactctgttgcccaggctggagtgcagtggtctcagctcactgcagcctggacctcctggactcaagcgatcctcctgcctcagccctccacgtagctgggactacaggcgtgtgctaccacgcagggctaatttttgtattttttgtatagatagtgttttgtcatgttgcccaggctgggctcaagcaatcctcttgcctcggcctcgcaaagtgctgagattacaggtgtgagccacctcacctggccaaaacttttaatttatacaaatttaaaaagttgaatgagtattttccaagatattatttttaattaaaaaaattgaattggcaatctacataccaaaacagattttccacaatgcttaatccccttatttgcatttgatgaggattttaaaattttgtgtatatagcaggacttaattgctatcaaaactttaaaactcttacttagagcttcagaacatttaaaaatactgttttaggtgtttgtaatttagtctgtccttgctttatgaattgttttcagttcttttttgtttgttttttgagacaaagtcttactctgtctcccaggctggagtgcagtggctcgatctcggctcactgtgcaacctccacctcctggattccagtgatttctgctgcctcagcctcccgagtagctgggattacaagcgtgcgccaccatgcccagctaatttttgtatttttagtagaggcggggtttcaccatgttggctaggctggtctcgaactcctgagctcaagtgatccacccaccttggcctcccaaagtgctgggattacaggcaggaggagccactgcgttcagtctgttttcggttcttgattttggctttctttattctctgttgcttttactcagtttctaatgcagaataatgttgaaagtagcaaacaattttttttcaactcctctcagcttataagtaacaagcaattttatttttattgattgattgattgagacaggttctcactctttcacccaggctggagtgcagtggtgcaatctcagctcactgcagcctcgacctcctcccaggttcaagtgatcctcccacttcagcctcctaagtagctgggactgtaggcatgtgccgcctgatttattatttttttgtggagacggggattcgccatgttgcccaggctggtttcaaattcctgggctcaagaggtcctcccacctctgtctcccaaagtgctggtattaaaggtgtgtgccaccatgccttgcccacaagcaattttaaacttaagagagcaggctggtgcagtggttcatgcctgtaatcccagcactttgggaggccgaggcaggcggatcacttgaggtcaggagtttgatactagcctggtcaacatgatgaaatcccgtctgtactaaaaatacaaaagttagccgggcatggtgatgtgcacctgcattcccagctacttaggaggctcaggtgggaggattgcttgaacagggaggtggaggttgcagtgagctgagatcacgccactgcactccagcctgggtgacagatggaggctctgtctcaaaaaaaaaaaaaaaaaattaagagagcatatagaaatcttttgtatttcttggcttacaggttttgaaatgatctttgttggctgggcgaggtggctcatgcctgtaatcccagcactttgggaggccgaggcgggtggatcacgaggtcaggagatcgagaccatcctggccaacatggttaaaccccatctctacaaaaaaatagaaaaattagctgggcatgatggtgcgcgcctgtagtcccagctactcgggagactgaggcaggagaatcacttgaacctgggaggtggaggttgtggtgagctgagatcacgccactgcactccagcctggggacagagcgagactcttgtctccaaaaaaaaaataaataaataaaatatgtttatcaaaatgtagtagcatttttacagttgcctttttgtatagaaaattttatttcaatgaggtcaagaaatagaaaagggaaaagaggtgtcttttttttttttttttttgagacggagtcctcctctgttgcccaggctggagtgcatcggagccatctctgcttactgcaacctccgccccctggttcaagcaattcttctgcctcagcctcccgagtagctgggactacaggtgtgcgccaccatgcctagctaatttttgtatttttagtagagacagggcttcaccctgttgaccaggctgatcttgaattcctgggctcaagtgatccaccagccttggcctcccaaagtgctgggattacaggcatgaatgaggtgtcatttttactttgaagatacgtgttaagtttttttcttcactgacctagtaacacaatacacttaatatggcatgagttttggttgctggaaaaactggttaaagtttgaagggtccagaagtgggagaaaaaaaactcacttgccaaatgtgttgagtcagcattaactaacactttagcataaaagggcaaggtttaggatgagatgattgaaatgagaaatgctttttttcactaggtacttggaaattttactttaaaaaaaagcctactcagaccattggagagatttaattagtaaatcataaatgttggcaacaaattaagtaggtttagaaggaagaagtcatttttttaaaagatgaggaaaaaatacatgtgacttttgtaatttataaataaaaacatcttattatttatttatttattctttttgagacagagtctcactctgtcacccaggctggagtgcagtggtgccatctcagcttactacagcctctacctcctgggttcccgcgattcttgtgctcagcctcccgagtagctgggactgcaggcgtgcaccactgtacctggctactttttgtatttttagtggagacggggttttgtcacgttggccaggctggtctcgaaatcctgacctcaggtgattcacctgcttcagcctcccaaagtgctgggattataggtgtgagccaccgagcctggctaaaatattttaaatctttcaaagatatgtaaagatgttacgtgttttctcaacctaaaaataaacttcgctggccagacctggtggctcatgtctgtaatcccagtactttgggaagccaagtcagaaggatcacttgaggacaggagtttgaaaccagcctgggaaacacagtgggactctggctgtacgaattttttttttgagacagagtcttgctctgtcacccaggctggagtgcagtggtgcgatctcggctcacctcaacctccgcctcctgggttcaagcgattcttctgcctcagcctcccaagtagctagaattacaggcgcccgccaccatgcccagttaatttttgtacttttagtagagatggggtttcaccatgttggacaggctggtcttgacctcctgacctcaggtgatccacccacctcggcctcccaaagtgccgggattacaggcatgagctaccgcgcctggcccaaaattttttaaagtagctgggttgtggtgtctttgccagtagccttagctgcctgggagcctgaggcaggaagatcacttgaacccaggagttcaaggctgcagtgagctaagactgtgccactgcactccagcctgggtgacagagatagactgtctcaaaaaaaagaggtaagtaaaaaacgcttcttttgcttccttttaagactgaacactttttcagttgtttagttttgaggtttagttaaataggttcactaacttgagctgtaaaaacactaatggaactccttttactttgagttgtacaactgtataatcatttatataagttagctctttcaaccaaatacacattgagtatctcttatctgaaatgcttgagaccagaaatgtttcatattttggattttttcagattttggaatatttgcgttacaccacttgtacatccctaatcctaaaatccaaaatctgaaacacttgcagagcatttttttcttttcttttttttttttttttttggttacggagtctcgccctgtcgcccaggctggagtgcagtggcgcaatctcggctcactgcaagctccgcctcccgggttcatgccattctcctgcctcagtctccagagtagctgggactgcaggcgcccgccaccacgcctggctaattttttgtattttcagtagagacgggctttcaccatgttagccaggatggtcgtgatctcctgaccttgtgatctgcccgcctcagcctcccctgctgggataacaggcgtgacccaccgcgcccggccttgaagagcatttcttcaagcatcatgtcaacaatcaaaaaatgtcaggttttggagaatttcagattttggattagggatgtttaccctatagtgtttaccctgtagtgttacatcatctgttctatgacagtcttaattttaaccccaaattttaacagattatgaatgaatttacgcttcaatatttctctcaatgcttagttaagtactgtacatactcacgtaagtgtacataggaattttttgtttttactaaagagagatcatattatttatattactctatgacacgcttttttttttttttaacatgtcatggtcagtaaatataattctttttttttgtttgtttgttttttttgagatggagtcttaccctgtcacccaggtggtgggaatctccgcctcctgggttcagtgattctcctgcctcagacttcagagtagctgggattataggcacctgccaccacacccagataatttttgtatttttagtagagatgaggtttcgccatgttggcctggctggtatcaaactcctgaccttaagtgatctgcctgccttggcctcccaaagtgctgggattacaggcatgagccaccgcgcccagccaatataattcatttttgttttgtttttttgagacggagttttgcttttgctgcccaggctggagtgcaatggcgtgatctcagctcaccgcaacctccgcctcccaggttcaagtgattctcctgcctcagcctcccgagtagttgggattacagacatgtgccaccatgccccgctaagtttgtatttttagtagagatggggtttctttcttttttttttttgagacggagtctcgctgtgttgcccaggctggagtgcagtggcgcgatcccagctcactgcaagttctgcctcccaggttcacgccattctcctgcgtcagcctcccgagtagctgggactacaggcacccaccaccacgcctggctaatgttctgtatttttagtagagatggggtttcaccatgttagccaggatggtctccatctcctgacctcgtgatctgcccaccttggcctcccaaagtgctaggattaaaggcgtgagcccccgcacccgacccgagacgggggggtttctccatgttggtcaggctggttttgaactcccgacctcacatgatcctcccaccttggcctcccaaagtgctaggattacaggtgtgagccaccgtgcctggccaatataattctttttttttttttttttgagatggggagtcttgctctatcacccaggctagagtgcagtggtgcgatctcggctcactgcaagctccacctcctgggttcacgccattctcctgcctcagcctcccgagtagctgggactacaggcgcccaccaccacacccggctaatttttttgtatttttttttttagtagagacagagtttcaccatgttaaccaggatggtcttgatctcctgacctcgtgatccacctgcctcggcctcccaaagtgctgggattacaggcgtgagccaccgtgcccggcaatataattctttattattatttttttaaaagatgacattttgctatgttgctcaggctgatctcgaactcctgggcttgagcaatctgcctgcatcggcctcccaaagtgctggggttacaggcgtgagccaccgcacccagccaatataattttttattattattattattattattatttttaagatggaacctcgctctgtcacgaaggctggagtgcagtggcgcagtctcggctcactgcatgctctgcttcctgggttcacgccattctcctgcatcagcctcccgagtagctgggactgcaggcacctgtcaccacaccccgctaattttctgtatttttagtagaattgggtttcaccatgttagccaggatggtcttgatctcctgacttcatgatccgcctaccttggcctcccaaagtgctgggattacaggtgtgagccaccgctcccagcctattagttttttaataagagatgagatatagctgtattgctcaggctggtctcaaactcctggacttgagcagtctgcctcctgtggcctcccaaagtgctgagattacaggtgtgagccactgcactcagcccacagtaaatataattctatcttgttcctttaaacagtcctattgtgtcttatagcgtggatgtaccataatttattattttcctgtggacatttagatcatttctagatttttgccacttaacaaagtgctacaataaatatccttgtacatgccgccttatatgctgatgcttttatttctgtagtctccaaagggggaattctgggttaacagagaaatatattttaaatattattattgctagattactctctaaataggttatcataattttcatcccaaatagcagtaacttctccatatcatgaaaccactgggtataaatacatagtttaatttttactagtctgctagatgataaatgggtcatgcagtttgtcttaattttaacttccctgttactggggctagccttatttgatacgtataatagccattggatttcctttaccgagaattgtctgctcatgtccttgcttcatttttctttctctttttttttcctcctgtaggagcgcttatggaatgttaattctttgttatatggcacgtgtatttttcttgtctttcatttatcctttttttttttcctgggagacagagtctcacccttgtcgcccaggctagagtgcagtggtgtgatctcggctcactgcagcctctgcctcctgggttcaagcaattctcctgcctcagcttcctgggtagctgggattacaggtgcccgccaccatgcccggctaatttttgtacttttagtagagacagagattcgccatgttggccaggctggtctcaaactcctgacctcaggtgatctgcctgcctctgccttccaaagtgctgggattacaggcgtgagccaccgcaccacgcccggcctcatttatcttttaatcttatttatgtcacagacattttcaggtaattatatatatccctcttttcctctttggtttctgaaactgtcttagaatccattccagctgggtgcagtggctcatgcctgtaatcccagcactttgggaggccgaggctggcggatcacgaggtcaggagactgagatcatcctagctaacaaggtgaaaccttgtctctactaaaaatacaaaaaaattagctgagcgtggtggcacgcgcctatagtcctggctactcggtagggtaaggcaggagaattgcttgaatctgggaggcagtgtagagacacagtctcactgtattgcccaggctggtttctaactcatggcctcaagtgatcctcccaccttggcctctaaagtgttgggattactggcgtgagccaccgcacccagccttaacagtttttgatgataatttttccttgctgtagtgtgtgtctgtttgttcaagtttattttaggtctttcaacaaatattttatagatttcgtagtttttttcgtatagttcctatacctttcttactaaatttattcctacgtattttattttgacactattgtcaatgggactgtttaccctccatttctaactagttaatatcagatacattaattaaaagtaaatattataccatctttaattttctttggacaactcccccactctccttgtatatccagaattaatagaacttggattcatgaagaatatgctagggaaaatttgtcatcttagtattaagtaactttttttttttgagactgcgtcttgctctgtcgcccaggctggagtgcagtggcacgatctcaggtcactgcaatccccgcctcctgggttcaagcgattctcctgcctcagcctcctgagtagctggggtcacaggcgtgcaccactgcgcccggctaatttttgtatttttagtagagatggggtttcactatgttggtcaggctggtcttgaactcctgacctcatgatctgcctacctcagcctcccaaagtgctgggattacaggggtgagccaccgtctccggctatattaagtaactttctaatgtttctgcttgtcatcctagggaagagtacacttagataagtttttctggaatgaatgacaccttactaggtttgaaagtttacagttgctttatttatacgtttttgttaatttgtttgctttttttcaaagcaagttttattccaagttttacatgctcattacttgaaagatagcagactatatatagaagttaaaaaggcatccatatttacatcagataacctccttcaacattaattataccctttgggtcatgtctttaagccaaattttcgttttgagaatttgatgatacttcttgaattgagagtactttagtatggttttgctaataagattatggttgggagaatgaaatttttttttatttcattagtgtcagattagatgtttgtcttgtttagcgatcattgtttacttggcctttattgcttttcatgcttatatacatatacatacatatatatatatatatataattttttttttaagagtcagggtcttgctgtgttgcctaggctggtcttgaactcctggaatcaagcattctgccctcctcggcctcccagagtgctgggattacaggcctgagccactgtgcccagtctgctttttatgcatctcagtgctgttgaattgttcagtaggcatgtttgcatttatagacatctgctttttagatctcagttctggtgaattttggttatggataattaagcataaaataagattcctgtaattactgtgacaatttagggagaattgaacttaagtcctcttagagggatgccagctggctgcctagacagggtggggtggtatctcaatgtgatcctacattccacagcctattctttagccttgaagatccagaaattccattttagtagttcatctcctaggggtgattgagaccaatcaaacacactgatttgtaagttataataatactgtagtattgtaattcacaagggggggatatgcttttctcctgaattacttgtgtctgcattccacaggacactattccttgtatggaggtacttgggagttgaggcgcttaaggaagtatttaataatcagaaagttgcactgtgagcctgaaacagaccatataaagttggtcttgagtgttttgtcattttaagccatggtgaaacctgatcaaagaattatgcttgtcttacaatgctgtttgcctctctaaagaccagaatacttatccccagatttatttcattgtattattattatttttgagacggtcttacttcacaacccaggctggagtgcagtgattcgatctcagctcactgcaacccaagtccccttggctcaagtgatcctcccacatcagcctcccgaatagctaggactacagacgcatgcgccaccactcccaactaatttttgtatttttagtagagactgggtgtcgccatgttgctcaggctggtcttgaactcctggacttgagcagtctacctgcctcggcctcccaaagtgctgggattacaggcgtgagccaccacgcctggcctatccccagatttaatctctcctattcaaacagtgaagttctaactctggtcttttccgtttattcactgtagaccatttcccttctgtgaacacatttcttcatataggggaaataggtatgcacccctctactcccctcaaaagaaagaaaaccacaaaaacacaggcagtgagaaaaccagctaggctagatcagtgtaatgatagccagaataagatgtattgtaaagtaaaagtctgattgaagcataatacaatcagttgatttgatttaagcttttctagtgtcacattctagtcatagtattttgcaggttgtaaatggcgttaaagcaactcagatatacatatgaaataaaaatctgaaataggggttctgtatggcccataatataaaaatataggccatctggagaatgcaagagggaaagcatggtaacttctttggagggttttgcctgatgttaacttacatcccttgaacattctcagctagactgacattctgtgactgacacagtagtcaatggtgaagttaattgaagtcttgcttatttgcttgggtcttttctcattgtttagccagaaagacttcttcaagtacaatctttgttggatagaaaaataggtgattttaatgttgaaaagttaagttttagaattttgtttttagatttagagctcaaataacttgaggtctgttaggggaagactgaccacatagttgcagaagctccagctttttggttgtgtccttgatagttggctgtcagtagctgaaagtgcacagtgggcagtgtgagttctaaagcagggagaacgttatctgggcagggtagaagagagaactgggttgagttctgacaccctttttccatagctgttggtgagcagctggtacacctttattttgtgtgctttggaaaggacaattcaatttttttaaagatattttagcatttaggatttaataaatatagtatttatcaagtttgtattcttataggaggatacaagagtgaacaaggcaaatgaagatctagccttagggagcttgtatttagtgggaaaaataggcatttcaaagtaaaaaaaaaaaaaaaaaaaaaaaaaaaaagcacttctcatggcctgagaatggtattgctgtatgagaaaaatctttatccttaaagggatttgtggagatgttggaaaatagccatcttcaccattttggccataaattttaggagaattgaaacatgcacacattatttttttcttctatttacatttttttcctttagtttgtttataattttgattctttgggcatataaagtaatcttatttagtttaagctccaaaacccaattttgcttaaccattttggatagaaatttttctaaaatgaattttatgtttccttttttcctctgtttttatcattatttatcatataactgttaataaaaactgaaacacattaatctataatccgtgtcccttaagtcagacttttaatatttttgtgttcgctttccatccttgttttaagagatgtttttattatttgctttaaaaaaacaggacaaagagggacattttattttgttatagtgtacaagccataatgaatataaaatatggaacacttaagcatagagtgaaaccatcgaaatactaaatgtaagtggttatatgtaaatggagaaattgacagaagcacaatcatagtggtagactttaacatacctttctcagtctttgatgggtcaggtagttaaattagtaagggcagatggtatctgaactgtaagatttttagaagttggttataatacagatataattttgtattcatgttttttccctgtgcattgaatgttaaatgttaatcttattttaaccacttcttggagaatcaaggtctttttataaaaccacattatggtccaggtgcggttgctcatgcctgtaatcccagggctttgggaggccaaggtgggtggatcacttgagctcaggagtttgagaccagcctgggcaacatgatgaaacctcatctctaaaaaaaatacaaaaatcagccagtcagcctggtgtggtggcttgcgcctgtagtcccagctacttggggagctgaggtgggaggatcgcttgagccaaggaggcagagattgcagtgagccaaggaggcagagattgcagtgagccgagatcgcaccactgcactccagcctgggtggcagagtgagaccctgtctcaaaaagaaagcaaaaaacaacaacaaaaactatattgtggtactgtttataatttattggtgctcttaggaccttagtgggagttggctactttttggttacacactaagtagctccagactgttttaaaaatgcttgtttctgctgtatataggtttttatttatttgtttgtttttgttgctgcttttgtttcttcccttggtgttgggtgacatttttaactatcatagatacccttttctaaagcagtttctatctcctgggtccaccctcctcccctctttcccttacagttttctgatttgtagcttctattccagaacgggctgaatgaggacttctatctggagtaaagtagatgttatagtgtgttgatgtgtcactctctatattggctgcttgagataataaaaatgtgtttttggattctcagctatgttctgtatagtttcattactgtgttccggactttttaaaaaaaggttggagtttattattgttatttgttttgtttgtttgctttttctgttttttgagacaggatcttgtgccatcgcccaggctggagtgcagtggcctgatctcagctcactgcagcctcactcctaggctcaggtcatcctcccacctcagcctcccaagtagctgggaccacaggtgcatgccaccatgcctggctcattttgtttatgttctgtagagacagggtttcagcatgtcgcccaggctattcttgaactcttgggctcaagcgatctgctcgggtctgtgtcccaaagtgctgtgattgcaggtgtgagccaccgtgcccagcctcacttgtaattccttttttttttctttctttttgacagagtctcgctccgtcaccctggctggagtgcagtggtgcgatcttgactcactgcaatctccacttcccgggttaaagcgattctcctgcctcagcctctgtaggagctgggatcacaggtgtgcgccaccacgcctggctattttttgtatctttagtagagacggggttttgccatgttggccaggctggtctcgaactcctgacctcaggtgatccacccatctcaatgctcccaaagtgctaggattacaggtgtgagccactgcacccggcctcctcacttgtaattctttaacttcctgttacttccaatgcttggttcctgtggtgtgcctccttcctttcagtgctttggccaaaatacggactcacatttctttgtttttcagggttggaaagggctgggattttcagaatagactttcttatatatctagggtagaaataagtaaaaattcctgaagatttgtcattgcccttctccacatatgttaagcattatcttctctttcagtctgattttaccagtttagaatgccaaaagggacatagcttaactggtggcttttttgacctgcctgtgtttggagggcacggtctttcaacctgccatactgaaactcctgtgtagacatcttgacacctttatggttcagattaatagaaccttattttagccttccatcccccatagttcacgtctctagtttattgactccgaaaatgacttcatttttgaggtgagactaccttcagccatcccttgtataagagtttagtgttggcctggcgtggtggctcacacctgtaatcccagcactttgggaggccaaggcgggtggatcacctgaggtcaggagttcgagaccaacctgaccaacatggtgaaaccctgtctctactaaaaatacaaaaattagccaagcatggtggtgcatgcctgtaataccacctacttgggaggctgaggcaggagaagtgcttgaacccaggaggtggaggttgcagtgagccgagattgcgccattgcactccagcctgggcaacgagcgaaactccaccaaaaaaaaaaaaaaaaaaagtcagagtttagtgttagcttttataggcccagccgtgtgaccatatcttaatatacccattacacacaactttttttttttttttttttgagacagggtctcactctgtcacccaggatacagtgtcacagcttactgcagcctcagcctctagggctcaggctatcctcctgcctcaatctcctgagtagctgggacagtagtcgtgtgccactatgtttggctaacttttttttattatttgtagagacagcgtttccctatctacatacaacattcttcacaagattttacagtaatgttttgttacttgagtggttaaatatgcctttaagcaggttagaataactagtaattttctcaggtatatattctataactgatcaaataggtctcaattgtttagttcaagggcttttttgtttactttaaaataaactctttaaagttaacatatggtaaaattgactcttctggtttattgttttacagttctgtgaggattttttgtttttgttttttttgttttttttttttgtttttttgagacagtcttgctctgttgcccaggctggattgcagtggtgtgatcttggctcactgcagtcttgcctcccaggctcaagcaatcctcctccctcagtatcccaagtagctgagcctacaggtgtgtgccaccatgcccagctaatttttgtattttttgtagagacagggttttgcaatgttggccaggctggtttcgaacttctgacctcaggtgatctgcctgccttggcctcccaaagtgctggcattaaaggcgtgagccactgtgcccagctggtgtgtcctattttcataatgatgtcctttggagagcaaaaattttaaactttgatagggtacagttattaagtttttcttttatactttgtggttgtgtgtgaagtctctctgtttaacctgtttgcaaagattttcctctgtgttttcttctggaagatttttagttttagctttgacttttaggtttgtgatccatttttagttaatttttgtgtattgtgtgtggttaggattgaggttaatttttttcccccatggagagaaatagttgccagcaccattcattgaaagactatcttgctcctattgaataactttggcctctttgttaaaaatcacttgtgtatatttgtgtgggtttattcctaaactttcagttttgtttctattcttttttttttttttttgagatggagtttcactcttgttgctcaggctagagggcaatggtgcaatcttggctcactgaaacctccacctcctgggttcaagcaattctcctgagtagctgggattacaggcatgtgccaccatggccggctaattttgtatttttagtagagatggggtttctccatgttggtcaggctggtctcgaactcccgacctcaggtgatccgcccaccttggcctcccaaagtgctgggattacaggcgtgagccaccgtgcctggcctgcttcagtctattcttacattcagttagttccacatttccctgattactatagctttgtagtaattcttgaaattaggtagtgcacgttctgttttttctgtttgttaacaattatttaggctgttatatgtcccttattaacgtttttttttttttacttttaaaagatattcatgacactaatagccttattttctgaggttagtttatttttttctcatcacattttcaaagtatacacacagtgtactgggatggttacagtttgttgaatgtgttttaatctgacaattggtcttctctcttaatctctcatattttgttgagttgagctatgattgtgaccatatttatttttgttgagctatgttatgtttaacagcagttgaacagataatatctatcttttctaaggttaggcataggcctttccttattactttaaggattgagtaaagatttgagttgtattagtttctgagatattttgatattagtgatagactttacatatttagtgtattctttgttttattttgcttaatttaatacttaaccatatttgtttgtagcctttccagaaatgtacagagttgagaggtctgtatgtaatagctttgcggaagcttagcacgctttgtttagcttcgctaagctggatttggcaagtcttgaattcttaaaaactagtcaaaaatttaaatgggaagttgtgtgaatagctttggtagtaaaaaatgtgaacatctctatttaatgtctttccatatccagaggatgccagcccccatcagattgcgggagctgatccggaccatccggacagcccgaacccaagctgaagaacgagaaatgatccagaaagaatgtgctgcaatccggtcatcttttagagaagaagacaatacataccgatgtcggaatgtggcaaaattactgtatatgcacatgctgggctaccctgctcactttggacaggtaggctgggctgagactacatgtagcaagggtattctttgacattgttgctcagggattgtccatctttttctggtggggaggtacttttgatagccttgtagtctgatcattgtggaactgagggtaagattgagagagcaagccacagacctggaaaggcatgatattgctatcaattatcctttccactgggagtctcattatacggatgagagaatgttttgatggtggcagctagcttgcttaaagattgaccaggattatgtggtggttctgccagagtacctggactataatgaatatttaagaaaatgtttcttgctgggcatggtggcttgtgcctgtaatcccagctacttgggacactgaagtgggagaatcacttgaggccaggagtttgagatcagcctgggcaacatagtgagaccctgctcttaaaaaaaaaaaaaagcatggtgtggtagagcatgcctttagtcccagctactcaggaagctaagtcaagaggattgcttgtgccccaggagttttgaggcctcattgagctacgattgcaccactgtactccagcctgggcaatagagtaagatcctatttcttttttttttaaaaaaaaaagcttgctaaatgtcttcttaattgctttatctgggcacagcgttgtgtggagaagttcacaatatgtttttcagttaaggaaattaggtggttgccaattggtggcgtctattttgttctagttactttgtgccttgattgctgtaactagagcagatctggcagctgattctctcccatgcacaaatggttactatctaagatgtccattctgggctttgagaatgatagtctcaatgataagtactttcttctttgcatgtttatattgtcataagtgggatttagtcatggaaaaggaaatagtgggttttttttatttcatattagtgctattaaattttattttaataatttaagaattgtattatatgctaaatagtctctctaaggaacagactgcccaactgaaagaaagaatgtgcaacactatcaggaaagatagtcatcagcttatttactgtttaggtcagtaatttcagtggaaggagatctcctgcccccaagttaaaacaaaaaagtactgggatttaatcttatcagactgacttgggttttatggtcatcttggggtttggagtggggtcaacatctttagaaatacatgatcaagagtgggagtccattaatttcccaaagaaaaattgatgtgttagtatcagaggaaaggggactggatcaaaagaaaaggagccaggcagaagcaactgctgggtcatcaatatagtcatatatttggtttgggacagaattagtgtcataatagcattcttctctttcacatgaatagtttctaaaaatataatatgttctttgaaatatatttcatatttcattcgtagagtgttaggagtggaatgaaaccctgaggctctgatgtttcagttataagctttaccacatcaaaaattgatccaggtggttatccatatactgtgtgtcatagtataaagcaaatagatgcctacgtgttcttgttgatcggttgattgattttaagtattaggttagatttacagaaatctgatatattagaaattgggctataaaaaagtctagtgagggagaagactcttaattcctcagcgataagcattattaacattttggaagcagtacatttacatattcccaaggaagttctttaagagcatattctttttttgttgtttttagaggcagggtcttgctctatggcccatgctgtggctctgtgatggctcactgtcacctcaacctactgggctcaagttctcctacctcagcctctcgagtcactgggactgcaggtgcatggcaccacacccagctaattttttttttttttttttttttttttgagacagagtctcgctgtgttgcccaggctggagtccagtggcgtgatctcggctcacttcaacctccacctactgggttcaaaagattcttctgcctcagcctcccgagtagctgggactacaggtgtgtgccaccacacccggctaatttttgtatttttagtagagacggaatgttaccatattggccaggctggtctcgaattcctgacctcgttatctgtctgtctcggcctcctaaagttctgggattacagaagtgagccactgtgcccgggcccagctaattttttgagacgggatctcactctgttgcccaggctggattgtgcagtggacacctcaggcttactttctactgggctcactgcagcctcgaccttctgggaaccacacccggctaatttttgtattttttatagagacagggctttgctgtgttgctcaggctcattttgaactcttgagctcaagcaatccatgtgtcttggcctctcaaagtactgagattacaggcgtgcactattgtgcccggtcagctaattaaaaaaaaaatttgggctgggtgcggtggctcacgcctgtacacccagaactttgggaggccgaggtgggtggatcatgaggtcaagagatagaggctatcctggccaacatggtggaaccccctctctactaaaaatacaaaaattagctgggcatggtggtgcgtgcctgtagtcccagctactcaggaggctgaagcaggagaatcgtttgaatccgggaggtacaggttgcagtgagctgagatcgtgccactgtactccagcctggcaacagaatgagactctttctcaaaaaaaaaaaatttttgttgagttggatttctgccacagttccctggttggtgttgaactcctgggctcaagtgatctttgggcctcaacctcccaaagtgctgtgattataggtgtaagccacagtccctggactaagggcaaattcttgaatttggaatcagagtagatttaagactttgggggatatttcattttgtaaaaaatctctctatattttctaagattcatttctttaatatgtttaaatagaatgtgcttttaaggttaggtggcatttgggggtattttgggacttaattatttgataaaatatttaattcttagaaagtaaatgctcgagaaaactgtgctaaaattttatcataaaatatttttctgaatgggactgggaatcataattttaagttcttattctgtttcctctgtttcaatgagtcaccatcttgttcatatcagtaatttggtaccccatccgttggaattacctttataatatgcctttaaaaggttcatatctagattttgtcacctgcacgtatgatcacagtgccattttcatttagtgtataataatagccacttttttttttctttgagatggagtctcgccctgttgcccaggctggagtgcaatggtgtgatctcagctcactgcaaactctgcctcctgggttcacgccattctccttcctcagcctccctagtagctgggactacaggcgcctgccaccatgcctggctaatttttttgtgtttttagtagagacgggatttcactgtgttagccagggtggtctcgatctgacctcgtgatctgcccgcctcggcctcccaaagtgctgggattacaggcgtgagccaccattcccagcccacttttttttttttttttttttttttgaggcagggtttcgctcttgtcactcaggctggagtacaatggcacaatcttggctcattgcagccttcactacccaggttcaagcgattctcctgcctcagcctcctgagtagctgggctacaggcacctgccaccacacccggctaatttttgtatttttggtagagacagggtttcaccatgttgtccagactagtcttgaactcctgacctcaaatgatccaccgtcttggcctcccaaagtgctggaattacaggtgtgagccaccacacccagcctagttattggaagacttttaaatatgttttaaacaacttgggtatgtgagtctactttataaatagtaaattttatgaaatctaaatacagttcagctatttctttttttttctttttagtttagctatttctgatgaaaatgtacaaattgagatgtgctgtaagtgtaaagtacatactgtatatagaagctttagtgcaaaagcaagtgtaaaatacctaattataatttttgtgttgatcatacgttgaaatgatattttagatatattgattaaagaatattattaaaactaatttcacctttttaaaactttttactacagtatctagtatggtgctgatagaaataaaacacaagctacatagaaatttaaaaatttctagtagctatattttaaaagtcttaagttttgcaataaaacttaaggggtaggatggacacggtgacttacgcctgtaatcctggcactttgggaggccaaggtagggggatcacctgaagtcaggagtttgagaccatcctggccaacatggtgaaactctgtctctactaaaaatacaaaaattagccaggcgtgatggtgggtgcctgtaatcccagctacttgggaggctgaggcaggagaatcacttgaacctggaaggtggaggttgcagtgagccgagatcataccattgcactccagcctgggcgacaaagcgagactctgtctcaaacaacaacaacaaaaaaatatcttagccctgccttgctgtacaaaggatttgagatggcataaactaccagcatctacattaaagagaaaaataatagtagaaattaagagttggaaaaaggaagcatttagagcataaggccagtgtagttgctgttggtgcgacagctaaggcaagaaaagagacagtcacctctcaggtagttgttattgccaagatggaagagcaaaactgcagagaaccagattgcctggatgtgacttctggctttgagcaagatctttaacctttctgtgtctcagtttcctcatctgtaaaatggggacaatcttaatgcctactttatagtgttattatgaagattaagttataagtgttagacacattttgtatataaaaagcctcatgttatgcattttaccatttcctaaaggacggcaatgttttttgaagcactgaattctaagagattttttatatggaccttttgtctaggagtctcttaataatgtaagagacagtatcctcagcatttttataacaaaagtggtgatagatttcctgtagtgtgtgtaaccttttgcgtgtgtaggttaagcacaacccagaaatattaatgaattatctaaagataagtaggtagattgcaggagtagaaaactggtggctcggggccaaattcttccacagatgtgttcttttttgtcctgtgtggtatttaaaattgtttctgccagtacataaaaaagaaaaaagaatttccatagaaatctggacttctagtttctcttagaaacatagtaagatttgtggaatggaaatctacatttccatatgtcagtagtgtgctgcttttaggctgggcctgattctgtttttcctcagttctagccttgcttgccatacccaattacctgtgtaggatattcttcccttccatctgtgtagcataggactgcacttctttagcttctctaaattttacaatgttttctgtacagtcttatacatctttttaaaaaattaaaaaaaaatttcctttaaaacacaggatttttaagtcttaacacatctttggagaaatatatttgtaggttctttagagctcttgtttctgttgcaaatagtatcctttaaaattttaaataattatgttgtagatctgtagtgatataattgatttttaataatatttatctactttgccacattattgaacttggttctaagagtctctgtggacgtcattgtttccatgtagtcaatactactattgtctgcaaacaatggcagttcttttttttcctttgatatccttatacattttcttattttcttattacactgtacaggtagtacattattgcaaataagtgatgataatagccactcttgttaaagccgtaaacaaatgctctacagtaatatgtgggtgactgtcatagggtttagtagacacgctttctcacattaaggaatttttttcttaaaataaagtacttaagctagtactattccttgaaaagccttagaattaatgaccagaccagaagcaatgagctatccttaagcctagactgtggtctccagatactattttcagcccattggaaagatggctgatcccaaatccagggtaaggaaatgtacaaaataagcttgaatgatgttactatgccagaaagcaagaaagactgcaaagatcatgtcagaaggtttcagtaatcaccagaagaggcagtcatacccccaaaagagataatttgagtattaataagaataataatcggctgggcatggtggctcacacctgtaatcccagcactttgggaggccgaggcaggcagatcacgaggtcaggagttcaataccatcctggccaacatgatgaaaccctgtctctactaaaaatacaaaaattaaccaggtgtggtgtcaggcgcctattaatcccagctactcaggagactgaggcaggagaatcgcttgaacccgggaggtggaggttgcagtgagccaagactgcgccactgcactccaccctgggcaacagagcgagactccatctcaaaataataataaaaataataataataataataataattgtaggctgggtgcggtgactaaacttgtaatctcagtcttttgtgaggctgaggcgggcagattgcttgagctcaggagttcgagaccagcctgacaaacatagtgaaaccccatctctactaaaaatacaaaaattagccgggcatggtggcagatacctgtaatcccaggtattccggaggctgaggcttgagaatcacttgaacctgggaggcggaggttgcagtgaggcgagatcgtgccactgcactccatcctggttggcagagtgagactctgtgtcaataaaaaaaggataataattgcaattgattgaaataaacgtttatattgcctttccttagcaatagtatggccttccttctgtatagagaagtttcttcttagagctgtagtccaactaataaatgaaggaatgaattagaatctaatcattttgcaacccatgatgatcgtcagttgctgctaatgtcacaaaagagagacgactaccagaaataattatacgcctcctggtgaaagttcataccactggctctaagtggtgcatatttgcaaaatgagatcacaacagaacaaagcaaaacctgaaaagtctgaatttgatcaagcctccttaggtatataacctagataaattttccagtatacaaagacatgtatgtataagagtattcatttcagcagtgtttctaataggtaaaacattgcaaacaatctgtttgtcctcagataataggtaagtttatattcaaaagtgggatactatgtagcagtgagttatgactgaattagatcttcttgtcttgatgtgagtaatactcaaagctgttgagtgaaaagagcgggaatacagtttgatatttgtttaaagtttaaaacatttaaaaccacctgtctctccatgtgtagtaagaatatatggcatggcagtcatgagcagcagtttagggttctgattacttctgggatggagaaatgagattgaggcccagtacacagaagacttcatttgaatttgtaatgtaaaataaatagggtgaaatgttaagatttgataaagctgcttggtgtgtcagtgacagttacgtgatttttatgtattttgagtggaatatttcataattttctcaaaagaaaaaattggattcactaggaatgtcaggtttttgttttttgtttttctgccagaagaatgaagaaacagactctggtctatatagattttatgttgtcaggcctacatagtggtagtgcagttgtaacaagcttgcttttcaaaaatgatgattttaggtgtgtgtgtgtataaaccaggcagttatttctgaatattaaaaagaaataggttgggtatggtgccccatgcctataatcccagcactttgggaggccaaggcagaaggatcgtttgaggacaggaattcaagaccagcccaggtaacatagtgagacctcatctctacaaaagtaaaaagttagggtagggtacagtggctcatgcatgtaattccagcactttaggaagctgaggcaggcggatggcctgagctcaggagtttgacactagccagggcaatacggtgaaaccccgctccagcctgggcgacagagtgagactccagctcaaaaaaaaaaaaaaaagtaaaaaattagcctcatgtggtggcatatgcctgtagttgtagctacttgggaggctgaggcagcaggatggcctgagcccaagagttagaggttactaactgtgaactaacagtgaactgtgatcatgccattgtacttcagcttgggcgatagagcaagacctgtctctaaacaaaaaaataaaataaataaaggtgacttttaaaaaggtctacccaatcagttgcaggcctgttaaaatttacagaatttcaattgcatgttttcattaaggtgattgttcatatcataaagctgcaattttttttttttttttttttaaattaagagacaggatcttactctgtcactcaggctggagtgcagtggtgcaatcgtagttcactgcagccttcaacaggaggctcaagcgatcctggtgcctgagcctcctgagtagttgagactacaggtgcatgccaccacgcctggctgatttaaaaaaatttttaaacaaaattttaagacaaaactttgtttaagaaacttttggccggcgcggtggctcacgcctgtaatcccagcacgaggccaaaacgggtggattgcttgaggtcaggagttcaagaccagcctggccaacatggcggaaccccatctctactaaaaatacaaaaattagccggatatagtggtgcgtgcctgtagtcttagctacttgggaagctgaggcaggagaattgcttgaacccaggaggcagaggttgcagtgagccgagatcgcaccactgcaccccagcctgggtgacagagccagacttcgtctcaaaaaaaaaaaaaaaacaaaaaaaaactgaaacaaaattttttgtttttaaattttgtagagatggggtcttgctgggttgcctggacttgtctcgagctcctgggcttaaggaatactcccgccttggcctccccaaagtgctgggattacaggtgtgagcaatttagatgtgcatctgaccgtgtgcgaaactgttctaaaagctaacaaaataggtgcagcttttatccaggggtaaccggattaaacactgataaatggcaacatttgtacttgctacaggaagatgtaaaaaggccagaaacatggaaaattctcttcgtaaaatagctttgaaattcaaagaaaattgtaacattaagagccatttggcggggtgtgattgctcacacctgtaataccagtgctttgggaggcgaggtgggcagatcacttgaagccaggagtttgagaccagcctggttaacgtgacaaaaccccatctctactaaaaacacaaaaattagctggggttggtggcacgcatctgtagttccagctacttgggaggttgaggcacgagaactgcttgaacgtgagagtcagaggaggttgtgttgagccgagatagcaccactgcactccagcctgggtgtcagagtgagactctcccccctactccccaaaaaagagagtcatatagaaaaactttgtaaaaattaaattgtcagtgtctatgtcaaatttactccatcagaatattggcgggggtggggtgggggcggtgacccatagttttcaaaactctcctacctgttctgaccagttaagtttgggaaccacttcttcaggcactgtatttgttacaaagggggctgaaaacttcgatctcttaggcttgttgctaatggctgactagaatgcttctgctgagaagagtttgaagtaaaagttttccattaattgtgtggaatttggatataaaagctggactgtttactctggtcttattaaagcgtctgctagagttgtggttagaaatgtttcaggtaggtttttcaagtcgctttaagtggagtagtagtactccattgaaatatttgagattgttacctaaggggcagatgcatgtaattgattacttttttccttctgttctttaactcatgcaacagtgtggagttttgcttttggagatttggagattgctgcggaaaaacggatgccctccttttgtgtgcatctcccccattgtactttttccccccaaacctttatctttctttttcaacatttgataactttgataacattctttttttttttctttctttctttttttttttttaagacagaatctcaatttgttgccctggctggagggcagtggcgcgatctcagctcactgcaacctactcctcctgctttcaagtgattctccttcctcagcctcccgggtagctgggattacaggctcacgccgctacgcctggctaattttttgtatttcagtagagacagggtttcaccgtgttgcgcaggctggtctagaactcctgagctcaggcagtccacccacctcggcctcccaaagtgctaggattacaggtgtgagccactgcgcccggccttgataatattcttaaagattaaacatggtatgttctcagcactatggctggccacttaagtataaagtgtgatcagagttaatccatcactggagtgtatatatcagatgctatttccagtcatataaccttatattttcccttagatttgtcaccttcaaaaagcaaatgcttgtttttgaagcagagtcactataaatgggggaatattgaaataatgcttgcccctttaaatttcagcttttctttttgctgtttagtttttaggtaaggtttttttgttgttgttatttgttttgtttttccacttcttctctgtgcctactgcacacagaggaagagagcaaattttaggtatgtcttaaatgttacaaaaaacagcttgtattcgtcagtcactggtgacttagtgtgactatcttaaaacttgacccgactgagcaactgctgctgccgccaccactgtcacaatgccaggttctggtctcagccgccctccactgtccagggcccctctgtcttggccctgggaccctagctgcctgccagctccagtcctagcaccatgttggagaaaagcatggaggcagtggctgagttgggcaccaaggacctgaaggagaaggtggaggaggaggcaagccagaaagagcgaaagaaagaagtggtggaggaggaggagaacgggcccgaagaggaagaaggagatgatgaagggcccgagctgaagagagctgccgaagaggaggatgaaccggatccctagcagtagaagacagaatggggcatcggcatgaccgcctgccaacaggctggggatgggaggcctctctcggcctggaggttggggtgggaacagacaagtccagccactcttcgcctggctccttgctatgggccctgcaccagagccgccaccctcttctttctccccagctttctcatttccacctctcccagacactgacccctccaccctcactctaccattgttccacctcctgacctactccatctgagctccccagctggcccccagttgctcctctctctttgttttcttcttgcctccctcccgctccccccaccctctggtagcctctcctgcctaacctctgcatcccctagcctcatgtcctgcctcatccctatcctgcctgggatctccctcagatcccctcctctaagacagcgccagactgggggtgggctggggttggggccaaaccccacagctgcctccctcccctccctttttggtatagttttttttttttttttttttttttttttgtaacagtttggctgttttcctaggctggagtgcagtggcgcgatctcagctcactgcaacctcccgccttcaaatttcaaaccattctcctgcctcagcctcccgagtagctgggattacaggcgcccaccaccacacctggctaattttttatttttagtagaaacggggtttcatcatgttgaccaggctggtctcgaactcctgatctcaggtgatccatccaccttggcctcccaaagtgctgggattacaggcatgagccactgctcctggcctgcctttttttgtatagtttaataagaaatggtcgtgcaaaaaaaaccaaaacaaaaaaaccacacttgaccctaaaaccacaaagtagtattaatgcctaagagtatgtcctattcctaataaaatatttttggataatttatctgtgtaatgcttggagtttgtcagaagtaagattgaatgaggatgatgaaaactctgatatctgattcttggaacatttgctttcactactaaaatacttatagaattatgaaatgagaagattgaaaaaccagtttgaaaaagagtaaggtttgtttgataatattttagcttctgattttctcattcaccttagtaaattttctgttgacattgtaaagatgactttcatcaacttctgtttcagaaattgctgtttaaatttaaattcaatgtgaagaagaaagggaagatttgttacttacataatcttttccatttcacaggcatttatgttttcctttttgatcctg

SEQ ID NO: 904 - DNA, 32744 bp, Homo sapiens
  source 1..32744: mol_type = other DNA
aggtcgctcgggtcgggtgtcgcctgagaaccggatgaggcggcgaccgtgaggccgagccgggagcgggcgtcttgccgaggcccgggcgggcggggagcaacggctacagacgccgcggggccaggtcgttgagggtcggcggcgggcgaggagcgcagggcgctcgggccgggggccgccggcgccatgggcaaccgcgggatggaagagctgatcccgctggtcaacaaactgcaggacgccttcagctccatcggccagagctgccacctggacctgccgcagatcgctgtagtgggcggccagagcgccggcaagagctcggtgctggagaacttcgtgggccggtgagcgggcgcggcagggatcgcgggcgggtggcggcctagggcgcggagggcggaccgggaatggcgcgccgtgcgccgccggcgtaactgcggcgcttgcgtgcccgcggcggggaaccggacggggtcggggaggcgggccctgtgggacgccctgggcagaggactccctgcaggggctccggagcaggcccgggccccaggggcggtgtcacgggccagggcgccgtaggacaggaggtgcgctggaaccctgcggtccatctggtcccagctttcgtgggtgaagtctgccatctggttggccgtgggtctggggtagatccctcttctgctctttcgggctgtccatcagaggtgaaaccggccatctagatatctattggggcgaccgctgcggtctggctggcttgttcttgtatctggagctgcccccgccgtctggttggctgtctctctgtcctgggcaagcctccctgccaccaccatttggttgtccatctgtccagtcccacctggcagccccctgctgtctggctagctgtccagggtgacctctgctgtctggccgcccatccgtgcccctcacagactttaacactgagcagtccctctgttgggtgacaccagctggcctctactgtctgactggctagctgactcctaggggaccctgtttgattctctctggctgactcttacagcttgattcctggctagcgctggctcctctcttccgtgtgaattcttctgtctgtctggccatctcctagtctgcccatgactacccctgagtgtctggcacaacggctctggaaaggggtggtaggagggtagaggggagaacagagctgaaggaggaggtttggaccctacttcccctctcagctggaaggaggactctgggggtaccttacttcaggattcctttccgagtgctagaacacaggggcccgcctcccagctacagcctacaaattgggggccctcctttggagcctgggaaggggcttcttgcgtgatcaggcctcagtggctagcgctgggatgtagccttctctggacagccttgagaagccgcggtgtgcccatctgtccagtgggcaaactccactctctggggctgtttccaggattcaggaagcaaatgaatgagaacagcccgtgcagccacctctccctcccaccaacccctcttgcctttcttgtctcccagatgggcggccacttctccattccaggaactactcatttgtggtggtgtggctgccaaatgataacatcctcctcctgtcattattgtcattgttattgttgttatcattgtcaagggataatgtcccttcttgattcaacatcttgaatcccaagtaaggagtggggtggaggctgtgttatcatccccaccttagctgagctgggaggctcagaagggactgtgatcacccaaggccactaggctggcgtaaggccttgtgtctgccatcccagagccttggggctttgctccaagcagcacaaatctcctcttttgctaccttgtctctagctcattgccttctgtctaccgtggtggaaaggtgtggacttgcagccagctgggcctggcctgatctcaggctggactgtggtgtgggcccctttgagtgaccatcttcctgcctgcccaggcttctgggacgggggtggggggtgtttgcaaagctctgtctctttcacttgccttgtgaccttgcacaggttgtcttggcctctctaagtcttggttgactctcctaaacaagtttattttattttatttatttatttattttttttttttttgagacagagtctccctctgtcatccagtctggagtgcagtggagcaatcttggctcactgcaacctctgcctcccaggttcaggccattcttctgcctcagcctcccgagtagctgggattacaggcgtctaccaccaagcccaactaatttttgtatttttagtagagacggggtttcaccatgttggccaggctggtctcaaactacttacctcaagtgatcctcatgccttggcctcccagagtgctgggattacaggtgtgagccaccaagcctcgccccaggagttccaagaccagcctgggtaacatgacaagatgccattctacaaaaaataaaaaaattagccaggtagggtggtagtcccacacctgtagtcccagcaactcaggaggctggccctgggaggactgcttgagcccaggatgtccagactgcagtgagccgtgattgcaccattaccctccagcctgggtgacagaaccagatccggtttcaaaaaaagaaaagaaaaagtgcttacttacctaacgcactgcctggcacatagtaggtctacatggatggggctattgttgtttatctggctggttcctttgctatcagggacaaaagctaaccagaatgaaagtgctttcacgttacacacttaagccttatgagggaggcattgctataatccccattttacagagcaggaaactgaggctcagatagctgagcagaacactctcactggaggctgtaaagtgaggagttaggtgttctgggttgggaacctgggtctctctcccatccttacctctcctcagtccctctaccccttgcctttctctcctgtctaccatggtgtctggcagctgccggccagtatggagctggttcctgtggcgacctcctagaatcctgcaatgcaggagttgctcattatatatatatttttacaccgagtctcactctgttccccaggctggagtgcagtggtgttatctcagcttactgcaacctccacctcccatgttcaagcgattctcatacctcagcctcccgagtagctgggattacaggcgcgcgttaccacacccggctaatttttgtatttttagcagagatggggtttcaccatgttggccaggctggtcttgaactcctgacctcaggtgatccgcccacctcggccacccaaaatgctggcattaaaggtgtgaaccaccatggctggcctcgttaagagtattaattcagtacctgaaagccaaagttgtaaaaaggcctctctttgggtatgaggggctcaaacaaggcttacttttttttgggggggtgtaagagataaggtctctctttgttgccgaggttggagtggaggggtgcagtcctagctcattgcagcctcgaactccagggctcaagcaatcctcctgcctctgcctctaaaagcactaggattacaggtgtgagccattgcgccgagcctggattttctaaggatgtggtccgagtgggaacagcccagttagttcagccctatagctggaagtccagatcactggctctgggggccaaggcctgcctgctgggtcttttgttttacctgcgtagcttttgtttttaataagactttccagtgttagatttccagtcaatatccggatttcttgtggctctaagacactcagatctatagagttctgagttgtcatgcaaaggctgtgggcctaaggcctggttccaccatgtctggctgtgcgactcggccacgtggatttggcgttctgggcctcagattccttttctgtaagctgagggtggtaactggtaccctggggcctagatgggtgattgggtgatgcgtgccgagtgcatgtgtcttatacgcatggtggctgttgttgtaatcagtttcacctggcgttgctgagcctttgtcccttgtggcagtaatggcttcgatttcagaagcaccagtcactgtcccatcagactaagagtggccactccagctgccacagtccccactactccctagcactcacccaggcctagatcattttgcttggagcctcctggccctggaacctttgagtttgagacccctggcttgtctgcggtgcaccagcagatagaactttggccctaaggagaaaggagggcatcactccctcttgacccttgtcatttagcctcaggggctggccagaaggaaggccttaggcattcccgcaccctagcctcccgagtagctgggactgcaggcacccgccaccacgcctggctaatttttgtatttttagtagagacgaggtttcaccatgttagccaggatggtctcaatcttctgaccttgtgatccgtccacctcggcctcccaaagtgctgggattacaggcgtgagccaccgcgcctggcctgagatagggtcttatactgtcacccaggctagagtgcagtggcaccatctctgctcactgcagccttgacctcctgggctcaagcgattctcctacctctcagcctcctaagtagctgggactacaggcacgtgccaccacgcttggctaatttttcattttttgtagatacagggccttgctgtgttgcccaggctggtctcgacctcctcgcctcaaatgatcctcctgcatcagtctcccaacgtgctggcattacaggtgtgagccactgcgcccagcctcctcttcattaaaatacaagttataatagcacttctttccctttcttttttttttttgagacggagtctggctctgttgcccaggctggagtgcagtggtgcgatctcggctcactgcaatctcgcctcctgagttcaagtgattctcctgtctcagcctcccgagtagctgggactacagttgcgagccaccacacctggctaatttttttttttttttttttgagacggagtttcattcttgttgcccaggctggagtgcaatggcacgatcttggctcaccgcaacctcccctcctggtttcaagccattctcctgcctcagcctcctgagtagctgggattacaggcatgcaccaccacgcctggctaattttgtatttttagtagaggcggggttttcccgtgttggtcaggctggtctcgaactcccgacctcaggtgatctgccggccatggcctcccaaagtgctgggattacaggcgtgagccaccgtgcccggctaatttttctatttttaatagagatggggtttcgccatgttggccaggctggttccaaactcctgacctcaagtgatcttcctgccttggcctcccaaggtgctgggattgcaggtgtaagccaccgcgcccagccccgtcttctttaaaataggagttataatagcacttctttccctttcttgaatagggattaagtgagacagtttggagtgcttggcatagaagaagtgcttaaaacattaggtgttgttcgttcattaaaaaatgtttcctgagtacttttactgtgtgcctggggacatggccctgagcaagttaccagaacttctgctctggaggagctggcctttcagcaggaagcaaataaaggagaagcatgggccacttagtggctcaggcccacaatctcagctctttgggatccaggcgggaggatcacttgagcccagaagttggagaccagcctgggcaacatagaccccgtctctacaaaaaataaaaacattagctgggcatggtgacacctgtagtcccagctactcaggaggctgaggccggaggatggcttgagcctgggatttcaaggctgcagtgagctctgatcacgctactgccttccagcctgggcggaagaacgagacctcgtctcaaaaaaaaaaaaaaaggcgataagtatgatggaaaaaaggatcaaggagcaggatgagggagagatcacagttggagggggtacattttattttattatattattattctttgagacggagtctcactctgtcttccaggctggagtgcagtcacgcgatctcggctcactgcaacctccgcctcccaggttcacgccattctcttgcctcagcctcccgagtagctgggattacaggcgcctgccaccaggcccggctaattttttgtatttttagtagagatggagtttcaccatgttagccaggatggtctcgatctcctgacttcgtgatccgcccgcctcggcctcccaaagtgctgggataacaggcgtgagccactgcgcctggccagagggggtacattttaaatagggaaattggtgacatttgagcagagccttgaaggaggcgaggaaggaacccctggagacgggaagagaatccagtgcaaaggtcctgatgtgggaggatgcccggaggccagtttagcaggccagtggagggagatcagatctgggagatattagggtgggaccaggcctctaggaacattgtgggcagggaggctgtctgagcagagggaagtaaagctggtggcgctactgctgtccctctggacctggccaagctgagggctctctcctttgatttccagcttcaactcagttttctcagtaagcagactccacaggcatgtaggcgccccgtgccatttttcttttaataagaagcagctgtgccggggatgctggcgtttccagctgcgtttttatttggcctttggtgatgtgtccctccagggatatgtggatgagccgcgggggcactgcctgtgcctcagtgggtgctgcaccagtgcacatcggatgcccgttggctcctgtccctgacagatggaggggcacgtgatgtgttccttgggctggtttgtccctttaacagatcttattagtttagagccacttggaaatgacatcttctgtttccagtgactttccttttgggcaaagacaaattgcatcttgaaaaggccatacatggccgggcatggtgactcacacctgtaatcccagcattttgggaggccgaggcaggcagatcacaaggttgggagtttgagaccagcctggccaacatagtgaatcccgatctctactaaaaatacaaaaattagccaggtgtggtggcgcatgcctttagtcccagctatttgggaggctgaggcaggagaatcacttgaacccaggaggaggaacttgcagtaagcggagatcacgccattgcactccagcctgggggacagagtgagactccatctcaaaaaaaaaaaaaaaaggaaaaaaggaaaggccatgcaaggctcggttagggtggtctgcagtgctgggcctgctggaattggtacagtccagagggatctgtgggaatatggaaggcttggttctgccacacaccaaaaaagtgacctcacttctctgggcctcagtttcctcatctggaaaatgggaacatggtggtctctgcctactgggagtggactgagaatcacgtagcaaattgttgtgaaacaggcagcatttgtgatctcgttggttggcttttgtctccttttatctgggatcaggactctgatgacaggtgtacgtttcttttctcttgctctgtcccccagactggagtacagtggcgtaatcatggctcactgcagcctccaactcctgggttcaggtggtcctctcacctgagtctcctgagtagctgggactataggcatgagccaccacacctggctaattacaaaaaaatttttttggcagggagcgatggctcacacttgtattcccagcacttggggaggccgaggcgggcggatcacggggtcaagagattgagaccatcctggccaacatggtgaaaccctgtctctactaaaaatccaaaaattaggtgggtgtggtggctctcacctgtagtcccagctgctcgggaggctgaggcaggagaatcgcttgaacctgggaggcggaggttgcagtgagccgagatcgtgccactgcactccagcctgggcgacagagcgagactctgcctcaaaaaaaaaaaatttttttttttttagagacagggtcttactttgttgctcagtttggtgtcaaactcctgggcccaagcgatcctcctgccttggcttcccaaagtggtggaattacaggtgtgagccgccgaacccggccttagtttctttttccttaaagagaaggaactcatcattactctgttgatataaatggagtgcctatcagtgcaggcaatgttcttgctctggggatacagccaggaccaggacatgcaggcacgccctgttccccagatcctgaaatatcgaccagaagttgttcctggttcctttctaagtgggaatcatggctgcaaacaagtaattggccgtgagagttatttacacacattttgtgtacggtgatgagaaatgggagaaaaaatgcccagcatcggatcaccagaggtcaggagttcgagaccagcctggccaacatggtgaaccctcatctctactaaaaatacaaaaattagccgggcgtggtggcaggcgcctgtaatcccagctattcgggaggctgaggcggagaatcgcttgaacctgggggacggaggttgcggtaagccgagattgcgccgctgcactccagcctgggcaacagagcgagactctgtctcaaaacaaacaaacaaacaaaaaccaatgataggggatttggccagataagcgtgtccagacaaccgactatcaactcgctactcagagggatctagaagaatctttaatgacccagaaagctgcacaagacctgttaggtaccagatgaaatgggctgtgggatcctgtcttgtttaaaacgattgtatttgctcagtgaaaagaccggaaagacatactctgccctaaccccacatgtgaatcgtctccccatgtgattcttggtttgtttttgctggtttggggattaggtttataatcaggaagacagatttctccaaagctgcgctctaggctgtccaagtgctttttcagagttacttattgacggataacagcccttgataggttcataacattgaaatcccctggtaataacctggattgtttctggatgagggcggaagatggccttggggacagttgtagatttagagaggaggttttcttttcttttctttttctttttttgtttttttttgagacgggatctcactctgttgcctaggctgaaatgcagtggcgtgatcacagctcacagcaacctcaacttcctgggctcaagggatcttcccacttcagcctcccaattagctgggaccacaggtgtgcgccaccacccccagctaattttaagaaattttttgtagaggtggggtctcattattttttgcccaggctagtctcaaacccctgggctcaagtgattctcctgcctcggcttcccaaagtgctgggattacaggcaagagccacggcacccggcctaggttagatttagagttttcagagttggcttaggcggtagaggctggcctttgaatggaaccctgtctcgctgtcgctctcagcgtttatatttggctcagagccacatctgccaaacttctgcccgatttgaatgaaagtgctgaaattataggcccctcggctgctgaaaaaaagtgagaacatcatgtaaaccgtaatttactgggattgccaactacaagctgtaattaagcccttattgtgttaaagctttggaaaaatccaagccaataatgagatatttatagggcattagctacaatctgaataaagggaaaatgtggccctgcgtctgaagcaggactgcaaagagaggaaagacgcctgcttccgggtgcgttttgggtttctgtgaatattggtaactaggtccctgctgggtggtgggaaattttcccctgtggcgtcacccgtagcttgaaccgggagctggatgactgtttcagtttcatctgctgctggacatttatgatgttaagagccagtgtttatggagaatcaccgtgtgccacatgtgcaagatctgaccagtgtcttctctgcccaggggtggcagctgctgctcttagcatccctgctttataggtagagaaactgaggccagagagggagactggcctgaagtcacacagggaggaggacagaggagttggagcttgaactggatgtgggccctctagagccacacatatggcggctttgggtgggaaggtgtgggcctgactcttgagagcagggctgaatggtgggcaccatggcgtttgtatctgaggactgggccaagattacagagggagtgagcaacgcgtggctttggatatgcatcgaggttgtcagctctgtgtccagcctgcgtgtggtaagcagcaaccactctacaccagttgctgggcacccagcagggactgggacagacaggacaggtgaacagttaaatgagcaagaacattctggggcaggcacaggggctcacacctgtaatcccagcactttgagaggccaaggcgggcagatcacttgaagccaggtgttcgagaccagcctggccagcatggcgagccccatctctaccaaaaatacaaaaattagctgagcatggtggtacttgtctgtcgtcccagctacttagcaggctaaggtgggaggatctcctgagcccaggaattcgaggttgcattgagctatgattgcaccactgcgctccagcctgggtgacagcaagacccggtctcaaaaaaaaaaaaaggctgtatgcggtggttcacgcctgtaatcccaacactttgggaggctgaggtgggagttcgagaccagcctggccaacatggcgaaaccccatctctactaaaaatataggcaggagaatggcgtgaacccgggaggcggagcttgcagtgagccgagatcgcaccactgcactccagcctgggcgacagagcgagactccgtctcaaaaaaaaaaaaaaaaaaaaaaaaaatataaaaaattagccaagcatggtggcgggcacctgtaatcccagctactcgggaggctgaggcaggagaattacttgaaggttgcagtgatccgaggtggaggttgcagtaatccgagatcatgccacggccctccagcctgggcaacaagagcgaaactctatctcaaaaaaaacaaaaataaaaatattctgaagagtgagaagcggtttgccctgtactgcattgggtgggggaatggctgcagggggctgcttcacatgtggcttgttgggatgggtgtcctgcagtggaatagccccgccaggacttgggggaacagcatcgcaggccagggaaacagcaggtgcagaggcctcgcacacacccggcccgctgagtgccccctgcggaccggaaaggaccagtaggcacgtgagagttaggacgctgcccgtggaatgccgacttttctaaatttgaattacgcaagtagagcgtggagacagtgttcttggaaaaagggaaaccattacagatgaggaagagcacactgcccagcccgtcccttcctccagctctacctgggagcaccactgtcacttcagggtatgtctagccagacccctctggtgtttctgtacttaggtacatgctggtacctatagagaatacgtggcaccattatgggtggttattttttttttttttggaacaggtctcactctgtcacccaggctggagtgcagtggcacagtcatggctcgctgcagccttgacatcctgtgctcaagccatcctcctacctcagcctcctgagtacctgggacaacaaccacatgccaccacgcccaactaatgtttataatcttttgtacagatggggtttctctatgttgccaaggctggtctcaaactcctgggctcatgcgatcctttcacgttggccccccaaagtactgggattgtagacatgagccacctctcccagccacgtgcatatatttgttgaatgaaagtagctaaaggctggaagtggtgactcacgcctgtaatcccagcactatgggaggccgaggcaacatggcttgagctcaggagtttgagaccagcctgggcaacatggtgagacctcgtctctaccaaaaatacaaaaattagcaggcgtggtggtgcatgcctgtactcttagctacttggaatcccgaggtgcgaggatcccttgagctagggtagcggtggaacttgcagtgagcccacactgtgccattgcactgcagcgtgggtgacagagcgagaccctgtctcaaaaaaaaaaaagtagctaaaaaccagaatggagtgaatttcactgcacagtcatggaggggaccaggcagaggacagccctgggtcttggttttggagactcacagcctgcctggggatgcagggaccctgaagcaaggacatcttcctttggaggaagtggagatttgctccatctatataaagagtaataacagtaataggctgagaccctgaggctgggcagcgtgggtgtctatctgcgttggcttcgagggctgtaagatggggctagcagcgtcccctccagggtgggagtgaggccctgtatggcaacctgcggggtgccccctctgacttttgcttcctgcctggctgctcagtggccctggcaggggcaggcaccactgctctttctgttacaagagacctcctttggataaatctgaacacgctcccatggcagacctatggggcggtagacaagaggccagcagagctgtcccaggccctggtgacacctccatgcccaggtgaaggaggagcaggctacttggagcctgccctgtgacacactttcgcggtgatgagagcttctcagggctgcgatcctggcgggccagtcaagcgggcaggagcagccccagccagggtgaccctgcctgctgggtgatacgccctggcacgaccaggccagccctggggaaagcccccagggcggatcagggagggacacagctgtcctggccatgagacttctgtcttttgtatggatacacagggtccttctagagggtcacagcctccacccccgggaggcctaccagctggccgcgcagccaggatcctgcagccaccaggacactgcctttccaggttgttcttttcttttccttctttttttttttttttttgaggcagagtctcacagtgtcgcccgggctggagtgcaatgcatgatctcagctcactgcaacctccacctcctgggttcaagtgattctcctgcctcagcctcctgagtagctgggattacaggtgtgcaccaccacgcctggctaattttttgtatttttagtagagatggggttttgccatgttggccaggctggtctcgaactcctggcctcaggtgatccacccgcctcggcctcccaaggctctgggattacaggcgtgagccgccgtgcccggcccccaggttgttcttttctacatcaacatcaggggacagtgactgagagaggccacgagccactggctcagcttgacgaaggcttcctgtggtttgggttgatgtatctctctgtcttgcaacactgagttccccgttgtctgggcggaagccagtcagacggaagcccggcttctgtggtgcctgccctggtggcctggacaggttgctgggaagctcaggtcaggctgctttctgaggtggggaggccccacctggaatgtgctcccagcactgggtgaaaattgatgcacaggcttgattttttttttttttttttgagacggagtttcgctgttgttgcccaggctggagtgcaatggtgcaatctcggctcgctgcaacctccgcctcccaggttcaagcgattcttctgcctcagcctcccgagtagctgtgattacaggcgtgcaccatcacacccggctaattttttgtatttttagtagagactgggtttcaccatggccagactggtcttgaactcctgacctcaggttatccgcctgcttcagcctcccagagtgctgggattacaggcatgagccaccgcgcccttaaactcttttctgttaaaggagttattcaactgtttactcgttgtggagaaaaaaaaaaaaaaaaaaacaggccgggcggtggctcatgcctgtaatcccagcactttgggaggccgaggcgggcggatcacgaggtcaggagattgagaccatcctgactaacacggtgaaaccccacctctactaaaaatacaaagaattagctgggcgtggtggcgagcgcctgtagtcccagctactcgggaggctgaggcaagagaatggtgtgaacccaggaggcggagcttgcagtgagccgagatcgcgccactgcactcccgcctgggtgatagagcgagactccgtctcaaaaaaaaaggaaaaacaattcaccctgtccggaagtgcacagagtaaggctgggtgtcctttgcatgggaacgacctctagcagtctgtggctcttgccagattttttatatatatatatatatttctaggtgtgactacccccgactcatccaaccagtgagcctataagtctagtaacaaacgctcccgctccacagtccaaagtctcaacagaatgtgactgtcttgcaccaggtccctgctatatttagtgcctccaagaatgtttggcttttgttttctgttttttttttcttttgagacaaagtctcgctcttgttccccaggctggagtgcaatggcgcgatctcggctcactgcaagctccgcctcccaggttcaagcgattctcctgcctcagcctcccgagtagctgggattacagacacctgtcaccatgcccagctaatttttgtagttttagtagagatggggtttcaccatgttggccaggctagtcttgaactcccgacctcaggtgatccaccctcctcggcctcccaaagtgctgggattaccagtgtgagccaccgcgcctgggctggtgtggtttttttttttttttttggagacagggtcccactctttcacccaggttggagtgcagtggcatgatgtcggcttactgcaacctccccctctcgggctcaaaccattctcccaccacagcctcccaactagctgggaccacaggcgcgcaccacaatggccggcattttttttttattttcggtagagacagggtttctccatgttgcccaggctggtcttgaactcctgagctcaggtaatctgcctgcctcagcctcccaaagtgctgggattgtaagcatgagccacaacgccctgcctagaaataattttagatttagagaaaataaataagcttcaaatttacagaaagtacaaagataacacagagagctcctgtacatccttcaccagtgtcctctaattttatatttcttacaaccaagaaattaacctagctactcaggaggctgaggcgggaggattgcttgagtctaggagttaaagcccagctttggcaacataacctcttctctaaaaataaatgaatgaggccggacatggtggctcacgcctgtaatcccagcactttgggaggcagaggcaggtggatcacctgaggtcaggagttcaagaccagcctggccaacatagcgaaaccccatctctactaaaaatacaaaaaattagccaggtgtggggacatgtgcctgtagtcccagctatttgggaggctgaggcaggagaattgcttaaacctgggaagcggaggctgcagtgagccgagatcgcgccactgtacttcagcctggacaacaaaaggagactccatctcaaaaaataaaaaaaaaaaaatgaatgaatgaaattaaccttggtatactactattaagtgaggcctggcgggatgttgtggctcacactgtaatctcagcactttgggaggccaaggtgggtggatcacttgaggccaggagtttgagaccagcctagacaacatatcaaaaccctgtctctacaaaaaattgagtgtggtggtatacacctgtagtcccagccactcgggaggctgaggtaggagaattgcttgaacctgagaggccaaggttgccatgagctgagatcaagccactgcactccagcttgggcaacagagggggactctgtctcaaaaaaaaaaaaaaaaggaagggaggccaggtacagtggctcacacctgtaatcccagcactttgggaggctagattgcttgagcccaggagttttagaccagcctgggcaatatagtgagacctcgtgtgtagaaaaaaaaaaaaattagcttggcctggtggtgctcacctggagtcccagctcctctggaggctgagacaggaggatcacttgagccctggaggttgaggctgcagtgagtgatgattgcaccattgcacaccagcccgggcaacagagccagaccctgtctcaaaaaaaaaaaaaaaaaaaaaaagccaaagccagaatgtacagatttcttcaatttttcccatatgagactaatttaaaaaaaaattttttttttttatcgagatgggggtcttgctgtctggaagtatacatactgagaaattttatttttcaaacaaaatcaccccttttcctgtcttaggactggacattgcatctagttgtcggatctccttaagcctttttctggtctgggaagcaactcagcccttccttgttttttataaccttggtaagtcatggaatgtccctcaattagggcttatctggaattcttcatggtgagcctggggtgtgagttttggggaagaaggccattggtgaggtgcccctctcttctgtgaatctttttttgtttgtttgttttttgtttttgtttttttgagatggagtcttgctctgtcgcccaggctggagtgcagcggcgcgatctcagctcactgcaagctctgcctcctgggttcacgccattctcctgcctcagcctcccgagtagctgggattacaggctgccaccatgcccggctaatttttgtatttttttttagacggggtttcaccgtgttagccaggatggtctcgatctcctgacctcatgatctgcccgcctctgcctcccagagtgctgggattacaggcgtaagccacctcgtccagccatcttctgtgaatcttatcaggagtataggataccaacaagactgataaattattgacagtgataactgatgatgctgaccttgatctcttggctgaggtaggcttgctaggtttccccactggaaagttactagttttcttcttttcatactctatcctttgggatcatggaaaattttatttttattttatttttggagagtctcgctctgtcatctaggctggagtgcaatggtgtgatattggctcactgcgacctccgcctcccggattcaagcgattctcctgcctcagccgcttgagcagctgagactacaggcgcccaccaccacgcccggctaatttttttttttcaagagatggggtctcgctgtgttgctcaggctagtctcaaactcctagactcatgtaataatcctcttgcctctggctcccaaagtgctgggattacaggcattaaccactgtgcccggccttttctggcactattgaaaagaccatcctttctccctaaagttgcttttgtctggaattagttggccatatttgtgtgggtccaacctgaactgtctgttctgtgacgttgatgtatggctctgtcctttctccaaaaccacatatctttcttctctttttagatagagatgggggctgggcacagtggctgacgcctgtaatcctaacactttggaggcaggtggatcacttgaggtcaggagtttgaaactggcctggccaacatggtgaaactccgtctctactaaaaatacaaaaaaattagctgggcgtggtggtgggtgcctgtaatcccagctaattgggagactgaggcaggagaatcacttgaacacgggaggtggaggttgcagtgagccaagatcgcgctattgcactccagcctgggcaacagagtgagactctgtctcaaaaaaaaaaaaaaagaaaaaaagaaaaaaatagagatggggtctcacaatgttgcctaggctggtttcaaactactgggctggtgatgctcctgcctcagccttccacagtgctggcattatgggcgtgagccaccacgcccactcatttctatattgctgtagctttatagtaagacttgaaatcaggccatgtgagtcctcttttttcttgtttctcaaaattgttttgtctagtctagttcctttgcctccacatatatattttagaatcagcttgttgatttcatagaaaagatcattgtgtattagtacgtggaaagccacggtattagttttttgtttgtttgtttgtttgtttagacaaagtctctctctggcacccaggctggtgtgccaatagtgttgggattacaggcgtgaaccactgtgcccagctggtactggtttttataactgtgtattattccatccactgtcactacttccccaggaccagtacagtttctgcctcctcagtcttgcacctttaaccttgtcctcacccccaggctgttctccctgcagtggacagagggagcctgttaagaatatccttcctagctgggcgccgtggcttacgctgtaatcccagcactttgggaggccgaggtggaaggatctcttgagcccaggagtacgagaccagcctgggcaacataacgagacccccatctctacaaaacatttaaaaattagccaggcatggcagcgcatacttacagtcccagctactcaggaggctgaggtgggaggattgcttgaacccaggaatttgaggctgaagtgagctgtgatcctgtcagtgcactccagccggggagacagagggagaccctatatccttcctctacttggaatcctccctggccctcagttccctcagggtaaaaatgaagtcgtccctgaggctccatgatgttctcatgcaggtgaggcgctgtcctacctcatggctttttcacatgctgcttccactgcctgcactgcccttcccccagataaccctgtggctcatttcatcagcattctaaggcctctgcttaaaagcctccttctcaaaaggctctccccctggccactctgctcaaacgccccaccctgttctctctgtccccttcccctgcttaatttttcttggaaccacttgtcattcctgtcattgttccacctatgcgtttggtttcttgttttctttttttggggtggagtcttgctctgactcccaggctggagtggagtggcgatcttggctcactgcaacctctgcttcccgggttcaagcgattctcctgcctcagcctcccaagtagctgggattacaggcgcacgtcaacatgcccgtatatttttgtatttttagtagagacgaggtttcactatgttggccaggctgatctcgaactgctgacttcaggtgatctgccagccttggcctcccaaagtgctgtgattacaggcatgagccaccgcacccggcctatttgtttgatttctctttctgtctccccccactagaaggggaatgccccatggtagggcggtgcccctggctgtagcgcagtcccttgcatggtgcctggcatgcgataggtaatcggggcacccatctccctctcgggatgcactcattgatgtacttgtcaatcactgagcaagacccactcagcaatgtctgctgagcctgctctgtgccaggctctgacctgaactgccacccttctggagtcaaacaggcctggttgccaccaagaggagttaggcctggcagaggagacaagcattagtctcacaacagaaggaagtaggccggacgtggtggctcatgcttgtaatcccagcactttggaaggccgaggtgggcagatcatctgaggctgggaggtggaggttgcagtgagccaagatcacgccgctgtactccagcttgggtgaaagagcgagactccatctcaaaaaataaataaataaataaataaataaaaaggaagtggagactttcattgagatcagtatcaaagggcacgaggtggcagggcatggtggctcacgcccatagacccagcactttgggaggctgaggtgggaggattgcttgagcccaggagtttgataccagcctgggcaatatagtgagacctcatgtcaacaaaaacagacaaaacaaaaaaaacaggggagggagggctacaggagggtgggatgaggactggccacagttggaggccaggcccttcctggggatcccagcggttgttactctttaagaaggacctggcctggtgtggtggctcacgcctgtgatcccagcactttgggaggttgaggcgggtggatcacttgaggtcaggagttgaagaccatcctggccaacatggcaaaaccccatctctatgaaaaatacaaaaaaaagttagttagctgggcgtggtggtgggtgcctgtaatcccagctacttgggaggctaaggcaggagaagtgcctgaacccaggaggcagaggttgctgtgagctgagatcgcaccgttgcactccagcctgggcaacaagagcaaaactccatcgcaaaaaaaaaaaaaaaaggctgggctcagtgactcacgcctgtaatcccagcactttgggaggccgaggtgggcggatcacgaggtcaggagattgagaccatcctggctaacacggtgaaaccccgtctctactaaaaatacaaaagattagcggggcgtggtagcgggcgcctgtactgtagtcccagctactcaggaggctgaggcaggagaatggcttgaatcctggaggaggagcttgcagtgagccgagatcacgccactgcactccagcctgggcgacagagcgagactccgtctcaaaaataaataaataaataaaagaaggacgtgttcccttgttcttctatggggacatggggaactcctgtactgttttattttcctgaaatatttttattgaaatataattcacataccataatacctaatccttttgaaatatactattcagtggattttagtatattcacagttgtgtaaccagcaccactatctgattttgtagcactttcatttcccctaaacccatacatatgaagcagttcctccctcccccagcacctggaagccactaatgtcctttctgtctgtgaatttgccaattttggatatttcctataaatggaatcttacagtatatggccttttgtgtgtggctttgtttatttagcatcatgttttcaagattcatccatgctggttgggtgcagtggcgcacgcctgtaatcccagcatttgggaggctgaggcgggcagatcacttgagggcaggaattgatgagaccagcctgcccaacatggtgaaaccccttctctactaaaaatacaaaaattagctgggtgtagtggcacatgcctgtaattccagctactctgggtggctgaggcacgagaatctcttgaacctggggggcaaggttgcagtgagccgagatcactccactgcactctagcctgggcaacagagcaagactctctctctctctcaaaaaaaaaaaaaaaaaaaaaaaaaagaattcaccaatgaagccacctgggcctggacttttctttgtgggacgttttttgaatactaattaaatttcttgtacatctattgagtttttctgtgtcttcttgagtcagtttcagtaatttgggtctttctaggaatttgtccatttcatctagggtgtatttaatttgttagaatagtattcccttatcatcttttttatttctgaaaggttggtagtgatgtctcctctttatttctgatttttgtaatttgagtcttatctctttttctcttggttaatctagctaaaggtttgtcagtttggttgatctattcaaagagcaaattgtggtggtgttaacttctctctccatttttttagtctctttatttcttctctaattatttccttcttttctctttggatttggtttaccctccttttctgaggttcttgaagtggaagattattgaaatctgaaagtatttgaaatctttctcttttttttgttttttttttttgagacggagtctcgctctgtcgcccaggctggagtgcagtggcacgatcttggctcactgcaagctccgcctcccaggttcacgccatcctcgtgcctcagcctcctgagtagctgggactacaggcacccaccaccatgcctggctaatttttgtatttttggtggagacggggtttcaccatgttggtgaggctggtctcaaactcctgacctcaggtgatccacccacctcggcctcttaaaagtgtggggattacaggcgtaagccaccgcgcccggccaaaatcttccttctttttaaatacagttgcttacatctatgaatttccctgtaaacctgctttagctgcatccataagttttgatatgttgtgttttcattttcatttatctcagcatatcttctcatttctcttatgatttcttctttgatacataggttatttagcagtatgttcatttctatatatttgagaatttctgaaaaacatctttcttgtgttcatttctaacttcatttcactgtggttggaggaactactttgtatgatttcaatctctttaaaattattgagtcatgttttatggcttggcctcgaatacggtgtgtcctggagaatgttccatatgcacatgataagaatgtgtattttactcttgggtggagtgttctgtacacatctgtcaggtcttattggtttcgtattttctatttccttgttatcttttatttggttgttccatccattattattatttttcttgcctgataccaatgctgatatccatccatgattgaaagtggggtattgaagtctccaactttctttctttcttttttcttttctttttggagacacggtcttgctctgtctcccaggctggaaacgtggtggcatgatcatagctcactgtagcttctgtctcctgggctcacatgatcctcccacctctgcctcccgagtagctgggaccacaggcgtgtgccacacccgactaatttttgtattttttctagaggtagggtcttgctatattgaccaggctggccttgaactcttgggctcaagtgatcctctcatcttggcctcccaaagtgctgagattacaggcatgagccactgtgctcagccccaaattggccaatatttctttcttttttttttttttttgagacagagtcttgctctgtcgcccaggctggagtgcagtggcgcgatcttggctcactgcaagctccgcctcccgggttcacgccattctcctgcctcagcctcccaagtagctgggagtacaggtgtccgccaccatgcccggctaattttttttgtatttttagtagagacggggtttcaccgtgttagccaggatggtctctatctcctgaccttgtgatccacccgcctctgcctcccaaagtgctgggattacaggcgtgagccaccacgcctggccaatatttcttttgttctgtgctttttccttcctccctcccttcctctttaccttcctctttaccttcctctttccctccctcccttctttccttccttccttcctttttgttcttgttcttttctttttcctctacccttctttcttttccttctttctttttttctttctttgtttttgcttgattgcagcatcatgagagagtcctgtgcttttttatagctgcaagtattcctgggtcgagcctactcccactaacactgatcactctcccccttgaatttttaggttatttctagtttttcccctcctgccagagacttgggggtccgcaggcttgtgtgtctgctatgctcagggtggataccctgcaagggagtgccatgttgcatcagaagtggatttagagtgatgttgccaggcccaccaggaaaggctgtgccaaggctctttgctggggtgccaagaagaagggtctgtgcctgttgtggtgccaggcattgacatccttcactcccacccccgtcaccctcatgaactagtgaactagtcctgtggaatagggccttatgcgtgctagaccctgggtttgtcctgctgacaaccccatagtgtaggtgctgttatcccaatttcatagagaaactgagggctggggaagtggcagccttcattcagttcctgccgtgaggctgtggctgagctgccaggctgcagagtcttcacccaatgatcttgctcagttgtccccatgaggaagctgagcctggccttcctgtctctggagtccaaggtttcctttccttgtgtgcccctggaagtgctgtgtggtgaccgggatggtgcctggcagatggagattagacgcaggttggattggtgcctcattggtcaggagggctgctcttagctgtgtgccaatagaccggatgacttaatctctctatccttggtttccccatctgcaaaacagggttggccagagccctgtgaaggtggaagaaggccctgtgtgcctggagctttgtgcagtgccctggagatgctagcttgtttttctttcttttttttttttttttttgagacagagtctccctctgtcatgcaggttgtggtgcagtggctcagtctccgctgactgcagcctcaacctcctgggctcaagtgatcctcccacctcagcctctcaagtagctgggaccacaggcgtgtgccaccacgcccggctaattttttgtagaggcgaggtttcatcatgttgcccaggctggtcttgaactcctgagctcaggtgttccgcctgccatggcctcccaaaatactaggattacaggtgtgagccaccacgcccggccgtgatgccagcttcttttgccgtgcagctagcatttgctgaacacctgctgtgtgccagatagtgtgctggaggcagggcagtgaacaagacagacgagatccctgtcctgtggagctgatgctctagctgggggcctgaggggtgggaaggaagcacaggtgctcgggtgagaaaaaacatcatgcggccaggcatggtggctcacacctgtaatcccagatctttgggaggctgaggcaggcggatcatctgaggtcatgagttcgagaccagccttgcaaaaccccgtctctactaaaaatacaaaaattagccaggtgtggctgggtgtggtggctcacacctgtaatcccagcactttgggaggcggaggcaggtggatcacaaggtcaggagatcgagaccatcctggctaatatggtaaaactccgtctctactaaaaatacaaaaaattagccgggtgtggtggcgggtgcttgtagtcccagctactcaggaggctgaggcaggaggatggcatgaacccgggaggcggagcttgcagtgagccgagattgcgccactgcactccagcctgggtgacaaagcgagactctgtctcaaaaaaaaaaaaaaaaaaaaaaaaaaaattagccgtgtgtggtggcgtgcgcctgtagtcccagctacttgggaggctgaggcagcagaattgcttgaactcgggaggcaaggttgcagtgagccaagatcacgccattgcactccagccagggcagcagagcgagactgtttccagaaaaaaaaaaaaaatacaaaaattagccagacgtggtagcatacgcccgtagtcccagctgcttaggaggctgaggcaggaaaatcacttgagcccaggaggcggaggttgcaatgagccaagatcctgccactacacttcggctggggtgacagagccagactccatctaaaaaaaaaaaaaattctttaaaaatcaggcacacagtgtgatctgacttgcagttttccaagcctgtggggcagggagcctgggggaggctttgccctgagatgggagacttggcctcaggacattagagcgaaacagaggaggaggggatgggtctggatatccaaggcaggatctgccgagagatacgctgtgggggtgggacaaagacctcaagaacgggtccgggctgttcctgtcacttgtgacattgtggactgagtctgcctggatatttccttatgggctggctccccatcaccccgggagagtctcggggtggagggaactagaacgtgtttgcctggaggtcactacctactcccctggaaggaaggggctccaggaggctggctgtggaatgcagactgtgggtggtgcccggctgcctgcctctagttcacttgggccctcagggtggtacagagctggaaatccatacatggctgaccaccctgtaagggctgcagacacagtgagcgttcactttgccctggcaactggaactgtctcctccagtcctcaccacaaccgttttacagagcaggacacctgttgcaagatgggagagactttgctaacaaggtcccacagctggcactcaccaggctggctggggtactcaggccaccccttgcagtggggagcagttaggatgacaccgaggacacccctaggagggcggagttgtgagctccaggaccccacatttgagcagtttccccgtcactcttgaaaatgctgctgggccggccagtttctttggggtttctcagtactgctgaaagttacaaggtcaacactggcctgcaatcacagttataaaaaagttataaaagcctgacattcaaatcacgttggagactataaaacagcaagtttttcatttgcacacctcacatgacctcaagcctgctgtccatacacaggaaatggggatgtgcggaaaaaaaacccgaagtggaggacatcatcccccacgcataatccagtccgtgcatcgcacttgaccttcggcactgcagcctgcattgctccccggactagctcccaagattgatttagccagttccctgccagtggacatttaggtcattatcggttttcattccacaaagtactgccctcagggagtcggctgtccttgccaaaccactgcattaatatgtttctgggtgctggggaaagggcgcttaagacccctgccctcaaggtgttgatattctagttgggactgttagataaatgagcaattaggctgggcacgcttgaaatcccagggctttgggaggctgaggtgggaggatcgcctaggcagcatatcactacagaaaaacacaaataaaaaaagttagctgggcgtggtggcaagtgcctgtagtccgagctactcaggaggctgagggaggaggatcgcttcagcccaggagtttgaggctgcagtcagctatgattgcatcactgcactccagcctggatgacagagtgagatcctgtctctgaaaaaagaggtgcaaataaaccagaaaagtaccaactagtgggcagtgctgtgtttagaaggaaaacagggcaacatgaaggggaggtgggcatcagtaggggacagacctctctgaggaggtgacatctgagttgagtccctggtaaccggagatagccaggattgtggaaatacttggaggagatgagatggtctttcgaagcaggaggccagcatgtgcaaaggccctgcgacagcaatgtctggcctccttgctgtttctttttatttcattttttgagacggagtctcactctgacctatgctggagtgcagtggcatgatcttggctcactgcaacctctgcctcccaggttcaagcgattctcgtgcctcagcctcctgagcagctaggagtacaggcacacgccaccacaccccactaatttttctgtatttttagtagagacaaggtttcaccatgttggccaggctgctctcgaactctggacctcaggtgatccacccacctcggccttccaaagtgctggcattacaggtgtgagctaccacgcccggcctttttgctgtttcttgaccaccaatgtggctggaggcagggagtgagggggtggtgggggaggagggcacggaggtgacagggccatggggggcacttgggaactgtcaaaccgtcaaatgttatgagcagaggagggtcatgttcttacattgtatcgagttttcctttttgtttttttgagatggagtttcactcttattgcccaggcaggagtgtaatggtgtgatcttggctgactgtaacctctgcctcccaggttcaagcgattctcccacctcagcctcccgagtagctgagattacaggcatgcaccacacctggctaattttgtatttttagtagagacggggtttctccctgttggtcaggctggtctcgaactcccaacctcaggtgatctacctgcctcggtctcccaaagtgccgggattacaggtgtgagcaaccgtgccggctttttttttgttttttgttttttttttttttgagacagtctcactctgttgcccaggctggagtgcaatggcatgatctcacaatctcagctcactgtgacctctgcctcctgggttcaagcggttttcctgcctcagcctctcgagtagctgggattacaggtgcccaccaccacgcctggctaatttttgtatttttagtagagacggagtttctccatgttggccaagctggtctcaaactcctgacctcgggtgatctgcccgcctcggccccgcaaagtgctgagattacaggcatgagccaccgcactcaaccaattttttttttttttttagtagtagagacagggtctcatcatgttgcccaggctggtttcaaactcctgggctcaagagattgcgtgccaaggtgctgggattataggcacgaaccactgtgctcagcctgagttttactttgattcgatggggcgaatgttctcttttgggtatcatggtaagagtttcacaaacccttccacctcctctctgaggcaggtggcatcattcccacataacagattgggaaactgaggcacaaagaggttacctgacctgcccatcttgtccagaaaggaaatactggattccagccagggcctggagagtcccagagccacgatcacgaattgccacaggtcacctcctgcttttgctcccagcctgttgtgtcccttggatgagaccagggagcaggtgatgccacggcttgagtgccaagggcgggcctcgagccgggagctgcaggattcctgatcagggaggggctgctgggctgggaatgttggggaggagtgaggccaggagtggattgtggaagtgagaagtctcctcatctgtaaaatggcagatttggcccattgttctgcaagcattggtcatctgcctcctgcctgggtgtgtgttgggtactggggagagagcagagaaggggccgatacgggaccctgcgcccatgaggctgccactctaataggatgttgaggtgggggcagggacagactgcagctgggtgaacacatcaggaacccggaagatgccagttgtgagtggcactgagcattgagcgggttgatgtgtgaaagaaggggagcagcttcctatggcggggggagggagggtgcagtttgctgggagctgcccgcctgctctgttaatgctgcaggaagaaggttccaggctgagggaacagcctgggcaaaggccctggggcaggacagtgtctggtgtgtttcgggaacatggaggaggcatatgtggctggagtaaagccagcaagacagagagtagggggaggtgaggacaggaaggtgacaggacaggtcgtgcagggcttggggggctgcagggaaaagtctggcttttattccaagtgaagcgggagcccaaggagggcccataacaaaggggtttacagtgacatggtgtgcacaggcaccttgtggctgctttgtgggaggcagattgtggggaccaagggcacgactgcactggtgtaggcaggtgacagtgggacacgctgacagccttggacgtggagggaattgagcagaatcaggcctgatgtggaggtgaaaccagcaggactcgcggctggacaaggcgggtgggtgagggccaggggagccccaggtctgcagcctcgtgaggggtttctcccctccctgccctttggggtgaccacagggatgcagtggcacctacctgcggacactgtgtgggccgagcactgtaaggcttgggcgtccttgctgggtgaccaatggctattgttggaaggatgaggcagggaccgaggtgggcagaggagactgggcatgggtccccacttctgctccaacagagcgacagagaagcccctgaggtgggtgcgggtgactgcgggtctgcctcattggtgtcccacccacattcgtgtcctggctctgctcctccctcgctgagcgtcctgggcaagtcctgagactgaacctcagtccacctgtctgaaatgggacttttggccctggcatccttgtgactttcaacccctctggggttgtcagaggatttgccgctatgttgcccgagatggggttagagacagcctgttgggtggccagcgttccttgtgtggctcttatcagagtcctgagagaagaggccagggtggaaattggccctggagtgtgggctcctgccgaagcctcttcctgtggccagtgccatgctgaaggctggctgtggtgtcacgtgagccctcccagccacattcaggctcaaagagactgtgctgagcatatggtgacaaggaagggatcccagcccagggtcctggccaggccctgccagcaccaggctgcacaggtgaggggtggcttgccctggggtgctggctctgggccacactgctgactcaccctctgtgggcttatctgttgattctccctcccatgggaaggctctgggtttgagcctgcatcgttcctgcacgtagccgtccccaccctcataggggctggaagtcaaaaggcgcctggtggagccttgtggtctgttcaaaaaacggtaaataaacagcctgggcttctgatctgctggactcaacctggcacctctcccatcgctgctgggtgctgcctcccagctgcacccttccctgcctgtcccctaccgccttcctggagcgcttatccccttccagggagaggtggcccactttagagctctgaaacctgctctggtggggtgaagtgacttgagccaggccaagccggtggctgggccctctgtggcagactggaagtgtcctcccatttcatggatggccaagtcagtgcccagagaggggtagagacctgtccagggccacacagcccaggaggggcggagctcgactttgaacccaggctgcctggctccacagtctggattcttcttacccattcaacaaatacttaatgagcacacactgtctggcaggcactgttctaggtgctgaggatctagcagtgaccaggccaggtgcagaagtcttggcgtgtcacaggactagaccttcatcagaggccgttttgctgggagtgggaaggggtgtgtatttgggagggaggggcgcaagccatcacacctgcccatggccaggtaggcagggcctatgggagggtttcctggcagagggaacaccccctgcaaaggcctgaaggccagcagtgccagagagaactcagaggaggcaggtgcagggggtggggctggggaacccggtcagcactgggactaggactggacaggacgggctaggaccagtcacttggtttctgcaagagagaagcttggaggcaggatcttcattttagaaaggtcactggggaaggtgggaggttgggccaggaccctggggcctggcctgggcccatggataggaggccaggtactgaaatgatgcaatagtactaggctaggtgcagtggctcacacctgtaatcccggtgctttgggaggccgatgcgggaagattgcatgaggccagaagtttgagaccagcctgggcaacatagcgagaccctgtctctgcaaaaaataaaaaaattagccgggcatggtggtgtgtgcctgcagtcccagttacttgggaggctgaggtgggaagttcactagggtccgggagttcaaggctgcagtgaggtatgattgtgccactgcactccagactgggcaatataggaagatgccatctctaaaaaaaaaaaattagccaagcatggtgacatatacctgtagtcatagctactcaggaggccgagactgaggtttgcctgtaccctggagtttgaggctgcagtaagctgtgattgtgctgctgatgcagcctgggcacagagtgagatcctgcctctaaaataaataaggccgggcgcggtggctcatgcctgtaatcccagcactttgggctgctgaggcaggtggatcacctgaggccaggagttcgagaccagcctggccaaaatggcaaaaccccatctctactaaaaatacaaagaaattagccgggtgtgg

SEQ ID NO: 905 - DNA, 32744 bp, Homo sapiens
  source 1..32744: mol_type = other DNA
aaaaacaggaagtgcctacggaggccgggccggcagcggcggccgggcatgaagccgggcggctacgggatcgcgggcggcggcggcatcgcgggcggcggcggcgatgagcgacatagtggagaagacgctgacggcgctgccgggactctttctgcagaaccagcccggtggtgggcccgcggccgccaaggcgtccttctcctcgaggctgggcagccttgtccgcggcatcacagccctcacctccaagcacgtaggtgcccgccggcccgggagctcagggacatcggagtgaggcccccgcgccaggaggccctggccgggcggcgagacttcagggcctctggggttagccctccggcggggctcaggggctgctgtgtcggttcgtcctttcgtctgcctggaagcttcactttcctgctgggactgacagcagggaagccgagtttccacagttagttctgacactgactctttgatcgggggcacatctctgtaacctctgagcctccgtgtgttttctcaacgttgtggtggaaaagtactgatacataattcataggttttttgtttgttttgaggattgggtgagatgtcaagcgtgtgaaaatacctagtgcgatggaagtgtcagacattatttaccttccacaaagttttttttccctactcagtttccttctctcccccggtgccttcaactgaacaacagttcagatgtcgcatacctgaagagatcctgtgagcctcttgttgaatatctttggggagcttgaggttcttgggttacaacaacgtgttgggcaaagaaaaagcacagttctctcaaaatgtaaaatttgctaagtctctgcctcaagtgggctttgaaaatgagcagttataaaaattcttaaacttttaaaatttttaaatttttattgacggagtctctctctgtcgcccaggctggagtgcaatggtgcgatctcgatctcggctcgctggagccttaaggttttaaaaattttaatttttgtttttttttgagacggagtctcgctctgtcgcgcaggctggagtgcagtggcgcgatctgggctcactacaagctccgccttccgggttcacgccattctcctgcctcagcttcccgagtagctgggactacaagtgcccgccactgcctggctaattttttgtacttttcgtagagacggggtttcaccgtgttagcgaggatggtctcgatctcctgacctcgcgatccgcccgccttggcgtcccaaagtgttgggattacgtgcgtgagctaccctgcccggccttaaaatttttaaatttttaatgacggagtctcgctctgtcgcccaggctggagtgcgatggtgcgatcttggctcactggagcgtctgcctcccgggttcaagcgattctcctgcctcagcctcccaagtagctgggattataggcgtatgccactacgcccggctaatttttgtatttttagtagagacaggatttcaccatgttgggcaggctggtcttgaactgacctcaagtgttcgctcacttcggcctcccaaagtgctgggattacaggcatgagccaccgcgccgggcccccacaggcgctcgatggttgcacggattgtgtagtataccgattcacagctacaaggagtttatatcttaaaaagagcacgtgttaatgtcattatttgttcaacagatgtttatggaacaaggttatgtgttagacacaggaaaatagaattaaacacattcccttttcccaaggaattagtcattcgttttgggcttaagacaagtataagcatgactacaatgcaatagaagtgctaaaagagaaggaaagacagaaaagaaagtgctctgaaggtttaaaaaaaatatttttttggcagctctaataagttgatgctatccggagagaacctgcttcacattccagaatcattacttgtgggcttgtcttgttttgttttgtttttgagatggagtctcactctgtcgcccaggctggaatgcagtggtgcaatcttggctcactgcaacttctgcttcctgggttcaagtgattcttctgcctcagcctccctggtagctgggattacaggcacacgtcaccatacccggctaatttttatatttttagtagagacagggtttcgccatgttggccaggctggtcttgaactcctgacctcaggtaatccacctgccttggccttggcctcccaaagtgctgggattacaggcgtgagccaccacgcctggccatttgtggccttaataatgttgtttttcttaaggtttttgtcctttgctaatttttaagggatcctcaataaaattttttaaaaagttatttttggtcttaaatagcagtttgaaactgtagataggcatccacgtgtatcagtacgtcactagtggcttttgaatagccatctgatgaacatgtaattcagtgtgtaatttaaaggtagcatgatattagccaaaaaaaaatggggccaattttttaagtgcttagggagataacatacaatgcagacagtaggagtgaccacattggtatgtgtctgagataggaagttatggaaaggatttggggaatgaggaaaagacagggaagaagaatgtagtttaagggaaaaagacctatttctgtttctgctttcttaccctgtttcttaattccatgaagactttttacttctaaggggaagatgtgagatgagactcttttcttgggccaatacatggagaatttctactctctctccacctttaattttttttttttttttttttttagatggagtcttgctctgttacccaggctggagtgcagtggtacgatctcggctcactgcaacattcacttcccgggttcaagcgattctcctgcccctgcctcagcctctcgagtatctgggattacaggacccccagctaatgtttgtatttttagtagggacggggttttgccatgttggccaggctggtctcaaactgctgacctcaagtgattcactcgccttggcctcccaaagtgctgggattacaggcatgagctgttgtgcccggcttccacctttagttttaaaaaaaaacattttctgctattctaccattaaggggaagtaactgagtaaagaaaagaggaaggatgggttagcctggaaatatttattctctccagggatggttctgaggtttggagaaatgcctttagatagatcgtaagcagatagtatttgtaactctcctttaaaataatgtttcttttaaattaaaagtattgtaaattatatttttccgtttagataaatgctgttacagttttaaaagacagttaatcaagcatttaaatattttcactttctcaggaagaagaaaaattaatccagcaggaactgagtagtctgaaagcgactgtttctgctcctactacaacactggtaggtttgcatagtcagtgccaacacatttgaatttgaaatctagtcactgtggactcaatagtggcatctaactgatgatcggttgctaaaatttgatttatcatagtcaaaatgaattatagttggtagcaactcagatgttaactttagccttttattgttgactggtttgcaccagaacaagatttgcctatgtgaagtcagggctaatgtgatgatgattacataaatgtggagatactcttgggaccctagtgctgatctgatgtttttaatgttatgcatttggaaaaggttgggatttcaacatgatattttcagacctgaattaatatattgtaggtatatctaattttattatttaagacctagttgtttttaaagtttgttctacataatctgatttttcaaacaatattcagcaactatttaatgaatggtcattcattattatgcaggccactgtggggctgtcccagcatagctagattaaaactcagtttgattttttttttttttttttgagacggagtctcgctctgttgcccaagctggagtgcagtggcgtggcgtgatctcagctcactgcaacctctgcctcctggattcaaccgattctcctgcctcagcctcctgagtaactgggactacaggtgcccgccaccatgcctggctaatttttgtatttttagtagagttggggttttcatcatgttgaccaggctagtatcgcactcctgacctcaagcgatccacccacctcagcctcctaaatcaaagtactaggattacaggtgtgagccaccgtgcctggcctgatttttttttaaatgagattttgtttcaagcaacatatcttcagcaaatatttggtgagtgtcttcagtatataagccactgtgggaatgttttccctccctgccagtaaaaatatcaggacgatcattttgcataagcacatgattgtgaatttgaataacacttgtaaagtctgagagaatgaatatattttcttctgtggtcataataatagtatgtggcaaataaaactgaaaacataatctgatatatccatgtgtatatatgtatatgtatgtttgtgtgtatacatgtatgtgtgtctgtggctatggataaaataattatgcttcatagtactagatagaaacgttaaacagaaatggtttttgtttgttagatttccattttttatgattggcatcagtatataattttccttgttccaaggcagaaacctgaagttgggcagaactaagataaataggtagaaattaggaaggcagagtttgaaaggaaggttttataacactatggccatccaactctgtgtatatcttacagagtagtctgtcccagagctgttcatgtaaaggttggctgtcagagaaattgtaaagagaattcttgcattggggaatgcactttcatctctaaaaataaatgcatgagatgtaatctcacttagataaagttcataatgacttttgaaaaactctgagataaaatgttacaaatctagggttgaaacttaatggcttaaatgaaccctttaactcctaattaatgtagaagtctgaagagggacttccagtattttttgtttatcttttgtttgttttctcagtattttgtagcttttttgggggcggcagggtgggaggatggagtcttgctctgttgcctaggctggagtgcaactgcgtgatcttggctcactgcaacctctgcctctcgggttcaagcgattctcctgcctcagcctcccaagtagctgggattaattacaggcgcaggtccccacgcctggctaatttttgtatttttttaatagagatggggtttcaccatgttggtcaggctggtctcgaactcctgacctcaggtgatctgccctccttggcctcccaaagtgctgggattacaggagtgagtcactgtgcccagctagtgttttgtagtcttaattaatgtgttaatgaattaacttttactgctttaagcacaagtgacctgagttaaatctcattcccttaagattttcctatggtttctctttaaattctttatatttacattaaacattattatccttgctttcaaatattcaattttactgtttcctgagcattttgttatttaataatcctgtaatatgctaaccctagttaattttgacatattaaaatagtctatgtggacgggtgtggtggctcacacctgtaatcccggcaatttgtggggctgaggtgggtggatcatttgaggtcaagagtttgagaccagcctggccaacatggtgaaaccccatctctactaaatatacaaaaattagatgggcgtggtggcgtgcacctgtggtcctggctactagagaggctgaagcatgagaatcgcttgaacgtggtaggtggaggctgcgatgagccaagatcttgccactgtactccagcctgggtgacagagcgagactctgtctcaaaaaaaaaaaaaaaaaaaaagtctgtgagcttttagttattttgaaacacattttatttatatattttacttctgattaagattttccataaatattgagaatgcaaatatcttagtgataaaacaaattttttagcatcccttaaaaatttttggcttgcattgaagatattaaaagaccccattagaaaactaaatattattacaatagctatgccattaatgaaatcatgcccctcagtttataattgtgagttattaaaaaagagtgcctataaagcaaactattccatattgtacttagcacaataattctgaagaaaatctaggtgcaatttggttttccaatgtgaaaaatatttttgttacaggaattattaccaacttgtgggaattttatggatgttttcatttgacaaagtctactaaaattatgtgctgtattttagaagccaagtaaaatgaccatgatgaaatcttgtgtgaagaccccatgtatcacattataaccaaatttttcactagggacacatagaaacagctacagttgatttattttatagtagtgctactaacaaaatagtgaaataattttactaaaagtaatactgttggtaagtaagatcaggagcaatttttatttataaagtctgatattgggtgattaatttgtaatatatatgttatttcttcagcaccaggattaaaggattctccttttaaattatgagaacatagttaaaacaatctaaatattctgtttatttatacagctactggatattttgcttttcagaaaatgatgaaggaatgtatggtgagacttatatattgtgaaatgcttggatatgatgcttcctttggctatattcatgcaatcaagttagcccaacaaggaaacctcttagaaaaaagagtaggtatgtatgtgttttaagactttgatgctttcatgttgtccttgaagttgcatctattatacaaaatgaatgatggcatgtatatagtatgtttttagaatactgtattataatttctaaaactttaaaagatcacacttcagaaagtcaaagccatttataggaaatcagttttcctgatgcatagcattttggagttaaagagaagactaaagatttcttgctcttgtgatggcggttagatgactatatatgtcagaactcattgaaccatacacttaaatattttttgtatataaattatatgtctataaagctgacttttttgtatataaattatatgtctataaagagctcttttttttgttgttgttgagacagagtctctctgtgttgcccaggctagagtgcagtggcgggatctctgctcactgcaacctctgcctccaggttcaagtgatcctcctatctcagccccctgagtagctgggactaagctgtgtgccaccatgcctggctaatttttgtgttttgtttttgtagagatggggtttcactatgttgcataggctggtcttgaactcctgggctcaagtgatccacacgccttggcctcccaaagcgctgggattacaggtgtgaaccactgcgcctggtcaatagagctgatattaagaagtctgtttaaccttattagtttaatggtcagaaatgcttctttatagaataaaactgaaatttattaaagtaattttaaatatcttgttcttagcttctcaaatgttagctatgaggattagcagtgtcttaaaaaaattttctctctatagtcaacctttagggctgttaggaaaaattcttttaagcaattaaatattctattcataaatgttcaactttatatcagaatctcaagaaggaagtattttagaatagtaaaggttagaacacgttctttattcagagaagttgataatgtcatgtcgttaaggactagcattattcataagttatattgctctgtgctatcagatgacggggtgaaggtgacagatgtcttggtaaacattctgagactgagtgcacacaatattccacttgtggaaccctactccgcccaaaacacacttagatcttttaaacttgttatattctttcctccaagtagaatgtcctttaacattctctttctctctttccatattccaaatcaaattttatttctcctgtgatcactcaggtggctcctaccatctgttaccttttgttatcttttcatatattaatgtcttagctcctgaactaattttaagatccctaaaggcaggaatttttttttcgaggcttcaaattagtttttattagtaatttgcttttcttaaaactttgatttttcttaaatattatacaaatatggaatgtaagctcttccagtcatattcacgattttcagttgtcatcccaaaccttgaaaattcacctgtcagaattttcatatgttaaagtctttctaatggtgttgctctttttagcttctgaaagactgtatttgtagtttttttctcttctttggtttggttttgatcaaagaaggaaaacatcaaaaaggaaatttcaaccattgttgagcattttgagaaaagtgaaaaccaacttcatccttttcgtttctaaggaaaaatgtgttagatgtgaatacatttggaaatgtttacaattcaatcataacaagagtcagtgatggcagattttaggcaaaagtctggtatttctttgcctccctcccatcttatcttttcatcgcatttcttttactgttctgcttctcaatttctttgctttctaatctttcccttcaactttgggccattttctcttattccctttacatattagcttacagcaattgagataacattgatacccttcttagaggtatctattttgttaaagactctggaagacagatccaaataaattagccttcaatagtgaaattttgtcttgagtaggaaaaatatttatgaacagaaagtcttcttagggattgtctgtttataaaatttattcagtattcatggaattgataagatgagtgcccactgtatgccagatactgcagttaaacttacagatgaataacttacattgcttattcatacttacagatgaataacttacattttgaggatccctgcaatgacgggaaaggaccgaaacaaacagaaattaatagttacagtacaggccgggtacagtggctcatgcgtgtaatcccagcactttgggaggctgaggcaggcagattgcttgagctcagaagttggagaccagccagggcaacatagtgaaatcccatctctacaaaaaatacaaaaattagccaggcatggtggtgtgcacctgtagtcccagctacttgggaggttgaggtgggaggatggcttgtgcccaggaggcagaggttgcagtgagctgagattgtgccactgcactccagcctgggcagcagagccagagcatgtctcaaaagaaaaaaaaaaagttatagtataatgttgtaattgccttcatgaaggcatgaaccatgtgttgtgctgatataatcaggcatacaaatgaccatgggaacctttgtttccctggtctcagactttgaagaggagaatatgctgattagattttgtctgagagttctgaaatgaaactacctgggaacctgtttaaatattgcatgggtagaatttagtactttgctttggtcctgccatttttgttttggcttcctttggcatgaaatgggccttagtcctgctctttcttgttacttggctggcttccatgttagcataggcaggaaattttgaaaacagtagatagttattaaatattagatagttgatggtagaattattttgtccaactgttgctacattttgcttcttagacttacatataatttaaataattttcaattttattttatttttaaaatatgtaaagcattatggctcactttcatctctagccccactacccagtcttccctttaccctcatagggaactattttcattagtttctgattaatctttccattgttttattttgaaaaagcaagcaaaagtttgtgcacacattcactctcttttatataaaaggcagcatgttatctatactatctcttacttgaaagatagcatactatatagattattctataccttgttttgacatctttatacttttatacagttgcataatttttattgggtggatgtaccatagttttttcaaccacatcccttttggtggacatatggcttatttttgatttttttttttgttgttgttctcataaattatgttgtaatttggctgggcatggtggctcatgcctgtaatcccagcactttgagaggccgaggtgggcggatcacctgaggtcaagagttcgagaccagcctggcaaacatggtgaaaccctgtctctactaaaaatacaaaaaattagccaggcatggtggtgggtgcctgtagtcccagctactagggaggctgaggcatgagaatcgcttgaacctgggaggtggaggttgcagtgagccaagatcacgccactgcactccagcctgggtaacagagtgagaccctgtctcaaaaaaataaataaataatgtggccaggcacggtggctcacacctgtaatcccagcactttgggaggctgaggtgggcagatcacttgaggtcaggagtatgagaccagcctgaccaacatggagaaaccctgtctctactaaaaatacagaattagctgggcatggtggtgcaggcctgtaatcccagctgcttggaaggctgaggcaggagaatcacttgaacctgggaggcggaggttgcggtgagctgagatcgcaccattgcactccagcctgggctacaagagtgaaattccatctcaaaaaataaataaataaataaataaataaataaataaataaataagtaaataaattatgctgtaattaataaccttttatatgtatcattttatagttatggatgcttatattaaaggggatctcagagttatttttattgagactcatgatctttaggaaaatattttcttgccaattagagggacgtgtatctgcaggcatcagatgtttttaatgtatattattgagtggtaatcattttttaaagatataatttatggggctgggcacggtggctaatgtctgtaatgccaacactgtgagaggcttaggtgggcagatcacttgaagtcaggagttcgagaccagcctggccagcatggtgaaaccccatctctactaagaatacaaagattagccttgtgtggtggtacatgcctgtattcccagctacttgggaggctggggtcagaggattgcttgaacctgggaggcggagattgtggtaagctgagattgtgccactgcactccagcctaggcaacacagcgataatatgtctaaaaaaaaaaaaaaaaaaaagataaaatttatgcctttttttttttttttttttttgagacggagtctcgctctttcgcccaggccagagtgcagtggcgctatctcggctcactgcaagctctgcctcccaggttcacgccattctcctgcctcagcctcccaagtagctgggactacagacgcctgccaccgtgcctagctaattttttgtatttttagtagagacggggtttcactgtgttagccaggatggtctcgatctcctgacctcgtgatccgcccgcctcagcctcccaaagtgctgggattacaggcgtaagccaccgtgcccggccttctttttttttttttgagacagagtctctgtcacctaggctggagtatggtggcgccacctcggttcactgcagcctccgcctcctgggttcaagtgattctcctgcctaagcctctcgagtagctgagactacaggtgcgtgccaccgtgcctggctaattttttggtagggacggggtttcaccgtgttagccaggatggtctggaaatcctgacctcatgatccacccgccttggcctcccaaagtgctgggattgcaggcatgagccactgcgcccggccattttatgccttctacatgtcttcactctggtactgttgtctcatccactcctgaattttaaagcctgctttggtgctttctctgatgcagaatgtctttttatttgtatcttcttctgagatggagtttcgctgttgcatcccaagctagagtgcaatggcacgatctcggcttactgcaatctctacctcccaggttcaagcgattttcctgcctcagcctcccgagtaactgggattacaggtgcccgcctgccatcacacccggctaatttttttatttttggtagaaacagggttttgccatgttggccaggctggtctcgaactcctgatctcagttgatccacccaccttggcctcccaaagtgctgggattacgggcatgaactaccgtgcccagccagaatgccttattattttttttatgagtatcattgaataaatactttttttaagttattattttctttttagagatagggtcttgctacgttagccaggctggtctcaaacttctggcctcaagcagtcctcccaccttggccccccaacgtgctggaattataggcatgaataaataaacttcagtgctcataaagttaggtgttaagtgctttatcttctgagatagtatttatcttcattttaccttttctttttttttttgagacagagtcttgttctgtcacccaggctggagtgcagtggcgtgatcttggttcactgaaacctttgcctcctgggttcaaacgattcttatgcctcagcctcccaagtagctgggattacaggagagtgtcaccacgtctgtctaatttttgtgttcttaatagaggtgaggtttctcaccgtgttggccaggctggtttcaaactcctgacttcgagtgatccgcctgcctcagcctcccaaagtgcctggccatttatcttcattttaaagatgagaagactgagactcagaaaagtcaagtaacttatagagcataggaacataagtcatagagcagataaatggagccagagcccaaatttctgtactcaaagcttgtatacctcattcttagttataccaaatatattttgtaatcgtagttattattctttgtttctctgaaaatttttacattttttgagtcacagtgtttttccccctttttttctgattgttgaaacagttgggatattattcataacagaaagaactaaggtttcattgagatggtctttggattagtttgttgaccttgatattggtgacttgggaatgggtgataccttagctgagcaggtgatttatcagcaatctgataagacaatctctgctttaaatgctttctgggggcctgggtgtggtggctcactcctgtaatcccagcactttgggaagctaaggtgggagggatcgcttgagtctgggcgtttgagaccagcctgggtaacatagtgagaccctatctctacaaaaaaaaaaaaaaaaaaaaattagctcggtgtgatggtgcatgccttggtcccagctacttgggaggctgaggtgaaggattgcttgagcttggaaggtagaggctgcagtgagttttgatcgtgccactgccttccaacctgagtgatggagtgagactctgtctcaggaaacgaaacaaaacaaatgctttctgggattttcctcatctctttcttggcccgggtcagatttgtttcaactcttaagattgtgagagtaatagctctgctcctccgacctctagtgaaggtgttggaattggtcatgctactacctcttgattgtaagaattggaagtttccgttttctcctgttccatggtagacacagacagcatggatgctgggtaatgatggttatagttaacattagaatccctgatgaaaaggctgaaagaattgagaagaacgaaaaacaatgagcatggagtcagggaatcaggtcaagatagactatgtggagaggcagtaaaatatgggggtttaaaatatggactgacttcaactgtctgggtttgagtcctggctccaccatgtgatagattggaccttgagaaattgcctttttttgggtctctttttttttttttgagaccgagtcttgctctgtcgtctggtctggagtgcagtggcgtgatcttggctcactgcaagctctgcctcctgggttcatgccattctcctgcctcagcctcccgagtagctgggactacaggtgcccgccaccacgcctggctaattttttgtatttttagtagagacggggtttcaccgtgttagccaggatggtctcgatctcctaacctcgtgattcacccacctcggcctcccaaagtgctgggataacaggcgtgagccaccacgcccagtcttgggtctcattatatagggataaaaaggcctatctcattgtgtggttatgaggattaaatgaagtaatgcttataaagtacttgacccatagtgactgtctaattaaagtgttagttattatcaatgtgaagcctgactgagaaaattccttggagtatctagattatatgtacatggcatttgttatagtgttaatatatttcctcaatgttaaaatgtactttaaaaatgttttaatattattgcaataaaaatgcttatttaagccaatgagtatatttaatgtggcagacagtgtttctttcctaaataattgttattccctcaattgagaaaataaggtattgtgtgtggcttaatatatttaatatatgatttacatcatgtgcgttgacattaggtggctagctcactcagtacaaagagctagtaactcactattaactgtagtgattagggttttttttattatagtgattagtttttgaattatatatttggctataaaatagcaattataaaatagagaatgctttgattgataatgtaaagatttgcacaaaaaatagaaggcatgtcttcttagtgccatttacaagattttaagttgatacacatagtgtctattccgtttctggaatatcctatgaaatacataattctggaagatttcagggtgaagaatagctgaaatcttccttactgaaggtttttaaccttatattttgcaatttgtgtttctgtttacttgtaactggtatctttgatacttacaggactgctttgtttaacttcgtgtgaaaagtctgtttttggtagttagtaatcagacttttccctcaacttttataggttatttggctgtttccttatttctacatgaaagtcatgaattattgcttctccttgtgaatacagttgtaaaggtattgtattgtatgttggttaatatgaagtcataattcttgtcagcacctgatatttctcctcgatcatattcaactagatgagattagaagaaagtgggcttgcagaatgggcttagaagaatcttttagatcagtttctgcatctataaaatggagttaaataatagaacttacagagttgtgaagattaaatgaaatactatgtgaagtagtagctgctgctcttcttgttataatttcattttaaaacacagagttagaactaaagttcaagtctctaagttgttagtttaggtatactttccatgctgttatctttttttctaggatctgttctaaagggatatagatataaactgggtaaatgaagtctttaaaatttaaaaagtcatttaaaaaaagaatagaatataatcaagtaactgaaatgtagagataataaaaacaatcctcactcacaatattttctgttaaactcccaaatcaaaatgataatgagatgtaattgagttgttgagctttttatcttgtgtcagttttttgatagagagagagaacagtattttctgacctttaagtcatatactatattaaggttactagtagcttaaatttcttccaaacttaaaaaatatatttttaggttctattagaatagttttatagaccatatggatagataagtacatatgaatgtgtgcattttattgtgaatattccagaatcacttccttttaaacttacattcatattattgttgattaataagaaaaactcataaaattgttttattattggtttagaaaagttttaaaggctgtaataaaggagactactttggctagattcagaacagcgataaaatttcctcttctatcagttgctttttggctttatttgtctactgactctattaaggcaaatgaaacaaataggagcattgcaataaaatatgccataagtttggatgtacaaattaattataaatagcacaaaattactaagtatataggaccattacagtgttgaatttgccattcctagtttcagtatttacactaaatgttttctttgcttaatgttgtgccaggatctgcagagcactaacctagtagaagtgtgtatggcactgactgttgttagccagattttcccctgcgaaatgattccagctgttcttccattaatagaagataaacttcaacattctaagtaagtaaattcttttgggataggcatctatgccatatatttcaaaacagaagtttatgctagaaaatttattacaacttcagtgctaccaggatagagattatttgactgctaggaataatacaaaaatcttcaataggatcatctttatttttatgtgggtttagggaaatgttagacagctttctaaagttagactaagagacagtgaggcctagtatccaggaatccttggcttgcctcccatttctaccactaatgagcagtggtcttgtttttccttggctatatggggttggttgaagctccttagttctaccaaagttgttttggggataaagtgaaataatgaaaaacatatggaaattgtgcaagtgttgtgaatgcaaagcttcagtgtagtgggaagatgctttttttttttttttgagacagagtctcactccgttgtccaggctggagtgcaatggcatgaacttggctcactgcaacctctgcctcccgggttcaagcaattctcctgcctcagcctcccatgtagctaggattacaggtgcctgccaccatgcccgactaatttttttttttttttttaatagaaactgggtttggccaggctggtctcgaactcctgacctcaggtgatccacctgcctcggcctcccaaagtgctgggattacaggtgtgaaccaccatgcccggcccgggaagatgctttttatatcaaaaccacagcattttaatcctattttacagcagaatgtttccaagcttaatttactttgtagtattttgctaatcttctcttgtaaatttccttaactgtctccttatcagactgacttacttttcactgtatttgaattattaatattttgtttttgaccaagcccctttatgtcataattttaattaattaattaattaatttttttgagacagagtctcactctgttgcctaggctggagtgcggtggagtgatctcggctcactgcacgctccacctcccaggtttaagcagttctctgcctcagcctcctgagtagctggaattacaggaacacgccaccatgcccagctaattttttgtatttttagtggaggcagggtttcaccatcttggcccggctgatcttgaactcctgaccttgtgattcacctgcctcggcctcccaaagtgctgagattacacatgtgagccactgcgcctggcccataatttttaaagttggaaaaggtttgcaatcattgtgattatggtatgtcagttatatattcttgatgaagatttttttgttactcatacaacatttattttacatactttaaatcagtatttttaatgttctgagattgcaaaatgttgttttatagcttgtattcttttttttttttgagatggagtcttgctcggtcgcccaggctggagtgcagtggtgtgatcttggctcactgcaacctctgcctcccgggttcaagctattcttctgcctcagcctcctgagtagttggaactacaggcgcccgccactatgcctggctaatgttttagtagagacagtgtttcaccatataggccaagctggtctcgaactcctgacctcgtgatccacctgtcttggcctcccaaagtgctgggcttacaggcgtgagccaccatgcccggccaacttgtatactttaagaaatattgaatcatgaatcttccagctaaaatgatagcttttactaagaattacagaataacttcataggtctttcagactttttatgtattgtatatcatatctgtgtttagaacgaaggatgattatggacaattaattattggaaatatttgcttttttgagatttataaggtgatctgattataaaagcagcatatttttgcttaacttttccttaccactacttttgtggtgaccttacttactgaccatttgtatgaaatccttctgagaattgaaaggtcccgtttcaatttttttctttattgctttgtgtttagtctaatttcaagtcctggctagagtttagactttttgaaactcagcttttgcagttatggccatactcagccccatgctctggagtaaagagctgacgaatatgaggcagagctataggtaagccagtagatgtcacaaagaatatttgaaataaggcttgaattcaacttttgaatccctggttgtatttcagcataccaaccccagagcctgaatctaggtctctcgtcttatgttagtaccaccacttgaggccaggcctgtgaactcctgggcctattcagagttttttttttttttttcctcacttcatttacctattctcccccagaattaatatcagttaacacgcaatggcaatacactgtgacgtggcttgcattcaccacagtattaatactaacagtaaatctgttattaatctgcctttcttttcttttctttttttttttgtgaagagttttccgttatggcatagcttgcctaggaagataagagttgtttattaatggaatttgtatgaccacttattaagaatcttataaaaggagttcttgagtggaacacaaaggattgcactgaatagtctcagtcttgagattctacgacagaaatatctgttaaggaaccctaaaagtaaatacttcacttttgtgatgtttgctgctgttctgagcactgccagcatagtctgcaaataacagatatgtagaaatagacaagagagagaatttctaacaaggaagaagcttccttggaaactacatcatgaacataggatggcatttctttatttttgcttctgtgtgctagatgttatctgctacagatgaagtgcaaaactagtatatacttttctctttattatcatgaggttttgaaacagatgaactgggcaaagagaggaataacatctttttattccatgtgtgtccttgtattcctcccctctgtcccccagaatatttggagtctgctatccagtgatatatatatataaaaaagaaacatagaaagctactattttagggtgagaatgttaacgagttttttttcttttctttcctttttaatttgagactgagtcttactctgtcaccaggttggagtgcagtggcacaaccttggctcactgcaacttctgcctcccaggttcaagcgattcttgtgcctcagccacccaagtaactggaactacaggtgtgcaccaccacacctggctaatttttgtatttttagtagagacagggtttcgccatgttggccaggctggttttgaactcctggcctcaagtgatccacccacctcagcctcccaaagtgctgggattacaggccaaagatttttaatattaataaaaagattttaatattactagctgaaattacctattacttaaacttactgttgactttttttttcaatttttagagatacgtcttttaaaaatggaattagagaattaagaaatttgtttttcatgtttttttttttttaatctcaaaagtaatatatgcttgttacaaaaaaaaattccctaactagataaatatataacacgggcagttaaagttttgagaccttacttcctagaggtaaccactttttataatttggtatattagaataaataaattaatcacaaatgtatagttatctctttctttgtaaattaaggtaatgagccagtattttgaaatcatctggcctataatctttcaaagtaaatacttgagaattcagattgtcttgtttaaatttcattttttgtcttcagggagattgtacgaagaaaagctgttctggcattatacaaattccatctcattgctcctaatcaagtacaacatattcatattaagtttcggaaagcactttgtgacagagatgttggggtcatggctgcctccttgcatatatatcttagaatgattaaggtaagttggaaattttagcaagtactgagtagttaccattagaaaaatacaattatggaattaaaaagaaacagatattttggtaaaatgcttagttaacattttataattttattattgacctttgaattagtagttttgcaagttgttgagagcatgagttgtaggcacattacagaattagtttttttttttttaatgcctaaaattttttgatgttactaaacaggtgtggaaaaatggtatcagtggaaggtgtcttaagtttgcagatttgtgttttttcaagcagtaattctcttttatataacttcatgggatgcataacattttatagaaatgaggaaaaccagcgggggttgtgcaagctatagattgtagtattgactccatgtattaattctgtatcatatgaggaaagagggttgaatgttatggtaaaacacttttctaaatggcgatggtggatttatactaattcatccttagtgtattgcctgaaaccatttgtgttcaaatatacatatttgtaacagatttcatggcacctactataacaaaataaaatatgctattgaactcatttaaagttatattgttttttatgtatcgtgttctaaaatagtacagtttaaataaatgttcaatattaaattttattttttccttaacatttactaaaatttgaaagagctttatttcccttccaaaaaattttcccttgatacataataaaaattagaataaagaatctaatgttccttttaaggagtgtggatataatttccccagtccaagagattactcagatacataatcaaggcacactccttcagaaacaaatatttttagatactgtgtggctaattaatttttaattggcaggcacactgattttggggacttttttttttttgagattgagtttcgcttttgttgcccaggctggagtgcaatggcatgatctcagctcaccacaacctccccgtcccaggttcaagcgattctcctgcctcagcctctcgagtagctgggattacaggcatgtgccaccacacccggcttatttggtatttttagtagaaccagggtttcaccatgttggtcaggctggtctcgaactcccaacctcaggtgatccgcccgcctcatcctcccaaagtgttgggattactggcgtgagccactgtgcccggccccagaatgaatttaactcatttacatgggaagtcttttggaaacagagttcagagattgcaaataggccttgattttcatccaaagccgaggtattactgtccttttgcagtatgccagttcttttcactttttgttttaattactggtattggctattaaggattctacctaagatataagaattttgaaatgtgattaaactgtatacggggaaaagtagggagtgatggaagcttttctgggatgattcagctttgggttggttagccagaggaattttatcatggaagatattatacatattagagcactgtttcattaaatgtgaacataaacttaagtatgtattaagtcaggttctatatgacatttcaattaggtctatttctatttaataagacgttattaacaaagttttttttgcggggggatgtaggagaattcatctggatataaagacttgactgggagttttgtaaccattttgaagcaagtagttggaggaaagctcccagtagaattcaattaccacagtgtgccagcaccatggttacaaattcagctcttgagaatactgggacttctaggaaaagatgatcaaaggtaaactattttcagtaagtttgcttaatgacccccataccagatgataagcttagactttagtaacctagaggtttaatgataaaccagattcttccaatgtttaattggcttaatagtgataaaagaagccattgtaagaatcacataaatgctttcaggttgctgggataatcctggctctctccttatcttaattttacccatcatgaaaggtacccatgaaacaccatctcctctgtgatgctttcgtaattgttctagttcaggggttgggaaactttctgcaaagggccagataataaatattttaggtggccgggcatggtggctcacgcctgtaatcccagcacttgggaggctgaggtggcggatcacaaggtcaggagtttgagaccagcctgaccaacattgtgaaaccccgtctctactaaaaatacaaaaattagttgggcacagtggcgcgcgcctgtaatcctagctactcgggaggctgaggtaggagaatcacttgaacccaggaggtgtaggttgcagtgagccgagattgtgccactgcactccagcctgggtgacaaagcgagactctgtctcaaaaaataataataataaataaataaataaatattttaggctttgtgggccatatgttgttttttgcatctattcgactctgctattacagcatgaaagcagccacagatagaacataaataaacattatggacattaaaacttgaatctcaaatcggcacatcatgaagtattattcttttaattttttttccaactatttcaaactgtaaaatctcttcttagcttgaagccatacaaaaccaggcatttggccagattaggcctgcgggctatagtttgccaacccttgctctggttgggtgtgagtgcttcacctttttaattcatttatctgaattattcttttagccaataacttaaacttctcatgtgtatctttccaactatatatatatatactttcaattttgccattttttttttgtttttgagactaagtcttgctgtgttgcccaggctggagtgtagtggcgcgatctcagctcactgcaacctccacctcccggattcaagagattttcccacctcagtttcccaagtagctgggattacaggcgcacaccaccatgcccggctaatttttgtatttttagtagaaatggatttcaccatgttggccaggctggtctcgagctcctgacctcagatgatctccctgcctcagcctcctaaagtgctgggatgacaggcgtgagccaccgccccggcctcaattttgccctactttttcaaacttagacactttcaaagttctaaggacagtacaaggagttcccttacatcctgcacctagattcatcaatttattttcatttgttctatcattctcattctctgtgtgtgcatgtgtgtatgcatttgcatgtgcacctacatattatttttattttaaaaactatttccgagttgcttgagagcaagccccttgagattttagttcccttgagagcaaggaccttggctagagttcctgatatgtttctgtcttaagaaaatgtttgctaatcagtgttctgattttatgaatattgttcccttttatatagtagggtacctttgtattctaatgttttagcctagctttacaaagggaccattctccaggcttttgcttctagaaatcaacttaaggtcagaatccatttgcctgtgagctcctgactagcactaattgggctacatcactgttggtattatagtgttacttttttctgtgtttatgaatctcaactactgattgaaacctgcagtgaaaacgtaaggtgatggagcatgtacacacattagaaatgattgtcttaattatattttattttatatcatgccagcctatcctaacgtggagctctagttggagttactggaatttatgttttaaaatcatgaattttatattaatgcatcagatcttattggtctaaaaaagacttactgccatccattgttatcaggaagtaacttgggaggcatttagtgaatttattaaattcattaactcactatcttcctttttcttgccttcatggataaatttggataatacatatatacaaagatgagtaagctagtccttaccttcacagcactcaggtgaccagtaattaggctcagttattaatagagtggaactttcttataatgttatggaacattagaatgttttctccttttttgtctcaactctaatgagattttattttaacataaatcttacattttgttggacattattgctcaatgtagcaaagtaaaaagttataaccggattctaaagtatttaattgaaaaaaccaatttactggaaaagtctgttgtatttatggtcttttatatctatttgaatattttcttgtgttttgtagttttgtgcttcttagatttattaagatttatcttgatcttgttcacaaatgtttcttcatttcatgtggttaagactcatgccagacactggctttttaaattgaggaactagactataatctaggtataatattaccaattttttttggggggcagggaaggattggtaatgtctgctgtatggttatcttctgagaaagaaatgcttacacaataaaacgaaggattttagaatgtggttctggattcttaattattggatatttatacttcagtcaagacagaatgaaagtacatgcacttaacattgaactttctagctgtatatttggaaaaaaagacattttctgaaagatgtaattaatttatatagtcccaaattattttgatattttcatttattttatggcacagtttctctgcaagaccactgtatgtatcctgtgttgctggtattttttttttcttctattagtgctttttgaatttgtaaaacatacaaaataccagctaagaagctatagtttttcacattggcctcttggagaggatatttgtctaacaagcgtggaggcagagtgctagggcactaatgcactttttttttcccacagtatcttcctcatcacagttattcttactgtaatcagtgaccataatgacatatgaatggtccaaacctattaattccacaaaatatctttttttatatttaatgtaaatgtaagtaaaaattttctttctgaagaacctagttactactcaaggaaagactagtatttgaaaactttttcatggtatctgggtaaaatacagttaatatgctatctgaaataatatgaatatatgaagtattactatggtaacttagaaatattctattgaaagaaaattataaaatatagtatgttcaaccaaataaaaacttggtttataaactaggcacagtgaggaaagagttgattgacatatatatctcattggttaactagtcaactttgataaagtaggaagttcaagctcatgaaaaacagcaaaccttttaagaagtgaaatttccataacttcatcataaaatgaatttctttcacttctcttctgtagatcctcagttttaaagagaagtttgaaaaactgttttattgggttagaatactataattctactgcaaataaaatatcttttaaacaggacaagtgaattaatgtatgatgttcttgatgaatccttacgaagagctgagttaaatcacaatgtcacatatggtaggtaatatatgtaaatattactctaatgactaataatgttttttagtattgcagttaaatctgtgttagaatgctataaattccaatagaattttatacactgattttaagatagttctttggattattattttttcaatgtaagcatttaattactgatagataagagtaatttgaactcatggcatgttctaaatgttgacctaagtttattattataattgtctctattgaaaacacatatcaattatctatttttttcaagtatctaattgactgtgaagataactccatagatttgttccatgcttggtaaacatttacggtattcaaagacagttcttaaataaatcaatcgactagttgtcagatattttattaaatttctgttatttgtcagtccctatgcaaggtacttagaatacagcagtgaataaaacattatggggcttataaactagattgatggacagggataggtgttgttaatgttacaaaagagaattgcagggcatggtgggagaatatagcagctagtcttaggtgaggggaagaataaagaaggttttcctgagaaagaaatatttaagaagacatctgaaggatgaataggatataggcaggaatatatagacgtggaataatagtatactattttgtgaagagacaataaattgttacatgcaatttaaaaattagtaataggagacaagagtaagttgagggaagggggtagaaaactgagaaagtagccaaaaaaacttccaattttaacagccaacgggaggagctgttctttttgattagcctgagaaagctcagtgaggaaattgagatatttggagctatttaaaaggtagaacagtttgaattttgcatgctctggaggacaacagtagaagaggcactgagagatgtaactcaaatgagaagtcatttcttaatctggtaaaatatcatgaagtaggaaatgaagagcattactttttctttgagacaaggataacctgcggacctttaagaacaatggttgtagaaatgtaggttagaccagaggacagaaattgaactagtttaactgaaataaaaagtgcctgacaaagatgcagtccaaataaggaaaaaggattgtgtgtatgagactaatacaagaaaaataatgcacatggtagtgaattggggtggtaaactttgaaggatagatttttgttttgcatgtatgaatggtaattaaggtaataaggatgctttattaatttgttcagccagcatttatagagtgcctgtgaaacaaaaacttgattgtgttttaaactaggtgcggattgaggaaagagttgattgacttatgtatctctccatgctaagtgtggaaagtaaagggaagaataaggtagacacaggccttgtccttatgagtatatagtgtaataaacagttgatattatataggttcctgctatgcaggaataaggggtcacagatgtggatgacccttattgaagcaggtgattttctgagaagatctagaaaagtgtcagaatttttccagtaagttaaagtaatttaaagttttttgtttgcgatgtaaccagtgtccaggataagggtttgaaagtctttcgggaaattctgcttaaaattcagttaaaaatctgctttttttttttcccttgcagaaagttttttttattttattttaataattgacatttcagctttaatttttttatttttttgaataggtaatatatgcacatgggtcaaaattcaaaaggtacaaaagggtatacaatgaacagtaagtgtcctttccacccttatcacccaccacccagttccctttcctggggataaccactgttacccgttccttttgatttggagaatactgtatacctgaggaaatattttttaatattttccagaatgacccttttattaagattgcttggccaggcatggtggctcacgcctgtgatcccagcactttgggaggccgaggtgggcggatcacaaggtcgggagttcaagaccaacctggccaatatggtgaaaccctgtctctactaaaaatacaaatattagctgggcatggtggcgtgttcctgtaatcccagctactcgggaggctgatgcaggagaattgcttgaaccgggacctgggaggcagaggttacagtgagccaagatcatgccactgcactctagcctttgctacatagcaagactctgtctcaaaaaaaaaaaatgattgcttgaaccaacaccaacagtttctttctttgcaggctcttggtccagtgtttcaccttgctacagaaaccttatagttcctgttgtttcatttcctttgtttagcttttcattgttatgcttttctctatatctgtattgatagagcttataacttacattgattatatcagtggtagagtatttgctagcaatcctgatataggtattttactgcttaagaatgttaattttaattgtaagcttcataagggcagggactgtgtctctcttattaaccagcatatctcagtagctggtactgtgttaatgagtaatatgctttaattgaattaaaggaagaagaagttatttactttatcagttatctaagtgggtttcagtattagtactttctatattttatttttatggaagctctattattacaatttagtgtctaatcaagaaataaattacattaaagacatctattgaatatctgctatgtgccaggcattgtataaagtggtgtataggatatgaagaagtataatatatgacctttgtctttaagaaattcacaatatagtggaaagataacttgttcatgaaagcttaataccagtgtaaggcagaatgtgaagggatggttcagggaaataagtattgtaggagttccgaggaagtagagatcattaagggcctgagggcacagatagggatttactgatgtgataggaccctgaaaggtagataagatttagataggcagaagggagattgaaggggcttttaggtggagggaacatgagagaaggtgtagacatggggctatttaaaaacagtttcagagacaatgtctcaccagtctgaaaggataatttatggtggggagcagtggaagggcggtattgtggaggacctgtcacaacagccaaatgagtttggatttgtaaatccggaggtatggaaggtttttggataaggtactgataacatgagaatatcatttttagtaaattagtaaattgagaaaattatataaaatggagtacaagggacaaaagccatcaaaagtaggtagatagaagtacttttccgttttttttctcactaatttcacctaaaacccttggatactatgtataagaaacataagactcaggaaggtggagaacaagtcaggctggttagagacctcaggacacaaggaaagaaacagacacggtggtgtgtaccctgggttttctttttgcctcgggtaccccagactgggtactgaagagccagcagtctggaaatgccaacagacgcagacaaaaacacccccagaaaagcctgccctctctcaccaaaggaccaagaagaaaagggaaattagcaaggtagaaaacttttagatgataacccctctattccttccaagcataggaaaaaactgtggacccatcccctccagcaaaggctgaggaaaaagccaagatttccatcatcaccaggtataatgacatgccccaacacaccctccctaaccccccactagagtggtgacagaagcccaagagacagctggaatttcattgatgccaggtgataaggaaggccccttccttacgctgtcagaggtgacttgggaagtctggatttttcccatctggaagtagggagtaaagaggtaattttcccctctttgtggccagggttcggaggcgtgggtgttagagaaagcctggtggacagtcagaacttccactcctgatcagcgataatgaggccactccctcatagtgtcactggaggccacaaaggaagcagtaatgaggtacccctctctctcccaggcagggtagaatcagttgatactccctccaacaataaccaggagcctctccatccccaggtatcaaaggagacagagtagagagcctggattccattcccattgggtgatacctcctctctcctgccagaataatgtcagtagatacttatttaacttaattaaagtgagagtaaactctattctgagggataaggtgtcagaagaacttcacattttgtttgagcatacataatccaacccaaaatatctatgatgaaactgcagtgtcataaatggtggaacattattaatttttaatttagtaatttatgctttatagcattttaattagtaccaagagagtaaccaagagtactgaagagtaaccaagttccatgttgtatttttaagtttagaaaccctcagttgtggccgggcaaggtggctcatgcctgtaatcccagcactttgggaggctgagttgggcagatcacttgaggttaggagttcaaaaccagcctggccaacatggtgaaaccctgtctctactaaaaatacaaaaattagctggccatgatggtgcacgcttgtactgccagctacttgggaggccaaggcaggagaatcacttgaacctggggggtggaggttgcagactgcatctcaaaaaaaaaaaaagaaattctcagttgtattttacttcaccaccacagagaggagacagcagagtggctgctctttcaattatgaacttatacttagatatttgtagagttggagaataaaatgacttagctctgggtgagaaaataatttaaaaatcaatttaattcattttcagctcaattatgcctaaggaaactaaaaataagtgctgtttttgaactattattttttttcccatgttggcaccccagaaactttatgagcatctgaatataaacgtttaaattttggatgggtaatggcaggcttttgttagtaaaacaatttaatagcaagagagttcttaatggtaggaagccgtaatgaaaaatgtgtcagttatgttggaaaatggaatatcatcatttgaaatcttaggactgtcatggtagttcacagttcagcaaactttttctgaaaagagggccagatagtaaatattttaggctttgcaggtcatggaggtttctgtcgcatattctcctttgctttttgttttgttttttacagccttttaaaaatgtaaaaatctttctttagttcacaggcctataaaaataggctgaaggctggatttagtggcattttaaaaataggctgaaggctggatttagtggcagtttctccattcctgccttatcttattagtcaattgactaaggttctctttgtttagtttgtctagttcatgaatcataaagcgaacttttttcacagcacagagtaaagacattttatagcatagcatctgaatatacaaagtctctttaggttcagccaacttactctgtagttttcatttaaagtcagttcctttcttaaagaaaaattaatatatctgattttttttctgtctctgttatagaagaggtttaaaatttttttttgtcttttctttccttgtaaatttgagaaaaagacagaggtttatagaagttttttccacaaaatttatttgtgcattaatcgataggcaacatagtgtaaaacatagctagctgaatattcagaatatattttgtacataaagagaatgtcgggttatattttaagcttttggaaatagagaaggagtgattgtatcaggacacttgatatacttcaacttgtactagaacagtttttaagtgttgattctgtaccttcactgtgtcacacttctgatactatgattccatagaacacataagacttaatgtcctttcagtgatttttctttatcatggcaaagctccaaccgcatgactcatgctttttcaaataatttgaaaaaaactttagtgtccattttgatcattcactttgatcatctgtcatagtgatgagactttcgaatgtatcagaaaataaaatttgaatgctatcaagatgtccagtagattattttatgtgctttgaggttattttaaagaatagtttgaagatttatgagtagggactgtatctttgaaataaatactggatcatcctataaaatgattatgttgaaataaactacatacgcaattttggcacgtaaatggtcgaaactatttgagaataaaccattttaaagcattaaaggaacgtgggaaatatctttttatataggaataatgaatctgttattgatgtttccattagaatgtgaactccttgagggcaggatgtttttttccatctgttttgttcactgctatattcatagtactgaaaccatgcctggcacatgggaggtgttcagtaaatacttgttccattaataaatgcataattattaccagtaaatataattttttgaacattgtattgtggtaacctaatcctagtaactgggtaagcctgaaagtagtagcgtttgtttctgtgaaaagtccataaataagatttctgactaaaatggactttccaattagttttattacaagttctacacaaatacattgttttgttataccttaccatgatacct

SEQ ID NO: 906 - DNA, 3198 bp, Homo sapiens
  source 1..3198: mol_type = other DNA
gggcgccccctcacggggcggggcagtgcggcgcggctccggttcccggcggccctcgcggcaggtttcgggcttcaggacaattcgtgatggcgggggctggttccgccgctgtatcgggggcagggaccccggtggcggggcccacaggccgcgaccttttcgccgaagggctgctggagttcctgcgacccgctgtgcagcagctcgactctcacgtacacgccgtcaggtgcccgggagggaagttgggggcggggcctgtctctctggctttgtaggggcggggccaagaaagtgttctggctgggagtgggcataaatttaggaaactgattcgaggcggggaggacaggcgggaaggccgcaggtggagggttcagcggaggccggcttctctcagtacttggtaaatacgtaggggagttcgtttcctgagctccggtaactgcctgaccttgtaggccttgtacctctttgcagagagagccaggtagagctccgggaacaaattgacaacctagccacaggtgagtgagcatccctgtgtacccggaattcttcagcccactttcaggaccttaggtttttgccaacccctgggctgagtttctgtcacttgcttccagggcatcagggctgccaaaggactcctcctttcagggatgtcttaaatctctaatggctgtggcccgtttgggtgcaagtgttttccatcccattaccagcctgctttccctcagaacaagagataagccgttagatcttagctgcaccttacttccatccccagaactgtgccgcataaatgaggatcagaaggtggccctggatcttgacccctatgttaagaagctacttaatgcccggcgacgcgttgtcttggttaacaacattctacagaatgctcaggtaaaagaatatcttaccaacagtgattctttgcccttttttgtaagtcctcaacacagtgaaagccactgtaattttaaaattctttggggaaagggaaattcacttctcccagtacttgaaaaatacctaggaaaattcgtctcattctcactattcagttgctgccatttacattcttgtgtgtgtgtgtgtgacagtctccctctgtcacccaggctggagtgcggtggctcaatctcagctcgctgcaacctccgccccctgggctcaagcaattctgcctccgcctcccgagtaactaggactacaagcgtgcacaacgcccagctaatttttgtatttttttgtagaagtagggtttctccatgttgcccaggctggtctggaactcctgggctcaagtgagcttcccaccttggccacccgaagtgctgagactacaggagtgaaccaccacacctggctatttatttttatgatacaaggtctatcacccaggatggagtgcagtggcatgataaaggctcactgcagcctctacctcccaggctcaagcgatccatccacctcagcctcccaagtagctgggactacaggcatgcaccaccatgtccagctaatttttgtattttttctagagacagggtttcaccatgttacccaggctggtcccaaactcctgcatgcgagtgatccacctgcctgggcctcccaaaacgctgggattacaggcgtgagccactgcacccggcctgcctggcctttttttttttttttttaaataaaaagacaggatcggctgggcgcggtggctcttgcctgtaatcccagcagtttgggaggccgaggtggacaggtcacctgaggttgggagttggagaccagcctgaccaacatagagaaaccccgtctctactaaaaatacaaaattagctgggcgtggtagcgcatgcctgtaatcccagctacttgggaggctgagacagaagaatcacttgagcccgggggacggaggttgcggtgagctgagatcgcaccattgcacttcagcctgggcaacaagagcgaaactccgtctcgggaaaaaaaaaaaaaaaaaaaaaagacaggctatcactatggtgcccaggctgttctcaaactgggctcaagtgatcttcctgccacttcctcctaaatggtgctgggataggcatgagcaccatgcctggcctacatttttttttttttttgagatggagttctccctctgtcacccaggctagagtgcagtggcacgatctcatttcattgcaacctccacctcccggtttcaagcgattctcctgcctcagattacaagcacccgccaccatgcccagctaatttttttgtattttttagtagagacgggttttaccatgttggtcaggctggtcttgaactcctgacctcaggtaatccacccgcctcagcctcccaaagtgctgggattacaagtgtgagccaccatgcccggcctacattcttatatatacttttgaagactgactttgaggtagatcacgcccggtatttttcagcacctagttcacttacactctcaagcctttcacagtggttaagattccaaaccttccttgtcttgtaggaacgactgagacggctaaaccacagtgttgccaaggaaacagcccgcaggagagcaatgctggattcgggaatttacccccctggctccccaggcaaataacagatgagcctatggactcagtagcacaagtactgttccccagctgccttgtttcaacagacatgcaaagatcctaggagacagtccccatagaccttcagacattaaaaagggagccgtacagtttgtttgaagcacttcgtcttacccatttatgtaggggccccaggaaacctacacacagccagaatgaggttcccaaaggacttacattaattatggctcttgcttcctttcacaaatgagctgaggcctctacttttttttttaagctgcatacgtgaggcttaccttcttcaggactagttaaccagaggggcttcctttgtatgttacatgcctggttacatgggcctggacagcatgtcctctacctgtgacttctcattttcctgtttacactggggatttggagggggcaggcaaagtcaaagtgaatgacctctgtccacccacttttttattgcactggcttgaatacagtagcagtgttgatagaatcattttattcaataaatacttaaaatgatattctagtttactctggtata

SEQ ID NO: 907 - DNA, 3375 bp, Homo sapiens
  source 1..3375: mol_type = other DNA
ataagagaccacaagcgacccgcagggccagacgttcttcgccgagagtcgtcggggtttcctgcttcaacagtgcttggacggaacccggcgctcgttccccaccccggccggccgcccatagccagccctccgtcacctcttcaccgcaccctcggactgccccaaggcccccgccgccgctccagcgccgcgcagccaccgccgccgccgccgcctctccttagtcgccgccatgacgaccgcgtccacctcgcaggtgcgccagaactaccaccaggactcagaggccgccatcaaccgccagatcaacctggagctctacgcctcctacgtttacctgtccatggtgagcgcgggcgggcctaagcggtggcgggggccgggcgcggttcccggggcgcgcgctggggcgggccgggggtgtggccacccgcgggctctcccgcctccctgcgcccttctggaaaatggaggctgctcgaggtttccgaggacttctctggcgcagaaagtcggggcagctggttcttctcggctgtaccctgagaatgctccctcctaggccagggccgcctctgcacacccttcttttttaaggagaccttggtgtcctgaaatcctggggttgcaagactgccagcctgtgtgatcaatcctgcggttaggaaggtggagttttgctttcccatcttttcctctgcctccggcatttggccctaaatgccagcgttttttgcttaggtatccagctcccgtccgcctgtgtgtggcggagctgctgggtaacggtgtcgaatagcaaaccttgggggctggcgggaggtggcttatcttgtgggtagatccctctcgagcagccgtatccacctctcggctctgcttatctctaagtcccacttgctttgaagcatatctctaggaatcgccccttctgcagtcaccgaagtgtcacctgaccttgcgcctaggggacctaatttatcttttatgtatcttactgtaagaggtgtggagtttggcctactaattgaacccccagttcttggataaagtccaccgacagttactgggcaagaaatttttcagtgatcagtggaatcagttttcccaaatcttggtcttaggcagtgtcgtgggagtcttccttagaattgccttgtgattgtccaaactatcccaagaataaatgtgttccaaatggatttgaaaacaggcctgtatttctgtgactgtcactgcctttcacaaacacttgactacatcaaatgtctaaaactgaaaatcaaatttttgtgatataactattataaaagtatgtttacatcaacatactgtccacatttgccaccttgcatgggggtttttaatttgtgtgtgtgtgtgagagacagagtctcgctctgtcgcccaggctggagtgcagtggcgcgatctcggctcactgcagcctccgcctcctgggttcaagtgattctcttacctcaggctcctgagtagctggaattacaggcgcacgccaccacgcccagctatttttttttatttttagtagagacggggtttcaccatgttgaccaggatggtctcgatctgctgacctcgtgatccgcctgcctcggcctcccaaagtgctgggattacaggctgagccaccgcacccagcaggggtttttaattttataaataaatatgtggtacagctggcagactcctgagctcagttttaaccatgctttaacatggttaatacaggagcagggaggagaaaaggactaagtgcagggtcagtactccagcgccctctcatcagacaatgaattctgacactggctgtaagttttctgtgcagtaatacagatccttaagacattgccccaggcaatgcccataatatcctaaaggttccttgaagttaagtttcaaggatcaagtttcagttttctattttagaatagaaacattactcttgggttcaatccagtagctcatctgccccccagtctccttaggcactgattccttcatgctgtgctttgagaaaggaagcctaggctgacgagaccatcttgcctccctgtagatcgtcacagctacctgtctctggggatccctagtataacacattcagtgttcccctttcagtcttactactttgaccgcgatgatgtggctttgaagaactttgccaaatactttcttcaccaatctcatgaggagagggaacatgctgagaaactgatgaagctgcagaaccaacgaggtggccgaatcttccttcaggatatcaaggtgaacaaaagatcctaggggtgtcatacttcatcatctggcagtgttcgggtatcagaaatcacttaaactagcaattgcccttataaagtgatgatacactgggcttttgccttttgtgcttttttaggcttaccatctaaactaaattaggcaaatagtaatgtcccttttgccaaaacgtggtggttagagatgatgggcttgctgacttctaggttagttggtagagatgcattaacctattctcattcagaaaccagactgtgatgactgggagagcgggctgaatgcaatggagtgtgcattacatttggaaaaaaatgtgaatcagtcactactggaactgcacaaactggccactgacaaaaatgacccccatgtgagtattggaaccccaggaaataaatggaggaaatcatttgccttagggattgggaaagctgcccactaactgtcttccccattgttttgcagttgtgtgacttcattgagacacattacctgaatgagcaggtgaaagccatcaaagaattgggtgaccacgtgaccaacttgcgcaagatgggagcgcccgaatctggcttggcggaatatctctttgacaagcacaccctgggagacagtgataatgaaagctaagcctcgggctaatttccccatagccgtggggtgacttccctggtcaccaaggcagtgcatgcatgttggggtttcctttaccttttctataagttgtaccaaaacatccacttaagttctttgatttgtaccattccttcaaataaagaaatttggtacccaggtgttgtctttgaggtcttgggatgaatcagaaatctatccaggctatcttccagattccttaagtgccgttgttcagttctaatcacactaatcaaaaagaaacgagtatttgtatttattaaactcattagtttgggcagtatactaaggtgtggctgtcttggattcagatagaactaagggttcccgactctgaatccagagtctgagttaaatgtttccaatggttcagtctagctttcacagtttttatgaataaaaggcattaaaggctga

SEQ ID NO: 908 - DNA, 1570 bp, Homo sapiens
  source 1..1570: mol_type = other DNA
cagttcggcggtcccgcgggtctgtctcttgcttcaacagtgtttggacggaacagatccggggactctcttccagcctccgaccgccctccgatttcctctccgcttgcaacctccgggaccatcttctcggccatctcctgcttctgggacctgccagcaccgtttttgtggttagctccttcttgccaaccaaccatgagctcccagattcgtcagaattattccaccgacgtggaggcagccgtcaacagcctggtcaatttgtacctgcaggcctcctacacctacctctctctggtgagtccccaggacgcccctggccctaatttcctccagctgcgcacctccggccctcactgcacgcgccagccttctttgtgcggtcgggtaaacagagggcggagtccccttggcctcgcctcccgctaaccattgttgcctccatctcttcccgtagggcttctatttcgaccgcgatgatgtggctctggaaggcgtgagccacttcttccgcgaattggccgaggagaagcgcgagggctacgagcgtctcctgaagatgcaaaaccagcgtggcggccgcgctctcttccaggacatcaaggtaactagtgtgtgggtaatggactacatctcccagcaggccgtgcgcgcgaggagccttgatttgagggcgtaggtgtcgcgtgggcttctgggagattgagttcggtcttgtgagccctcttaaccgctggaaatagaggcgcacctcgtgcagtgcccacaacacgcggcagtccacaccgctgcgtggtcttagggacgtatagctgtaagagctaggacagggtgcggagagtgataaatacaagctgtcacatgtctttgtggcctgggcctctgacccccaacgactcttgggaaatgtaggtttagttctatgtgccgagtgtgtgtattctgagccatttctcccttctatatagaagccagctgaagatgagtggggtaaaaccccagacgccatgaaagctgccatggccctggagaaaaagctgaaccaggcccttttggatcttcatgccctgggttctgcccgcacggacccccatgtacgtacccgctgcatccatggctacccaaccatacccctcaagcctctgctccctttgggcaaatttccttcagagcctcatttcacacctgtcacattttaatctgcaactggctgctctctccccctcttttccagggattgggtttctaatttctccctcttctctctcagctctgtgacttcctggagactcacttcctagatgaggaagtgaagcttatcaagaagatgggtgaccacctgaccaacctccacaggctgggtggcccggaggctgggctgggcgagtatctcttcgaaaggctcactctcaagcacgactaagagccttctgagcccagcgacttctgaagggccccttgcaaagtaatagggcttctgcctaagcctctccctccagccaataggcagctttcttaactatcctaacaagccttggaccaaatggaaataaagctttttgatgca

SEQ ID NO: 909 - DNA, 32748 bp, Homo sapiens
  source 1..32748: mol_type = other DNA
aagtgaggccgcggcggaggggacggggctaggccgggtcgccgcctgacgcgacgcgtcctcacgggcgcctacgtcacggcgtcgaggcggaagatggtgcacctccgggccggcggttgctgagctgacccggacggcgagggagcgggagcccgagcccgaccactccggctgccgcggggtgcggcgcagccaccgccatgtcgctgctgcagtcggcgctcgacttcttggcgggtccaggctccctgggcggtgcttccggccgcgaccagagtgacttcgtggggcagacggtggaactgggcgagctgcggctgcgggtgcggcgggtcctggccgaaggtgaggccccgggtcggcagcgcgggtgcggccgcggagtgttgtctccgggacgctgggggcagcgtcagcccggagtggaagggcgtgggttagggctggggagggtcccagcgggatcgtgggtcagggtcggccaggggagggtctctgccgagggcgtgggtcagggccaggcgaaggtcatagcgcgggcgtaggtgagtgcctgctggcggtgattgcggagggcgaggctgggaccgggtcggggtactttcttgtcataagagtagggtcaagtcggagcaaggcctggggcttggggaaccccctcagggtgggtgggggaagatgttacggtgaggtgggggatggtggcaggcagggagcttgggtggggacccacagcggagactgagggacggtgcctagaaggccgacagctggagtcaggaggtgagcggtgcaggaggtgggtttaagccttggccttttgccggacatctggggttattgagcaggcagggacaggactggactttggaggttagggctggttcttctacagtccagggaacttgagagttggtgggtgcacacgtgttgcaggtagttgcggttgtagcctggggggtgggggggttggccgagggtagactgggctgtgtctcgtgatcccccttcgtctttcaacacctcagtgtttctcttcccggtgaacatctactcgtgtgattccgtgtgtagtacaggaagcagagccagtggttgtgacctatatagaacttgcagagtggacaggtcactcggcttaagtcctcttgagtcagtcttgagtcagttttgtctctgcatgctatttctagctccctggatgtcctctccgttcacacggaatcgatcaccagtgccagtgggtcccattctctcttgtggattttccttacattttttgtccagtggtgcctggaggtgtgtcatatttcactggctgtgaagtttatgggctaaacacagttgacttgggtgcggaagcgtaactctattctgctgtattggcacagggagagggagtgaagcgacacaaaagccctcaccctcaccagctccctggtacctctcagggctggagggttagcctgtccaggtgcctgctctgtgaccagacaggagactatcccagaattctgattatcacaaaaggcctgcggagacattttgactgtagcattatcacacactttgtctccattgtggtcaaaaccaaacagattttgggtatgatttggtcagaaagtctaagctcttctttcagaagtgggggctgaagtgtgatattctttcacatcagttggaagatttctctcagatcaaatcatttattctgaaaatactaggtggttatcttcattctttaagaagtttattgtggacaggacttgctttctggaacttcagacttgtgctcaaggggtggagagacagaggcagcacagggacagatccttaggggtggtacagacagtgtgagctttgggaaggggccaagcagaagatggcacggatcttggtgggagggatggagaatgcaccctcactggggcccggagaggaagattcgtataaagaaagaagcttgtgggtcacttagcacccaggaagaagaacaaggaaatgtgggcagctgctgaggttgtgcaaaagaacttgtttccctttgctatctaggcaagtcaggagataaaaataaccaatgcaattaggagctgtagatttcctccttgtaaacttaataggtggcctgcagcctcctaagtactttgaagcctctttgaactgaaacagagtgtgaaagctgaattaagtattttatataaacatacttaattaagttttgtctgaacagcaaccttagaacataggctatgggagtttaggctgtcttgtgtaaacatggtgatggctggtaatctgaacccttgagtacagatgtttacacttccagaatttttcaggtttcagaatggtcattgcagcatataacctgtatatcgtgggatactcccagaagacttgggaaagtattctgtaattgaatacattaatatttctgtaattaaatgaataaatattctcactgtgggataattaaagtctgtaattaaccccatatcagttcatgtcaggttttatcccaaatgaggttattatgatagaccaggatttgctgtcaagtgagttaggaaaaaatggttttcatagcttttaggaatttggacttgtggtgtgaatgggtttttaggtagaactgtggaaccagatagctttctaatttcttcaaatttgttctgtcatcttcctttttttttttttaatttaagagacgaggtcttgctgttactcaggatggatttgaactgggctctggatcttcctgcctcggcctcccgagtagctgggcttacaggcatgtgctgctgcacctagctagtcttcacttttttaaaaggcagattatcaggagcaccaaccatgtcagagatgcccagggcaggtgtatgctgtgtgttctttgttttgggttctgcgtgccgttgcttctgaagtggagcctgtggtgccctgactgcagggaaatccaccttccctgtgtggctgacttgaactcggggttactgctagtgagataaattgaggcagaaaagaaaacgatgccgcacagccgtcgtatggtttaagcgtaacccgcctcgtgcgtttggttgggtgttgtatgtaatttgagccagcccgcagcccttgtgtgccatgcgcagtgttagctgagtggctgggcccgctcaggagccttgggggtcaagctctggcctaaggaatggggagggcacagcctactcccacccccagggccacttgtgtgtggtcctgactctccacccttcttcctccttgacatggcttttggaggcttcctcccttcacttacttagaatgttctgggccgggcgcagtggctcacgcctgtgatcccagcactttgggaggccgaggcgggtggattacctgagatcgggagttcgagatcagcctgggcaacacggggaaacccgtctctactaaaaatacaaaattagccgggtgtggtgacacatgcctgtagtcccagctactcaggaggctgaggcaggagaatcgcttgaacctgggaggtggaggatgcggtgagccaagatcacgccattgcactccagcctgggcaacaagagtaaatctccgtctcaccaaaaaaaaaagaaaagaaaaaagaatgttctggactgggtgagggcactgtgaatatttggtactgactgacagttgcagaatcatgtggtacaagcaagactcttggttgcaagtttcagaaaccctcccaggtgggctcagtggcaggaaggccccatgtctccaaggtgggctcagtggcaggggaggccgcatgctggccccatgtgtcctccgcagggtacacttgagatcattttcttttattgaaaagagtctggctctgtcgcccatgttgagtgcagtggagcgatcacgactcactgcagccttgaactcctgggcctacgtgatccccctggcctaggcctcccagagtgctgggacgacaggcatgagataatgtgcccagccttagactgatcttaaaagtagaccgggccgggcacgacggctcacgcctgtaatcccagcactttgggaggccgaggtgggcagatcacccgaagtcaggagttcgaaaccagcctgaccaacatggcaaaaccccatctctactgaaaatacaaaaactagctgggcatggtggcgcgtgcctgtaatcccagctgctcaggaggctgaggcaggagaatcacttgaacctgggaggtggaggctgcagtgagctaagattgcaccactgcactccagcctggacgacagagcgagactctatctcaaaaaaaagtagacccttaggttgctgtggcgagccagccttgtagccgaccctcttcccacataggacttgtgactgagggcaccagcctctgaagctccgtgctgttctcttggccatgtgactgagggcaccagcctctgcagctctgtgctgttctcttagccaccagggttctgtcatccttgcttctttgtacctctcctggacccagagcctgaagtgcggtggctgcgctcacccagggaggggtgcggggcctgcgctcacccagggaggggtgcggggcagtgcagagcgcaggtaagcagggaggggtgcggggcagtgcagagcgcaggtaagcagggaggggtgcggggcagtgcggagggcaggtgagcggggaggggtgcggggcagtgcggactacaggtgagcggggaggggtgcggggcagtgcggactgcaggtgagccgggaggggtgcggggcagtgcggactgcaggtgagccgggaggggtgcggggcagtgcggactgcaggtgagccgggaggggtgcggggcagtgcggaccgcaggtgagcggggaggggtgcggactgcaggtgagccgggaggggtgcggggcagtgcggactgcaggtgagcggggaggggtgcggggcagtgcggactgcaggtgagccgggaggggtgcggggcagtgcggactgcaggtgagcggggaggggtgcggggcagtgcggactgcaggtgagccgggaggggtgcggggcagtgcggactgcaggtgagcggggaggggtgcggggcagtgcggagcgcaggtgagccgggaggggtgtggggcagtgcggagggcaggtgagccgggaggggtgcggggcagtgcggactgcaggtgagccgggaggggtgcggggcagtgcggagcgcaggtgagccgggaggggtgtggggcagtgcggactgcaggtgagcggggaggggtgcggggcagtgcggactgcaggtgagcgggaaggggtgcggggcagtgcggagcgcaggtgagcggggaggggtgcggggcagtgcggagcgctggtgagccgggaggggtgcggggcagtgcggagcgcaggtgagcggggaggggtgcggggcagtgcggagcgctggtgagccgggaggggtgcggggcagtgcggagcgcaggtgagcggggtggggggggttgcggggcagtgcggagcgcaggtgagctgggaggggtgcggggcagtgcggagcgcaggtaagcagggtctctggggcttggttagttggttctaggtcatcaggcctgtgaggcccagattctgccacagagtagctgccccctggcggctctcctggtaccaaccgccttcacttccaagttgacagcttgatcatcaacatttgtccactttggctagttcccagcgtgaagtaaaaatggtcagaaccaccacagcaacccttaggggctcttcgtatttgccgagcatggtcagtagtactttatgtggattgtgtggtcctcacagtagccctggaaagtgggtactataattacttccatctcgcagaagagaaaagtgacgtttgcagagattagttgcttgccagaggtcgagtggtggagtgggggctgggagccccagggaggtgtccttagggcccctgtcctggcccccgttgctctgcgcattgtgccctggaggagatgtctgagcatataaggtagtagaggctgttggggcggagagtgacaggccaacaccacttcatgctcagctgcggctgacccttggcaggaacaagcctgtgttacttctgtggtttctgtctgttaacatacagggaggtcactcttggggaggaccccatgggtgggctcaccattgggggaggtcactgtcgagggaggaccccctggggtgaattagacgttcggggaggtcactgtccagggaggaccccctggggtgaattagacgtttggggaggtcactgtcgggggaggacccccttggggtgaattagacgttcggggaggtcactgttggggacgacccccgggtgggctcaccactgggggaggtgacagttgggctgggccactcccctttcctcctcctccactccgtggactcctggtgaattgctcatggttgtctgtgtgggtgcgcatccccgtgtcccagtccgtctgtgctgctgtaacagaacgtcgtacactgggggcctataaaccacagacgtttgtttattcctcacggctctgcaggctggaagtccaggcgcaaggcgccggcagatctggtgtctggtgaggtccagcaccttctcgctgtgtcctcacagggcagaaggggtgagggagtgctctctggggcagtaatcccagtcctgagggctccaccttcatggcctagtcacccccaaggaggccccacctcctaacaccatcaccttgggtattaggatttcacacaggaattttggaggggacacagattcattctgtagtgttgtgaattatgtgtgtattgaaaatgttggtatgtggtattttacgttagaaaagtgtctgtttcttaaaagaggccgagttgattaaaaaagatactcagatctgcctgtagtggtcctgtactgacctcactgtcccccggcactctgtcccgtccccagcgtgctccgtgcatcctacacgcatcctggtgagaggtgtcctcagccctttgcatggacgctggtgggctgtgtgggggaaggttgcccagctctgctcatggggcctgcaggctgctcgggggcaccagactctagtgtcccaagtcctcagagtgtcccctgggggtttgttttatttggacattttgatgggtttaaaaagtgtcaagctttgatttgtgcctttctgagtagcgagtttggtaatgcttatttgctgctcagcctccccttctggcattgcacattcatatcctgtgcctgttatttttttattcttatttttttgagatagagtcttgttgtgttgcccaggctgtagtacaggggtgtgatctcagatcctggcaacctcctcctgagagcagcccccgggcagaactccacccccatgacccaatcagatctcacaggagagcactcactatcctgagagcagcccctgggggaactccaccaccacaacccaatcagatctcacaggagagcactcactatcctgagagcagccccccgggggaactccacccccacgacccaatcagatctcacaggagagcactcactatcctgagagcagccccgggaggaactccacacccatggcccagtcagatctcactatcctgagagcagccacgccatggggaactccgccccataatccggtcacctcccaccaggcccctcctccaacattgagggtcacaagtgaacatgagatttgcatggggacgcagatccaaaccgtatgtgctgttatgaataaagatccaaaccgtgtccgctgttatgaataaagatccaaaccgtatccgctgttatgaataaaggtgccgagaacattttttttcaagtctttttgtggacgtgtgtttttctttgtcttgggtaaaaaataccaaggagtaggattgctgatttacaggttggatttaggttgaacttcacatgaaacaaccaaacctccttccacggtagctgcaccattttacatttccaccagctgcagtggagagttcctggctctccacttcctcaccagcatttcttgtggtctctcattttgattacatccattcttgtgagtgtgcagtggtgtcgatctcattgtgatttcattggaatttccctgatgatgatgttcagcaatttttttttttttttttttttgagagggagtcttgcccaggctggagtgcagtggctccatcttggctcacggcaagctccacctcccaggttcaaacaattctcctgcctcagcctcccaactagctgggattaaaggcatgcaccaccatgcccagctaattttgtattttttagtagaaatggggtgtcactatgttggtcaggctggtctcaaactcctgacctcaggtcacccgccggccttggcctcccaaagtgctgggattacaggcatgagccacggcgcctggcctttttgtccattttttattgggcagggagtttctgcttactctggatacaggtcttatgtttatatatttatataatttatgtgagaaagagaaggcaagccttagctgtggtcactctgctgtcccaggccaggctgcctcagggaacctgggccttgagatttgacctggcttgagcatttgatgtctctgtgcctccactccccacccctccactccctgcccttgagatgaggtcttgctttgttgcccaggctggagtgcagtggcatgatcacagctcaccacagtcttgaactcccggactcaagcgatcctcccacctcagcctcccaggtagctgggaccacaggcacgcaccaccacgcctggctaatttttaatttatttctggtagagatggagtcttgttatgttgcctgtaggctgttctcagaactcctgggctcaagtgattctcccacctcggcctcccaaagtgctgggattgcaggtgtcagccactgtgcctggcctgtgcctgttccttaattggcagagtgtgtgctgtaaaatgtatataacagggtcttggaggtacccgacatgccattctttaatgtcttatacgttactattatttttaaataaactgtattattttgagttcattgtaggttcccacgcggctgtgagaaaagatggagatcttttctattttagacccttgcctggtttccccagtggtgacggtcgggatgctaaccctggtgcaggtgaggctgtggaagtctccatccccgtagggagccctcatgccacctctcagccacgccatttccttaccctctggaaacctctagtctttgctctgtctgtgattttgtcattcgaaggatgcagtgtaaggggaagtgcagaattcttcaggtaattgtgtgtcagtagcttgtttcccgtggtgagactcctctgcgtgagtgtgcacggcttgcccagccagccacccgtggaaggacatctgggctgtttcctgttttggctactacagataaagctgctgtgacacttgcgtataggtttttgtgtgaatatacgttttcatttctgggataaatgtttaagagtgcagttgctggttcatgtgtggtaattatgtgtttagtttgttagaaaactgccagattgttttcttgagtggccatacattcccaccagcaatgtaggagcgtatcagcctggttaggctgccataacaaaatactccagactgagtggggagcagtagaaattcactctcgcagttctggaggcttgaaggccaagagcaagatgctgtcagtgctgattccaggagaggcctcttttgctggtttgcagatgctgccttttttttttttttttttttgagatggagtctcgctctgtcacccagactggagtgcagtggcgcaatctcagctcactgcaacctctgcctcctgggttcaagcagttctcttgcctcagtttcctgagtagctgggactacaggcgcccaccaccatgcgccgctgatttttgtatttttagtagagacggggtttcaccatgtttcccaggttggtctcaaactcacgacctcaagtgatctgcccgcctcggcctccgaaagtgctgggatcacaggcctgagccaccgcgcccggccgatgctgcctttttgctgaggggatgctgacatctctggtgtgtcttcatcttataaggacaccagtcctattggattagggccccactcgtatgaacttatttatccttcattacttgagggcccgtctccgcatagggtcatctggggcttccgcagatgcattttgggggcacacagttgagtccctaacagcgagtttctctttgtactcaccagcatttggcgtcgtggtttttactgtgatcattgtgatacatgtgtagcgatacctccttgtggttttgatttgcattttcccgatagcttgggagtgcttctttgccatctgcatatcttcaggggtgaaatgtctgttcatgtcttttgcccacttcctaattatgtttttttgaccaagttttgagtgttctttattgtagatttaagtccttcgtagacatggggttttcaagtatctgttcctagtctgcagcttgtcctttcgtcccctaaacaggatctttttggacgcaaactcagaccagttaattaaaaaaaaaaaacaaacaaagcggggtctgttgcagatccaaagtttttcattgtgaagtctgatttatttttccttttacgaatcacgccttgtcacagctaaggattcttagctctttatcttgaagatttgtctcctgtgtttttctgaaagttttaaaccttcacagttgcagatttatgtccgtgtttattttggtgaattactgtatgtggctggcatttacatgaagctcattgtctggcaccatttgtggatcttccatggagttgcttctgtgcctccctcagaaatcatctcgatgggctgggcgtggtagcccaggcctgtaatcccagcactttgggaggccaaggcacctgaagccaggagttcgagaccaacctgggcaacatagtgaaaccccgtctctactaaaaatacaaaaattagccgggcgtggtgacgcacgtctgtagtcccagctactggggagactgaggcaggagaatcgcttgaacctgggaggcggaggctacagtcaactgagattgtgccactgcactccagcctgggtgacagagcgagactccgtctcaaaaaaaaaagaaaaagaagaagaaatcacctggattgatttgtgtggctgtttctgcgattttctttccattccagtcatctttgtatctgtccctctgccaataccacatagccttgattaatttagctgtgtagtaagtcctgagatcaagtccagatattactatctttaaaaattatgaaatattttaaaatgcagaaaaatacagtaacataacgaacacctatgtcctactatccagaataaacgttaaccttttaacaaaatagtatctggggccgggcatggtggctcacacctgtaatcccagcactttgggaggccgaggcagggggatcatgaggtcaggagatcgagaccatcctggccaacatggtgaaaccccgtctctactaaaaatacaaaaattagccaggcgtggtggtgggcgcctgtagtcccagctacttgggaggctgaggcaggagaatcgcttgaacccgggaggcggaggttgcagtgagccgggattgtgcctctgcaccgcagcctgggcaacagaccaagactccgtctcaaaaaaaaaaaaaaaaaaaaaatggctctaaacctttttcacaattttggtagaataatgtcgcaatattcttggacttctgggaccttctccttcctggtggcgttttcaccaccaggagttcaatgcacatccttcctgctcattttccttccgctttccctgcactgtgtgtgatactgcgttagaggtgttaaaagtcacatcagtgatgctgtgtttttttgttgttggttttttgtttttttttttttgagatggacttttgctctgtcgcccaggttggagtgcagtggcgtgatctcggctcactgcaacctccgcctcccgggttcatgccattctcctgactcagcctcccgagtagctgggactacaggtgcccgccaccataccgggctaattttttgtatttttagtagagacggggtctcactgcgttagccaggatggtctcgatctcaccttgtgatccgccctcctcagtctgccaaagtgctgagattacaggcctgagccactgcacccaccctgtttttgttttttaagacaagatcttgctctgtcatccaggttggagcacagtggcttgatcatagctcactgcagcctcaaactcctgggttcaggtgatcctcctgcctcagcctccctaagctttgggattacaggcatgagccgttcccagaccttagtatacacttttggtcaggcaccacttaggtgctggatgtagatgtaaacaatgtggaggaaatttctgcttcatggtgtttgtagtctagctgagacagacggtaaacaggtatccgagtagtgtgtgatgtaatgttagatatcagaaagtgtcaggaaaaaggaacaagttaataaagagtggctgggatgggcaggtgcattagggaaggcatcgcagaagcggtgaggagcagctcctgagggacgcaagggagcaagccaggaggtgcccagggtcaggggccccttccaggcctgtggtgtgtgggaaggccctgggcaggaatgggcctgctgcgtttgaggaagagcagttgtgtcaatgtggtggcttggaaccaaatgcggggtgcggctggagaggaggaggctggggaggcacccagagacctgtggccctgctaaggtcatgcggcactgaaggcctttggagccttctgtctttctaaggtcatggggcgctgaggcccttggagccttctgtcctgctaaggtcatggggtgctgaggcctttggagccttctgtctttctaaggtcatgcggcactgaggcctttggagccttctgtctttctaaggtcatggggcgctgaggcctttggagccttctgtcctgctaaggtcatgcaacactgagacctttggagccttctgtcctgctaaggtcatgcggcgctgaggcctttggagccttctgtcctgctaaggtcatggggcgctgaggcctttggagccttctgtctttctaaggtcatgcggcactgaggcctttggagccttctgtctttctaaggtcatgcggcactgaggcctttggagccttctgtctttctaaggtcatggggcactgaggcctttggagccttctgtctttctaaggtcatggggcactgaggcctttggagccttctgtctttctaaggtcatggggcgctgaggcctttggagccttctgtctttctaaggtcatggggtgctgaggcctttggagccttctgcctttctaaggtcatgcggcgctgaggcctttggagccttctgcctttctaaggtcatggggcgctgaggcctttggagccttctgtctttccagtcatggcatctgaaaatgagaggagttttagttcctccttttttttgtgtttaatatattttttaattgacagataaaattgatgtctttgtcatgtacgctatgatgttttgaagtatatatgcatcgtggaatgaccacatctagctagttaacacatgtactgcatcatagttgtcagttttggggcatttttcagaatgtaatctgtcgttagtaactgtatagtcaccgtgttgtacagtggatctcttgagcttattcttcctagctaactgaagttttgtctttcgttagtttttcctttttgatctttatgccttttattaattttcctagctttcttgcattaactcgaatctccagtaaaatgttggcttacagtgctgagagcagacatcttgccttgtttctgatcttaggaagaaaacacgattaagtcttatgttagaagtcagttttttgtagttgttgtttctaaattttgttggtgatccagtgttccctattctgctaatgttgtttactacagtgattgattttttaatgttacaccaaccttgcattcctgggatgaataccacctggtcatgatgtagtatccttattatgttttgctggaatcaatttgccagtattttcttgaggattttttgtgtctatggtaatgagtgatctctttccttaatttggtatttatacccttctttggttagtgttatgctaacttcaagcaatgagctgggaacccttctcctctatctaatgaaagactttataagcttgttgtgatttcttccttaagtgtttgatgtaatttagcagtggagccatctgttttctattttctatttcatggatttccatttacttcctttcatctgtgtttttcctcacagatttatttattatttaaatattttaacagttgagataaaaatgagatatacaggctgcatgttttaaatgtttcggcacatgtcatgtatgtatgtgtgtgtcacacactgtatctgccacgctaatcaaggcagcaaacatgtgcgtcagcgccacggtctccctcctccccacggtaacccttcgccctgctttcctgttcccatcccaggaaaccactgattggccttctgttactatagattcatttgcattttctagagttttctgtacactaactgtatgtgtatatgtactctctttttttggcctggcattggccttctgttactatagatccatttgtgttttctagagttttctgtacactgactgtatgtgtatatgtactctctttttttggcatggcattggccttctgttactatagatccatttgtgttttctggagttttctgtacactgactgtatgtgtgtgtatgtactctctttttttggcctggcattggccttctgttactatagattcatttgcattttctagagttttctgtacactaactgtatgtgtgtgtatgtactctctttttttggcctggcattggccttctgttaccatagatccatttgcgttttctggagttttctgtacactgactgtatgtgtgtatgtactctctttttttggcctggtcgtttgtgttttctggagttttctgtacattgactgtatgtatgtgtatgtactcttttttcgcctggcatcttttactcggcatactgccttttcgtgtgttattcatgttgttgcatgtaacagcagtttcctcctttttattgctaggtagtgttagaggtgtgggtaatttgttcattcacctgttgatggacatttgggttgcttccatttttaggctattgcacatgaagctgctgtgtagaagtctctttacgcacatgtgccttcatttttcttgggtaaatacacagcagcgtaatgtcagggctgtattgttgatttatgttcacctttttaagaaatcgccaacatgttttccagagtgattgtaccattttccatttccaaaagctgtgcataagcattccagtcgctccacatcctcagcgacacttggtctgggcggtttttaaatgtcaagtattctgctaggtatggggtcctatcttcgcggtttaagtctgcatttctctaatgggcagtggtgggacacgttgtgtacttgtcacaagtatatctttggtgatgtgtctattcatatcttttgcacattaaaaattttgttgttttctgggcgtggtggctcacacctgtagtcccagcactttgggaggctagacccgcctgggcaacttggcgaaacctcgtctcttcaaagaataaaaaaattagccgggtgtggtgacgcatgcctgtagtcccagcttcttgggaagctgaggtgggaggatcacttgagcccagatgtcgaggcagtgggttgtgatagtgccactgcactccatcctggtgacagagtaggaccctgtctcagaagaaaaaaaaattgttgttacttggatttttaaaatattttctcgatagaagtcctttattaggtatatgatttgcaaaacttagtagtgatttatcttttcatcctctgaccagttttcaaaaagcagaaattcctgaagtccatttatcattatttttcttttatgggtcctgcttttgtgcttatatctaaaaaatcactgcctaaccttgggcatgtggaagcacagttggtttttgtatgttgcccttatatccaacaaccatcctgaatgcgtttgttatggtagcttttctttagtagatttcaccagattttctgcatagataatcatgtcacctgcagataaaaataattttactccttttttcatctggatgccttttatttctttttcttgactgatggcaccggcgagaacttcctcacagtgtcgaccatcagtggtgagaacaaggatccccgcctccttcctgatctcagaagggaggattcgacattgcaccacgaaatgcagtgttcctgttggtctctcacagatgccgtctatcaggctggggaggtttctttctgtcctcgtttgctgagagttttaaatttcatgatgtagtttttccactgcagaaacctaaaagaaaactaagcaaattagaccccaaaacaatagaattaaattgattttcaaatgttaaaccaactctgctcctgatgtcttggtgggcttggtttgctgttttatgaagaattcttgggtccacattcgtgagtgatgttggtgtgtattctcttttatgtcttttcctcttttgggcgtcggggaaggaggtcccctctcttgttctgggtattggtgatctgtcctctctctctggatcagtctgtctagaatttatcagtctcgttggtctttggagaactgcttgtggttttgtttttccttctattgacctctgttcttaggttattcctgtctgtctctggagtagaggaagtgaaaggcagtggtgtatgcactggggccgcgcacgctggggctgagtgcggggggccatgtacgctggggctgagtgcacggggccgtgtatgctggggctgtgtgtgtggggccgtgtatactggggctgtgtgtgtggggccgtgcacgctggggctgagtgcggggggccgtgtacgctggggctgtgtgtgtggggccgtgcacgctgggactgtgtgtgttggccgtgtgcgctggggctgtgtgtgttgggggccgtgtgcgctggggctgtgtgtgttgggggccgtgtacgctggacctgtgtgtgtgtggggccgtgtacgctggggctgtgtgtgttgggggccgtatatgctggggctgtgtgtgtgtggggccgtgcacgctggggctgtgtgtgtgtgtggggccgtgcatgctggagctatctgtgttgggggccgtgtacgttggggctgtgtgtgtatggggccgtgcacactggggctgtgtgtgttgggggccgtgtatgctggggctgtgtgtggggccttgcacgctggggctgagtgcggggggccgtgtatgctggggctctgtgtgttgggggtggggctgtgcacgctggggctgtgtgtgtggggccgtgcacgctagggctgagtgcggggggccgtgtacgctggggctatgtgtgtggggccgtgcaccctggggctgtgtgtggggggccgtgcacgctggggctgtgtgtgtgtggccgtgcacgctggggctgtgtgtgtgtggggccgtgcacgctggggctgtgtgtgtgtggggccgtgcacactggggctgtgtgtgtgggggccgtgcacgctggggctgtgtgtgtgtggggctctgtgtgtggggccgtgcatgctggggctgtgtgtgtgggggccgtgcacgctggggctgtgtttgtgtggggccgggcacgctgaggctgtgtgtgtggggccttgtactctggggctgtgtgtgtgtgtggccgtgcacgctggggctgtgtgtgtgggggggggccgtgcacgctggggctgtgtgtgtgggggctgtgcacgctggggctgtgtatgtgtggggccgtgcacgctggggctgtgtgtgtgggggccgtgcacgctggggctgtgtgtgtggggccgtgcacgctggggctgtgtgtgtggggccgtgcacgctggggctgtgtgtgtgtgggggccgtgcacgctggggctgtgtgtgtggggccgtgcacgctggggctgtgtgtgtggggccgtgcacgctggggctgtgtgtgtgggggccgtgcacgctggggctgtgtgtgtgtggggccgtgcacgctggggctgtgtgtgtgtgtggggccgtgcacgctggggctgtgtgtgtgtgggggggccgtgcacgctggggctgtgtgtgtgggggcatgtatgctggggctgtgtttgcggggggcgtgtacgctggggccattatgttttgtagaaaactgctggccacgccacaagtcaatttgtattttacttagtgaaggtatttttaaagcctgatatgttaaataaaatcatagcattgaactgacaagtctttttaattttcaggagggtttgcatttgtgtatgaagctcaagatgtggggagtggcagagagtatgcattaaaggtaatgaaccatttaacgccttctctggatttctgacgtatgtaaagggactgtctggtgacagtcttttcagggatgcgtccctgttacgtactttgtttccttttacagcctggacatacttgtcccttttgcttctgctgaatctcagcagccttgggcactgcaggagccttggtctccagctttgggcttcacactcctgtggccctgcctgccctgtggcaggggctgtgctgggggtgacctcatggtggggtcatgccctcttggcctccatgtgccaaaataagggctctatgaatacaaggagtttaaaagctgcttgtaaaaaatatttgttgctagcatttctgtaaataggggtcactgtgggagggtctgtactgtgcagttttgtcctgagacgtaagaaggccccatttgctgtcaccacgctgggcaccagggtggccccgcctttgagagtgggcatgagtgggcctgttgtcgtggtctgcacgcctgctgcccccgtgtctgcagagcattgccgctcttccttcttgtctgtctcattttactctggcccatttggggaaaggctcctgcttttgacttttcttgtgtccttgcatcacaaagatcttttgagggtcttgaacccccagcacgtttttacaggggtcagaggtggagacacacgaaacggggggagctgtattagacacattgcattgctctgttgcgtgcttatgtctgagatgatgcatcgggtggagtaggaaggtaaacttgctttcatcttttgtgtgtgctgtttcctgatacagaggctattatccaatgaagaggaaaagaacagagccatcattcaagaagtttgcttcatggtatccttttcctggaaccaggagccagcacggtggctttggcaggcacaggcctgcgtcaagctgtgaccgccagtggccaagaggctgctccgtgacgttgtctttcatgtgttaaaatcggctttttgcttttaccaaacctagttgtaggcgacttctaggaagaagcagttttttctgttttttttttactgccagggtaatagtagaagattcagaagtgttgggaatgaagttgttcctacccaagaggtctccctgcccagtggatgggctggttaccacagggggcccttgcccggcccggccccctcagctcctccggagacctggctgagagccgtgcagatggcctggctcccacaggccccgatgtggcttctcagccgcccctctcgtcccttctcaggctgtcccagcatgactgggcggggcatctcccggcgctgacagaggatctgggggctgcactccctgtccactgccacatgtccctcctgagcctggagtcttcggccctggctgccctcagactctgcctctctttcctctcctagctctgttcactcggagagcccgccggctgcctgagtgtgggttcgggtggacacagccacgccgcagcctccctgcgcacagccccctgagggccctgcctcctcctgccacgcgcgggatggactttggtgtcgctgtggtcaggtgtgtgtggccggtgtgcctgcctttgtccccgccctctcctgcagctcctcctgcctctgtctgcctttctctcggtcgtccactgctctctccctcatcttccgctctgacgtctaaaattgtaagggttcgattcaagtattctgacttcagtgtgttaatattgtctacatttattttgaagtgcacagaactgtggacatggttatgtacgttctcctttaacaagacaactgcagaaaaagctttccggccacccgaacattgtccagttttgttctgcagcgtctataggaaaagaggagtcagacacggggcaggctgagttcctcttgctcacagagctctgtaaaggtaacgtcctgtgaaggccggcttggtgccatctaacccagcagaggccggcttgatgcctcctaacccagctgcatggctgtgaaacatgcccggcatcttctctcaagctgtgttggtcttagcgggaagcgcgggcagctctctgacagtagttctgtgagaggcccacgctgacgcccagtgagcttcccactgtcccggtgggccacctgcatcgtctcctcgtggagctgcgggcagccagagagccgggctcccatcctgcctgtctccagtggcagcacggggtagagcgtggtggccttccgtgagtggtgtttagcaggggtggaggagcgtctgtccttctcagggctctggggtccctgtggggtggagcgtggtggccttccatgagcggtgttgagcagggtggaggagtgctgctgtccgtccttgtcaggggctctggggtcctggcaaggagaagagaggccgcagaggtggacaactccaggtccctctgtgggtgcccagcctcatcagggttgagcccaggaagatggcacaacgactccatggtccgtttgtcaggacaggaagagaggccggtgggttggggtggtgctttcggagagttctaggggcagagtggtctgtgtgagtgactgcgggggatgtcgtgttggtgtcaccggagcccacgctgactggccggagacctggcctgaccctgctgagcctcaggctgtgtctgcaaaggggaaacaagacctgtgcctcagagggcggctccacccccagccctgcctcgtgccgatgccctccagaactcctgtgccaggtgacgaggggaagtcgagcactcggggaggcctcagagctgtggcctggccggtgagggggtggtgacactagtgacccctgcgtctgtcccccaggcagggagagaggggagaggagaggccgggagcagcaggggagactgaggcagggagtcccacagaaggaagcctgtggggagggcacctgtagccgcgtgagatctgtcgtccacaagccagcccctgctcagcagccaggaggagctgttcccgcaggccggctagcgcaggcctgaagggacaggtaggggtggggcagcaggttagcagagagggcagcaggaggggcatgtgtccagaaatggagggcgagcaagggggttctgagctgaggggggacccctgcactgagcagggccctgagcgtcgtggaaggggccctgtgcttagtggaggggggactgcacttagtgggatgggggcatcccgtgctttgtggggggcctgcatttagttgggggggccctgagcttcatggagggggactgcacttagcggggggctctgtactgctgagggctgagggtaggtgtccctgtgctgagctgggggagccctgtgctgagtgagggagggtggactgtggggtgtaagctgcttggatatagcggctgcacctgtcagtgccctgttgggcagggtctcttctctgcagctgtgcctgggaggagctgggtgagacctgactgcctgcgggcccctggctctgcccatgcttctctgcctgggggtcccacctggcccttccttgatgccacacctggcagctggcccaggcccctctgcggccctccagcgcctgttgccagggttgtcctgacgtgggtggcggatgggtgcttgacgtggccgagaagtctcgggggttgggggtggtcagagccgcctgcaggctgaggagatgctgccaggtagccccagttcttcatctgacactgtggggatgtgccgcttgtgtttctcagtgttgtgttctgaaacgtcaaactggcggaaaagttgaaggcagcacaaggggcgtccattgtccacttcctgctcatggggttccccagacttgagcgtgtcccacggcggctttccctctctccattctaaccgtttaaaaataagtcgcagacgtcaagaccagaaagcctcataactctatacagcctgagagaaattccatgatggccactggtgtttgtgcccctgagaagatcctcgcgatttggtgaggctgtgctgtgtggtccgtgctgggcccttcccgtccctgtctctcccatccctgacacgccgctcccggcccctcccgtgcgtccatgcagtccgtgctgggctgtctcccccatccctgacacgtcgcacccggcccttcccgtgcgcataccggggcctcgtcaaggctcctgtgtgtgttcggttgaggtgtctgtcagtcaatctcttgttgttcatggcactgttttctctggatgtccctggactctgacacccgctcctgcgctgcgcttctagggcctcctccagagctgggaggtgctgaaaccagtgggattaagatttgtcgggagcacgcatcacgccgtggggcctcccgctcgtggtgttacttgtcagttttcattataaaagaatacatgctgattgacaaaatacaaataacacagagttaggccaggcacggtggctcacgcctgtaatcctagcactttgggaggccgaggcgggtgcatcgcttgaggtgaggagttcgagactagcctggccaacatggctaaaccccgtctcttttgtattgtaaaaatacaaaaattagccaggcatggtagtgggggcctgtaatcccagctactcgggaggctgaggcaggagagttgcttgaacctgggaggtggaggttgcagtgagccgagactcttgtctcaaaaaaaaccaacaacaacccagagttttatgagtgcttataaaaatgggattttactttatataattttcctttttaaaaaaattgaccgtatcaggcgtattttttttggagacagggtcttgctttgttgcccaagctggagtgcagtgattcatagctcactgtagcttcaaactcctgggctcaagcagtcctcccgccttagcctctggagtagctgggacttcaggtgtgcaccaccatgcccagctaattttaaagagtaaacttttcttagagacagagtctcactatgttgccaggccggtcttgaacacgcgagctcaagcaacacctgtagcactgggattacaggtgttggcccctgtgcctggctaagttttgtattttttgtagagatggtgtcttgctgtgttgcccaggctggtcttgaactcctgggctcaggtgatcctcccaccaaggcctcctgaggcgctgggatcgctggcgagagcaccctgctcaggcctctttccacgtggtgcggtcgcttcgttccatccagaaggctgcttggttttcctggtgtggatgcatcactgcgtcttctgtttgaggcctgcgggctttctcctggagctgcagcctgcctgctgtgtgagccttgccgcaccctctgcccagcacacttggagtaacttggataaaggccagacggggcttcctgtgggtctagtgatggatgttttgctgattatctccctcgtttgtcatttccgagatcagaaagcctttgcgaggggtaaatcttggttctagacattccggctttggaaggcttgagcaggacgggtgtgaaaactgaagctgctcggcgtccagtgtgttcccaggatatgtgcacgagggagcggcggggacagggccggggccagcggctcatcgctgaccctgcatggggtggtgtgggaaggagaggggccgggcccagcccctcaagtcataaatacacgaggcagactaacgcatgcgcgcgccagctcactcctggggactgcctgtctggagcagcatgtgcggctgagagctgagctgcagggctctgtggatggcacagctgtgccaggggagagccgtggcatctctgagaagcgggagggatgtgggctcccccgtgcagctgcaggttcagggctcactggaggaggcctggaggtcgggctccggggatgtgcccggtccctcccatgaggcaacccctccagtgtcctctgagggaagagccacataccggttccccactcagccacatacagaatttttacttttaaaaaccccatttattctcactgagaatgaggcactgaacagggggcccagttaccactgaaacagactcgcccatccatgatggccagcgtagagggcaagtcacccccactctgactccccgggcctggcctcagcctctcccgggtctgttcctctctttctgagcaccccattccttctatgggtgcccctcatttttcctgagagcccccctgtttctcagagggtcagcacaaagcttttgagggagctgtggtgagggctgagagggctttcacctggggttgagggccagggccggcagagctgggggagtgggagggcccctcagctgggtgcaggtgggggcagtgctgggctgtgctggggacacgcaggtgggtccggtctgtgagtcgattctagcgtggcccagcctgagctgtggcaggtcccgaccggctctcacaccatgccttcattgtcagtggaattgagtcggctacacgctctgctgtgtgcaggcatcgggggctcagtgactcgccagacacagctgatccatgcccatggcaggtggttgggtggctcgaagagccagggagagaatgagtcccaggagaagggtgcacgtttaggtggtgtgggcagagttggttccttgggaggtgagcagaaggggcggtctgggaggcatcctggccgcagaagcagcttgtgaggggtcctgaggcagggaggaagggaggccagtgtggctgggagcgcaagctctggcagcgtgggggagaccctgagtgtgggttccgtgggtggtggtactggccttggctctggggctgcaggggtcgtggccttcaggggtgtggagtgggatgagcagagggtgacggtggctgctctgtagagagcagaggcaggagcacggggctgaaaagatggggcacaagatgcagaggccccagggatgatgccacacatggactgtggccagctgaagtgggcaagacccagggtaagatcagggtaggagcaggatgggttgggtctgcacgtctgtgggggctgcataggggtgctggggtgactggcagtgtgaatgcttcagtccccagcaggtcctcagccctgcgtgctgccccggccccacatccctggtttcctggttgggccagggctagggtgcctggaaggtgccagccatggcaggacgggctccctggggtgtgggtcacgcacaggcactgatactgtcgtgaatgtgagaatgatcatttgtcatctgaggacactgagtgttcacttagaggtttgagcacttgtgtatttgtagtcatttctctttgtatccatgttaatgacatgcctggctcggttgccaggacacagatgtgattctcacgttaacggctcgccggctcggctgctgagatgccagtgtggttctcacgttaatggcttgccacctcggctgctgggacgccaatgtagttctcatgttaacggcacgccagctcaactgctgggatgccgatgtggttctcacgttaacggcatgccagctcagctgctgggatgctgacgcggttgttgcttcggtgacgcttgggcgtcttgccccctggcctctgctctgtgtgtgacttgactgtggggctgctccgagcccacccctgccactgggtggtggtcccacacacggggctgaggtgggcatcctcatacctgcagccctttctgcagcagctgaaggaaggaaaggtgggagcggcactcagggtgggcttaactgggactgtggctggaaaaggcagcgtggcctggtgtggtggcgtctgcagtaacgtggcctggggtgtggcggagtccgtagcatggcctggggcatggcagagttcaaagtgtggtgtggcgtctgtaatgtggcccaacgtggcagagtccgtggcatggcctggggcgtggcagagtccgaagcgtggcctggtttggcggagtccgtaacgtggcctggggcgtggcgaagtccgtagcatggcctggggcgtggcggagtccgtagcgtggcatggggcgtggcggagtccgtagcgtggcatggggcgtggcggagtccgtagcatggcatggggcgtggcggagcccctagcgtggcgcggcgtggcagagtctgtagcgtggcctggggccagggagggcagagcactgattgctccacggtgatgatgttaaccgtagagagtcgtgactgcaagttgtccaggttcttggcattttgaacaaactggacagaacgcccagcgaaacaaagaaagaatgaagcaacaaaagaacgaaagcgggaatttattgaaaacaaaagtacactccacggtgtgggggtggcccaagcagcggctcaagggcccagatgcagaatcttctcgggtccaaataccccctagaggtttcccactggccactttgtgctcacctcatgtaaacgaagtggtagcccgccatcagcctaatggttgcagaaagcagccaaccagaaggtcacactcctgtgcaaacatctgattggttacgaaaagcaatcagaagacagggtgaagttacagagttgcaaacgaagaggagatctgcagtcaggcagtttcccatctgccaggcagaaaaggtcaaagggagtcacctctggtcgttttgttacttaggtgtggaaagtcagggttttcctttccatttagttctgggaagtccgcgtgaaacagccctaggttccctgtctccggaccctgttctcctgcctccatgtgagtttcattctcttttagggcagctggtggaatttttgaagaaaatggaatctcgaggccccctttcgtgcgacacggttctgaagatcttctaccagacgtgccgcgccgtgcagcacatgcaccggcagaagccgcccatcatccacagggacctcaaggtagtggctccctccacacgcggctgccaaggcctctgtgtgcgggtcccactcggttaggagccgcccatcatccacagggacctcaaggtagcggctgctgaggcctctgtgtgcgggtcccgctcggttaggagccgcccatcatccacagggacctcaaggtagcggctgctgaggcctctgtgtgcgggtcccgctcggttaggagccgcccatcatccacagggacctcaaggtagtggctccctccacacgcggctgccaaggcctctgtgtgcgggtcccgctcggttaggagccgcccatcatccacagggaccacaaggtcgtggctccctccacacgcggctgccaaggcctctgtgtgcgggtcccgctcggttaggagccgcccatcatccacagggaccacaaggtagtggctccctccacacgcagctgccaaggcctctgtgtgcgggtcccactcggttaggagccgcccatcatccacagggaccacaaggtagtggctccctccacacgcggttcacagcctctgtggggggctcccgctcagttaggatgcaggggtgagagcaggtgaggctacaccatctcacctagaagatgtgcgtgagcctctcaacagtggaagcggatcttccagaaacgttgcttttccagccctgaagaaaattagcatctgtctcacaggcctttgccgacagagatcccgggatggccccgcctccctgctgggggccttcacgcccagttgggggtgctcacagcctggagcttccgtctggaataccaggtccccatgctggatgcttgctcactccagtttccgtggggagctgtggacgagggtgcccgccggtggtgtcagttcaggaccctattcctgctcaccccacactccttcctcggccgcccccccaccgccccccggtggtgtcactataggccccgcactcctgctcaccccacgctccttcctcagtcccctggtggtgtcagttcaggccccgcattcctgctcatcccacgctccttcctcagccccccagtggtgttggcccaggcccccaactcctgctcacccagtgccccttccttggcccctgggcagtcctggaccccacagtgcctccctggttcggcctcttggagctgggaggaagcctggcgctcctctgcctggccctgtctcaggcgctggggtcgggggccggaccccttgcctactcagcttgaggggagctctttgcacttcctgactgtccccccactgcacctccccttccgttcaccggcagactctcctgcccatctctcctgtcaccacgggtttctccgaggcgtggcatcccggggttggcgtgatgtgggcatgagccactggctgcatgtaaaagggccgtcctgcccaccacactgccacacagatgcttctagactggggctgggctcgcgctccatccctgcccaccacaccgccacacaggtggttctgggccggggctgggcctgcgctccgtgctgctgccggcactgcgcggtttccatgtgatgtggctgcttcccacagccccacagaggacactcctgccccgtgggctgtccatgccctgagctgcctgtgttgattttggctggcctggtggggagtatagtctgacgggttgtgattttgccttttcctgatgttaatgaagttgaatgtttgttatagtcattcgggtcttgctcttcagtaaacttccttttgtttcttgcctttttcaaagattttccactggcttgtgtgtttggttcgttggagcagcttgtgtattctcataatctgctaagtgtcgcctgtgctgccggcgtcttctggtttgtggcccagttttcactcctgctgttgtgttttttaaaaaacctaggacgttgtgaggcttctccattatctgtgaagcctgtgcctggcctgcccatggtgggcctcgtcctccgtgctgaggcttttgctgaagaggttttttggggttttttttttttttttttgagtcagtcactctacagcccaggctggagtgcagcggcactgacggggctcactgccgcctcggccgacttggcccaggtgatctcccacctgagcctcctgagtagctgggaccacaggcgcacaccacgcctgcctagtttttgtattttcagtagaaatggggtttcaccatgttgcccaagctggtccagaactcctgagctcgagtgatccacccgcctcagcctctgaaaggggtcgattccaggtgtgagccaccgctcccaggctgccaaagttttaaagccttatcactcccagatacttttgtccatgtctctggggacgtgaggacatttctgttttttttttttttttaggcggagtcttgctctgttgcccaggctggagtgcagtggcacgatctcggctcatgcagcctctgcctcctgggttccagcgattctcctacctcagcctcccgagtagctgggattacaggcatatgccaccacgccgggctaatttttgtacttttagtagagacagggtttcaccatgttgtctaggctggtttcgaactcctgacctcaagtcaccctcccgccttggcctcccacagtgctgggattacaggcgtgagacaccacgcccggccaggacattttttatgtggttttgacaccattatccgcagtgaggtgggaggaaccgagccttgtctcttgccctcctgttctcagccttccctggttttcccaaagtgtggcttctctcagacctcgctaatcgggagcggcgcctctggccacggcttgtggaggatgccctgtgctgtccttggctccccgccactgcccaggccaaggggacgaggaggccagtgaggccccagccccgtggcgtctcttgtggagcacggagctgtgtttcagatcctgctcccagcacccgcctcagctgctcctccagctgctgaaatctacctggcctgtgtccagaggtttcgttcatctggaattgaccttgtgtgacctgaggtgggagctgtatccttgtgtctacctggccctgcaccccgtgcatcagctcatgtctgcccatgcagccacctgggccccgcctcctctccagcgtctgctcgtgggtgcctaggaggcctcagagccccccagctctccccgtgtgccctaggtgggggatccaaggccgtggctctccacgtgtgccccgggtgggaggcccaaggccgtggctctccacgtgtgccctgggtgggggatccaaggccgtggctctccccgtgtgccctgggtgggggatccaaggccgtggctctccctgtgtgccctgggtgggggtgcctaagccgtgggcacccatgctgagctgttcttaactgcacaggctcattccgcctcagcctgcctcagcccacccagggccaaggctctggcaggcagcttccctctgtgtttctctggttagggctgccttttctctacttggctgtacactcctactttatagcacaggtgtcttcacgtagattttgaaaatgggtaagtgtggcctttttcgtttgtcccctgaactcagagggcctagaatgccagggtgtaaggtggccgactggacagatgccccatggcagaagcctgtgggcaccgccatagagcctgctcctgagccccaggccctttcgctcccatggccaccgctgtggagcctgctcctgagccatgccccaggccctttcaccccttctccttcctttcctccctccctctcttccttctgtttcttctttccttgtattttacttttctaaaagtacattctgcccagcacacagggttgcttttgagggaagcttcttcaaggttgcaagcaagacccctggtttccagaaacccatgcgcctgaggccccattctgacggaaggggctgcagggctccatgaggggccagtcctgcccgtggaaggtgctgtttgctgtctgggtggttcttcctgaggagtctctgagtggtggattttctcatgacaccgagaccctcctggttcgcatttttgaagtgtgatgggtcgtgtagcggggcttgagtgtgtattttaaggagaacagaaacagaagggttgaattggtgaagaatccgtgtctgtgagccaggcctgcacttcacagcactggccttgctgctgctccacagcggcgtggcgggaacccaggccagccctgcagcccgcgtgtgttcacctgtggcctccgccgtgggagtctggacggctgtttgcggaggggcaggcagcacacgtggccccactcgcctgccccgtgcgtcgtcctgctgtgcgcacagcttcgtctctgttggctgtagaatgggaacgggcacaggtggccccactcgcctgccctgtgcatcgtcctgctgtgcgcacagcttcgtctctgttggctgtagaatgggaacgggcacacgcgaggggatgggcactcctgggccttcagtggccgtgtgccactgcatctccccgctgtgtgctctgcatccgagccagggtcgctgatcttttctctgggcgtcctgtgaggggagcctcgccccacgctctgcatctgattttcttgctcagccctgtggttcagaggccccggtcctgtatgtggcccgcatctcctcgggggccagtggtggccttaggcttcactgggtttctctggtcggccatgggtggcatgtgtgtccgtttctttcccttgtttatggtgagccatcctgtctgcaccacgtggacagcctgttcagcttgctggtccgcggagcaggcgtcctctctaggactggggtctgcagggcgctgtggttggagagcgtctgcatctaaccctgggcgtccccttgcactcttggatgccacggctctgcactttgctgtcctggggcatggcgggtgctgctccc

SEQ ID NO: 910 - DNA, 15566 bp, Homo sapiens
  source 1..15566: mol_type = other DNA
cgctttgcatctccgcctcccgtgctccgcctccggtcttacgtttcgcccccggcagcgccgacagcggacccaagatggcgaccgagttggagtacgagtctgtgctgtgtgtgaagccagacgtcagcgtctaccggattccgccccgggcctccaaccgcggttacaggtactaaccccgaggcgctgccgcacacgcgtactctgtcgcagatgacagcttccttctcagctagcacgctgtccgtccctgccactactacctctgtattgtcaccttgctagcctccctacctgggttgtcatctccctgaccacctgctccatctccactctggactgtcatcaccatatttctgccgtttttttttttgttttgttttttattaaattaccactctgcgttattccactctgcctctcccgtaatcccctggggcacccatctgctccccatcatgcactttcagtcgtgcttgctccattgccagtcccctttcattcgctcttccctgcgtccttcagcttatcatcctcatcctttctctctctctctctctcacacacacacacacacacacacacacacacacacacacacacctttccagttccccatgcacatttatgggtaatcgtgttgcttgccactctggattatctgatttattttttgtactgttgtcaatttcgtcaccaactgtcatcatccaccattcggtttttccttcagcagttttaccagtgagcaaaggttatgatcataagctttacaacggttgttcattctgtttcttctcattgtattttcttgatgattatatagtattttctgtcttccttccctacctcccttcttaacctctcctacaccttttccctccaaagttgaggcagcatttttctctgttgggcctaactacctaccttgtaatccaatgactgtgaggttctgaggatgctataggacattatgtagttgaaagacagttcactgggcttcatgttaaaccatatgagtgtgagccctttccaagcctcaattttctcatctgtaaaatagaaaaaaaaacctgttagtgatgatacctgcgctcttataatgtgcttaacaagggtttttgggagagtaaaattaaatcatataatggatgtgaaagaatgtaggaaatgcaataaagcagttacaaatactatttgtttgttcttttttttttttttttttttttttttgagatgtagtctcactttgttgcccaggccggagcgcaatggctcaatctcagctcactgcaacctccgcctcctgggttcaagcgattctcctgcttcagcttcctgaatagttgggattacacgcatgcaccaccacacctggctaatttttgtattttgagtagagatggggtttcaccaagttggccaggctggtcttgaactcctgaccttgtgatctgcccaccttggcctcccatagtactgggattacaggcgtgacaccacgcccagccgtcgtttttttttttttttttttttgttagagaggcagggtctcgttctatcatccaggctggagtgcaagtggtgcaatcacagctcacggcagctgtgtactcctgggcacaagggatcctcctacctcagcctcccaagttgctagggctacaggcattgcctcacaatgcctggctaatttttaaatttttttgtgtagacaggatcttgatatatttcccaggctggtctcgaactcctggccttaagtgattctcctgccacagcctcccaaagtgttgaaattacaggtgtgggccactgcacctggccaagatactgttcttattcttctctctgacccacatcatcattgtgatttttcctcctggcatttatcattaccttggctgaaaagttaccctctccttatgtctgttattttgccccttactggcgttttattcatcatgaatcaatatttttatgcttgctgacctgtgcgctgggccctgtgggttgcacctttggcaaagaggtagcagttctgtttttaataagcttttagttggaccccaaactgaccctaagtagaaatcaacatgcttttagatggtagttacaggtactatatgagtcacttaaacatcaccttctttgggaggccctatgtgacccttccattctggtttagatatgcaccctgtgtgcttccatagcacctttttctttttcttttttactttaagttctgggatacatgtgcagaatgtgcaggtttgttacataggtatgcatgtgccatggtggtttgctgcacctatcaacctgtcatcctcgcccctcccccgagaggccccagtgtgtgttgttcccctccctgtgcccatgcgttctcactgttcaactcccacttgtgagtgagaacatgtggtgtttggttttctgttcctgcatagcactttattcttatctctattccagggctcttcattttgtattgtaatggattacagtggattgtacaatggattgtttagtctccttttttctccaggctagactgtgaacaacttgagatctttttaactttatattcccagggtctagcacagtatctggtacactttgggcaccctgtaaatgttgactgaaagaagaaatcagtagattacacagagaaacctaatcacataaagtggcattgattgaactgttaaataaggtcaaatagctcattacttccaactttaggagttaagactcctaaaggatatgatacatattgaagtgggattatattctttttcttgaagtttttttttttttgagatggagtctggctgtgttgcccaggctggagtgcgctggcgcaatctcagctcgccacaacctccgcctccccggttcaagtgattttcctgcctcagcctcccaagtagctgggactacaggcacgtgccactatgcccagctaatttttgtatatttagtagagacggggtttcactgtgttggccaggctggtctcaaactcttgacctcgtgatccgcctgccttggcctcccaaagtgctgggattacaggcgtgagccaccgcacccggcctacttcaagctttttaaaacacctcccctctcacccatcttctctatcttcacttcttagttttccacaacctttatacttacatcagttaactgcactgagccattaaagcagtttcttaattttcctctttttcctgttatccttctgtgttttccatgtctactggcattttttatcctccaagaggcaccttatcatcaatcacttttttagtacagcacatgaagagagcggaattaagtttgaataacgatatttatttgctgggttacctttggcaaatcaccacttttgaatgttagtttcttcatttgtaaaaatgactataacaatacttaccttgtaggatcctctcacttaatcttctttttttttttttttttttttttttttttgttgttgagacagagtctcgctctgtcacccaggctggcgtacaatggtgtgatcatggctcactgcaatctgtgcctcccagattcaactgattctcgtgcctcagcctcctgagtagttgagattacagatgtgcactgccatgcttggctaattttttgtatttttagtagagatggggtttcaccatgttggccaggctggtcttgaactcctggcctcaggcaatccacccacctcaacctcccaaagtgctgggattacaggcatgagccactgcgcctggccctttcacttaattttcacgagaatgggcataatgcctggcacataataaatgcttgataaatgctggttttctttttgtttgcataatctttcttatttaccagaacccactttatattataagcaggatttattctctaggctgacattaaaggacaaactgggctttttagaaagcaggaggaatttttcctttgagtgactggtaagattagagagaataattgattttaattcacctagtgtaagctgttcgttcccagactttcactgaccagacttctagactatgggaaggaaaatttgggttgacaagaaacttatcaggctgagtgcggtggctcatatctgtaatcccaggactttgggaggccgaggcgcacggatcacttaaggtcaggagttccagaccagcctggccaacatggtgaaaccccgtctctacaaaaatacaaaaaacttagccagccgtggtggcgcacacctgtagtcccagctacctgggaggctgaggcagtagaattgtttgaacccgggaggcggaggttgcaatgagctgagatcatgccactgctctccagcctaggcgacagagcaggactgcgtctcaaaacaaacaaaaaggaaacttacaaatgcttagaaaacaatctgggtgcggtggctcactcctgtaatcccagcacttggggaggccaaggcgggcggatttcctgaagtcaggagtttgagaccagcctggccaacttggtggaaccccgtctttactaaaaatacaaaagaaattagctgggcatggtggcctgtgcctgtaatctcagctactcaggaggctgaggcaagagaattgcttgaacccgaggttgcagttagccaagatcgcgccattgcactccagcctgggtggaagagtgagactctattacacacacacacacacacacacacacacacacaaataaataaatggttagaaaacagttttccaacctataaaactatttttttttaaaaaaaaattcttcactaccctcttcccttagctaaatcaatattaacctctataatgcgtttcagtgtaatgaaagaataatggactttaaagttaggcattattacttactgtgttatcctttccatcatttagagagaaagagaggtatgacaggcttttcatgcctatttcacatatctactataaggacataataagatgtacatttggaatcttactgtgaatcatcatagtggttttttatttatatatatataaagttttattactaaggtaaatgaaaatttgtaaggtaagttaaaagtattgtcagaggacaagcaaaatcaagagttctttagattaggtcttggagtaggaaaggaactaaggctcaaggctgagggaatctgctgccatgaatatccatttacttacagaatttgttaagtatcggacactagatacacaagagaaataaggaactcatccaagaaaaacacatttaatagacttgttcctaattttttttttttttttttagagacagggtctcaccctgttgctcaggctggagtgcagtggggcgatcatagctcactgcaacctcaaattcttaggctcaggcagtcctcctgccttggcctcccaaagtgctggttataggcgtgagccacggtgcctggctgttcctaatatttttaatagcccatttacatgagctcttggtggcatgattataataagtaataactcattaatataatagatgaggaactttagagctctctaatctggatcagatttaggtacttgagggtctttgagggcagggaatcaagagggaagagaatgggaaggacttattttacagatcctgttcaaaacctgtgctaattttcactttcattttcctcctttcagctttttacctctcatcttgttaaactcattcttgttcaaatataccttgtggttgcttttttagtctttaagtattagtctttggtttcttagaagatgaattattaataacttttactttgctaatctgttttccatactcctggcaaaacaaatcacaaatacaatgttttgtaaaattcatcataaataatcttagttgttgttcaagttgattataacacgttttataaatttctgatgttttcatggccgtttgtatctccagcccagatgtctttcttgaactcgtctcatatattttactgcctactctacatctcttgaaaatctactagacatctcaaactcagcatatttaaaactgaatccctgatccttcttcctagatgtgttccttctcatctcaataattggcaactctttgctcaggctaaacaccttggagttgtccttggcttctatcccctatctaatccattagaaaatcctgctgcttttaccctaaatatatccttctcttctatcccatatctaatccattagaaaatcctgctacttttaccctaaatatatccagaatatagccacttctgctaccattgtgacttttctagattactgcagtagtctcttagctaatccccctgcttcagtcctcttatcccaacagcttttctccagacagcagatgtagtaatctttttagaatataagggagatcatgtcacacctctgcttaaaatttgtaatagctcttttttcactcagagtgaaagctgaagttgttactatgacccacaaggccctgcgtgatctggccgtctgttacctctcccaccttgtctcttcctctgttctaaccacagtgcttccttgttgtctctcaaacatgccaggcatgcccccaccgtagcacctttgggctagctgttccttatgtctagaatgcttttcccccagacatctgtatggataactctcttgcttcacattctagctcacatttcaccttaatgagacctaccccaaccaccctcttgaatgctacaacttgttcattctcccactgtcttcttaatcttcctaatttgcctctacattttctttttaccttagaactcaccactttctaagatactaattatgctgtttattatgtttcttttttattttctatcttctgttaggatgtaagcctcatgagggttggaatctttgttttggttgctgttgtatcctaagcatctggaacagtgatgcatctgtcctaataagtactgtataaatattgattgaattcagtgaaagatagtatatttactgatttgggagggctcccattacctaggatatttaatgtagtagactttgttgttatctgattagtaaagcatggttatctagtataccatctatagtttgaaaatagcatcgttatgagaaattttatttatttctttatttgagaccaagtctcgttctgtcgcccaggctggagagcggtggcgcagtctcggctcactgcagcctccacctcccaggttcagttgattctgcctcagcctcccaagggatttcaggcgcacgccaccataaccagctaatttttgtatttttagaagacggggtttcaccgtgttggccagactggtctcaaactcctgacctcaagtgatccacccaccttggcctcccaaagtgctgggattacaggcttgagccaccatgctcggccagaattttattttttattgcttttattcgtgcttttccatctttttaatgatgcttattggactccaaagtcctcaagtagtagcattgtcttttacttgctttggactgtatgtaacatgaggcatctaaatagatcatgaattattcttgttgattaataggtagaaagaataggcaatccaggatagggaaatagaaatacagtcaaagattgtgggtgggcgttagtaaattaaggacatgtgcctgaggcttcctcttttcctgtcctagggcctctgactggaaattagaccagcctgattggactggtcgcctccgaatcacttcaaaagggaagactgcctatatcaaactcgaggataaagtttcaggtaatctttgcgggtgaccctctaacattaagaatattaatttggtgtgcttttataagtaccttcaatttggggactggaatggaaatactacttgttaattggggttctggattttggcttgctttactcaaaaaagtctttctcttatctgtcaggggagctctttgctcaggcaccagtagaacaatatcctggtattgctgtggagacggtgacagattctagccgctactttgtaatccggatccaggatggtactggtaagagaactgggattttgagtggaacgaagttaggaaaacaggtgaatgcacagccatgaaaagtgtttccgattgcatttatctttctttggtttacttcattttttcttccctttctctaaagttgctctagttgctaaaggaaaagtattaacatgttatttgtaatagataagcacgagttcaagatgtggtaattcatatgtagacttaaataaatgaaaaacacatatctaacaaatgaattaacacatttggcactttaggaggccgaggtgggtggatcacctgaggtcaggagtttgaggccagcctgaccaatatgatgaaaccctgtcgctactgaaaataaaaaattagccaggcgtggtggcaggtgcctgtaatcccggctactcgggtggctgagacaggagaatcacttgaattggggaagtggaggttgccgagatcacgccattgcactccagcctgggcaacaagagcaaaactccatctcaaaaaaaaaaaaaagaatgaacactttttgcccgtttattgttcgtggtagtttttggtgggactatcttgaatcatcttacgtgtggggcagtcattcttactcttttctccatggtctataacagaggttggcaaacagacaaataataaatgttttaggttttgcaggtcaggtggcctctgttgcaactactcagttttgctgttgtagtgtgaaatcactgtagaaaatatgtaaacacattgataccactatgttccatgaaacttcttctacaaaaccaggctatggcaggataaagcccatgggctctatgtagtttatcgactcttggtctatgagaagatatttcacattcagactttgtctagttagggtgactgttatattttcattgggcaaaatttgccatagagcagcagtcctcaacctttttggcaccagggacccgttttgtggaagacagttttccacagaccggcattaggggatggtttcaggatgattcaagtgcatcacatttattgtacactttatttctattattattacattgtaatgtataatgaaataattatacaactcactataatgtagaatcagcgggagccttgggcttgttttcctgcaactagacgggggtgatgggagacagtgacagatcatcaggcatcagattctcatagggagctcataacctagatccctcacatgtgcagttcacagtagggttcacacccctctgagaatctaatgctgccactgatctgacaggaggcggagctcaggtggtcatgcaagtgacggggagcggctgtaaatacaatgaagctttgctctctcgtgtgcaactcacctcctgctgcatggcctggtttctaacaggccacagactggtgccgggggttgggggctcctgccatagaggatacttcctagtcgagtcttcctacgttttccacagggcgcagtgctttcattggcattggcttcacagatcggggagatgccttcgactttaatgtctccttgcaggatcacttcaagtgagtgaagcttgtccttagttacgaggctgaatgcttataggaatgctgcttctcacatgaatgggcagtatctcttttcctcctggtttctttgtttcttaaactatttcattgtgaatataaatctccccattcacttttgtttccttaggtcatctttgtatctattctgtttcctttccttatagcctgcaatatatttcagatcccttgtgcagtagtttgaaatgatgctctgtcgaatttgccccgtcttttaggtggtagagggaggcctatggtaacagcagggctttatgtggggagtcgtgtgccactcttgttaccttatgtagctgacatgttttgtgacttttgcaacatttctttagcccacttgattttggtgcagctgtggttgacagcactgtgcacactgtcagcttcctacctcaagagcaagcatatctctccttttctgccttaggactctctgaagttatagaaagctaagagcaagctttaacttggaaagactaagaaactaacaccccctcaggagcagccctcaactgtggggaatgggaattggtggctaaataccatccttctggaaggggcaattctaatacgtattccgtgagatttctcagagagtccccagtggaattgaaccccagttgttttctttcttggcttttttcccttctgtttctcactcttttttatctctcactgtgttttctggaatctcatttcataaaagtaaatacacccaaatttgtatgtcagactctgctttcaggaaatctcaaactaagataacttgctgtgttcccaaaggtgggtaaagcaggaatctgagatttccaaggaatctcaagaaatggatgctcgtcctaagttggatctgggcttcaaggaaggacaaaccatcaagttgtgtatcggggtgagtatggtttttaaaaattttgttttcctgtgcttccataagcctatgacatctttctcttgctcttctttttttcttttgtagaacattacaaacaagaaaggaggtgcttctaagcccaggactgcaaggggtgggggtctgagcttactcccacccccgccaggaggcaaagtcactattcccccaccatcctcctcagttgccatcagcaatcatgtcaccccaccacccattccgaaatctaaccatggaggcagtgatgcaggtaaatctagtacttctaattttgagaaatccaatcttatgttttaattaagcaacacctgtttgtcaaggagagttaatgtttttgctatgaaatagctcatggtactgacaaggtgattctgtcagcttctagcaaggaatcaaagcttttctagtgaactaagagtcatagtatctcataggttctttggcagaaaatatttgcttattaaaatgacaatttccttcatttttttcttggttagatgcttataagcttttgagtcagatggaccaagattttggtcatggctctgctactttatatttgaatgtgcttggtaaacattacttaagttttttgagtttcaattgccttatctacaaactggagatgtaaaaccaccccagcggggaccttggctcatgcctgtaatcccagcactttgggaggctgaggtgggtggattgcttaagcttaggagtttgagatcagcctgggcaacatgatgaaatcccatctctacaaaaaaaatacaaacattagttggacgtggtggtgcacgcctgtagacccagctatttgggaggctgaggtgggaggatggcttgagtctgggaggctgcagtgaaccatgattgtgccactgtactccagtgtgggtgacagagtgggaccttgtctcataaaaaaacaaagaaacaaacaaaaataaataaataaataaatagataaaataaaataattaccaccccaaggtcatgagggttaaatgattgacagcacctagcatagcacttggaacatagtaggcatttagtaaatgttattaaactttcccatttcttcacaagagcaattgggagaaaagaagatatctaggtttgtccatacactttcattctttctttctgtttggtgggagaaagaataaatatggttatatcttctcatttgaaaaatgagagcattggaactgagaaaagaatttttctgagattagagaactgtgtcttagaatctgagaattttaacttaatgtattggacagtgcagataatttgttgaattgattactaagggtaagctttctctttctggaatttttgaggtgaaaatattatagcctgcttcttttggtaagtgttgccagaagccactggggatagtatctaagattttttttaaattaaattattattttgagataatcgtagattaacatgcagttgtaagaaataatatgaagagatcctgtttacccttttcccagtttccctcaattggtaatattttgtggaactattgtcaagtatcacaaatgaaaaattgatgttgataccactttctcatcttactcagcttacaccattttacatgttctcatctgtgtatatttgtgtggatctgtatatttagttctatgcaggattttttgttattttttgagatagggtctcacactgttgcccaggctagagtacagtggtgcagtcatagctcactgcagcctcaaactcctgggctcaagagatccttctgcgtcagcctcccaaacatctgggactacaggtgcacactgccacaccaagctaattttttaatttttgtagcaacagagtctcactacgttgcccaggctggccttgaacttctggacttcagtgatcctcctgccttggccccctaaaatgctgggattacaggtgtgagccactgcatctggccagttctttgcagttttgtcatgtgtaggttcatggatccaccatcatttcaggttatagaacagtttaatcactacaaagatcccctgtgtcaaccttacacaaccacacccatctccctctcatcctttcttcccccattcctaacgcttggcaatcaccagtctgttctccatctttataattttgtcacttcaggaatgttctatgaaaggaatcatacagcatgtaacctttgggacaggcttttcccactcagcataattcccttgagattcattcaagttgtgtgtcaatagtctgtttctttttattgctgaatagtattccatggtatggatataccagtgtgtgtaactattgcccatggaatgacatctaggttgtttacagtttttgaccattatgaataaagctgccgtggcatttgtatacagatttttgtgcaaacataaattctcatctccaagattttttttttttttttttttttttgagacggagtctcgctctgtcgcccaggccggactgcggactgcagtggcgcaatctcggctcactgcaagctccgcttcccgggttcacgccattctcctgcctcagcctcccgagtagctgggactacaggcgcccgccaccgcgcccggctaattttttgtatttttagtagagacggggtttcaccttgttagccaggatggtctcgatctcctgacctcatgatccacccgcctcggcctcccaaagtgctgggattacaggcgtgagccaccgcgcccggcccttccaagattttgattatgtttttcttttttcttttcttaccttgtgtttagatatccttttagatttggattctcctgctcctgtcacgacaccagcaccaactccagtttctgtaagcaatgacttgtggggagacttcagcactgcctccaggtaatgggcatagtgaaactagcatactctcaatcagggtgtaggagatatgtacagtcaattgaaatctttgatctggagaagcaatggatatgcaggtcacatagagtcttttggaagagttctagtgaaggaaatatagtagtgctgggaatggggggacaaaaaagctgtaggatgaggtttgagtgggatatttcaggcctttgtaagtagaattgccatgaagtgtggttttggaaattctaggcagtgatttcttagaaactattaagtaaagaatggagttgttatcctaatattatgtctctggctttctctgttctcctgtcttgcagctctgttccaaaccaggcaccacagccatccaactgggtccagttctgaatggcattggcaggacattaaggacagacttgaggaataaaaatgaccttgagggcaccaatctgtgagggaagttaggaacccatttcctccccagaaccagaatgactggacaatctttttcatagcttctccatcacattcaagctggtttatgtcactcccctgtgttgttacttgtacagccaagaaagtatctgttatctcctgcgtagtaccaaggtaggggactagtggatcttatcatagttttggctgactatgcagggcttaaaaggccagcgtctgtttgagggggaatgacctctaacatctgtaaaatttgtctcatcttttaatttctttaacttatttcaaaatcatctcatgacccttgtgtgcctctttgtgaagccctatttagcaatttcaggggagtcaaaaaccttgcaacttccttctccactaacccaggactaaaaatggacaggctgacctcagtgtttacaaattcagaattttgataggggtagatatggagaaagacctatttcctgggtctctgctgtgtagtctccttcaggcttattgtgctcagtgaacatccagtgctgggtgcagctccatcaccctcttgtgtgtttacatgtctctttctatgataagagggttgtgttggtggcacctccactactcttttctgtttgttgagtttgaattgtgttaacatctttgatcagtgggtgtatctgtaatgaaggaggttcaagaggctgtgctttccaagtgatagtctataggagtgtttaatttcttgcagctccatctggttgctgcatttgaagcatggcattaatttgtatttgccctgttctttgacctaaagttgaagggtttagagtttttaacctgatctgtagagcagagaggttgaaagcacttaactcttgtttagtatcctcattgccttgctgcctgggtatctggcccctttccataaacatttcttttcagttcatgtagttctttaatagaaagctgctattatgtatattgtcatttgtgaaggaagttggagagtcacagctttactgtgacaggttttgcccaaggctttgatacctgtcacccagggtatcttaaaagcaagttgttctcccactactttcctttccctctgccctgccattcctattacaatgctgtgaaaaaagttctgcttcttaggtgaatgggtactttctattttgtttctaaacgagcaattttgaggatgaaatgggaagatatcattgcttcctttttgcacctattgggtatgtacactctggccgaagggagtccttatgtttagtttcaaaatatattactttcctggattctcttcttcactttttctgactttgggtccattttcttttcattgcctccttttccaggcagctctattcttgcagagccatagcaggacatgttaaaattccaatagaaaacactaaaaggaaagtctgtggaatcactagtgactaaatactgggaacctattttctcaatcttcctccatgttgtgttctttgtattcttgagatgataatatattatgtatttgaattcctgaaaaatggaaaatgtttaagatatatgtatataaagtgtatgctgtattggtgcaataatggtaattaaaaatatgaaaaaagtgtctctt

SEQ ID NO: 911 - DNA, 3673 bp, Homo sapiens
  source 1..3673: mol_type = other DNA
cacagcggtcacgtgacatggccccggggagccgaggtgagcgttccagcttccggagccggagggggcccggcgtacccagcccccagcccgacgtgaccatgctgtcccgcctcctaaaagaacaccaggccaagcagaatgaacgcaaggagctgcagggtgagccaaatatcctgtcggccgttttctcttcggccgcggcctagcttcagcccggagcctggatctcgagtaactaaccatatccagggaaagacgccagctagcgggcaacgggcatgggggagagggaatttcagagaggctttttttgaaactcctttcccttgccaactggctccggtcccttgggcaatactccggtcccctcggcaacgcccccaatccccgacctgccgcaccttagccccgcccctgccccggagcgccctgcctattggccctgggagcctctcgtcctggcggcgggaaggagcgactctggagggaggagggtgtggggaaccccccagagatgggcttcttggaggcctgaaaccaccggaacggaggtggggcacttgtttcctgagtccgggctggaaatctcggagttaccgattctgcggccgagtagtggagaaagagtgcctgggagtcaggagtcctgggcgctgccgctgacttcctggcgtccctgagtgagtccatttccctcccagggtaccagtttcctcatctctaaaatgaaagaggttgcgctatgttttgcaaggtccttttcagctccggcattcagagattagttaagaaatttcggcaactagcagaatagtaatggatgggtagggaacctttaacactacccctcaaaaaaccaagtctcccctccaattccttttccccctctccccagaaaagaggaggcgagaggctatcactgcagcgacctgcctgacagaagctttggtggatcacctcaatgtggggtatggacctcttatcaacatcagtttcctccttccccaccccgcccaagtttaggcactggccagtctggccctcaaatagctgttgaaggggtgggatgttccactaattcccctatcctaccccgcccctcccagctctttgtagagcaacttgagtcaactctgagtcctagcactgggcaagggaggaacagctgccgtggttagagaagcagccagatttccccttccccacgttaacttccctggcatttacaacttgatgccatctgcccacctcccttcacccttccaagtccagctgtcacttcagcaggagggagagcaccctccttcattacagcttaccaccctctcctctgcctcccaccctctggcaagcctggggagcagctggcaggaaagagatggcagagctggtggtggtgagagtagaacctgttccgggagctatggcagagccaggctgtctcttaccttcctattgggtctctagggaccacaccctgccccagccctaaatgagaatgcaagtaacagccaaagacttgggaaaaagcaaagaacattgtctcttgaccctaagtgacccagaagcgtgcagagatgatgatttgctagtctgcctattggaagaaaggcagtatggtaccttccaccccaggtcaagtagaacagctcggtgtgaatccagagactgagtcatccaagtgagccatgcaggggctggggtcatctttgttactcatcttgggggaaggttgagagaaagaaagttgtggctggggcctctgatctcccttctctccaggcagctctctttactcagtgtgaatatagaagcaggtggtcaatggggaaaaccagaagttcaggaattctcaggggagtctgtttcagttcctacccgacccttgacagtgacccagctgtctcccaaaaagaaggaacagggtctgccctcccatttcctccctcccacattggcacctcctgggctctgctgtgcccatcatttgtgagattggcccaggcctttccctcttcttttcctttgctagatgccaccccactttcagcttagagggcagctaagccaaagccagattagaaagggttttgtgttgctgcccacgcctcctctcattccccggaaaggaaaacaaaggctcagtctatcttggcccctgtcaggtgtcctgcccactccctcagcccccaccaaccccttccccgctccagcccccacacattccagtgggtgggggcaccggatgtggaatctcctggctgagtagagctctggggtgggaagtgaaaaattcaacagccaataaaggagaacaattattgcaggggttggggagggcaaaaaacactggcagaaggttggggacaccaaccccatggtagtaatggtaaccacagcccataccttgattgaaaagaaaaactagtgcctaaggcagaagggagggagagcatgtgtgtgtgtgtgtgtgtgtgtgtttgtgtgtgttccttgatctgtgtgggcaaaagcgaaggcttgggagagcaactgagagccgagaagaaacccctgggataccctcttttgacccagggttcctggggagggggtttgtactcccatcctaacccggcttcagggaggggcccaatttccctctccaacttcttgcatagatccctaggcttccaatcactgccagatgtgttcctcctgctggattttcccagtttttccatgcccctttttccctcccagctttttcctcagggatatcaccccaggttttccctcccttcccccactcagctgcaggaactcctttttggggtttggagctggtatgtttctagtcagctccgagcttggctctcctgggaatcctgggagtgaaaggaaggagctgggtttatttgcatgtactggtagtcatttgcatcacatccaaaaatggccaaaattatgagccctgattcttggctgaactcccactgctgcaatggaatattagtcccggagaccacccccaactagctggagctgatctcctccctcctccaaccccccagtgtggcccaggcctacatgaaccagagaaagctggaccatgaggtgaagaccctacaggtccaggctgcccaatttgccaagcagacaggccagtggatcggaatggtggagaacttcaaccaggcactcaaggtgggccatactccctacctcaccaccccaatcctgggcccccattggctgcctccagtcaggttacctcaggtttaggttaaggaggaagtagggtggtcccagaaaccccatctatagccccagtgtcagaaaaggtagagaaagaaagaaaagcagttggtgggtccaagtaaagccttttccaggagatgaataaaacgtattccccagactggaagccatactctacccattctgattcctgggctcccacctcctctcccccttcccaggaaattggggatgtggagaactgggctcggagcatcgagctggacatgcgcaccattgccactgcactggaatatgtctacaaagggcagctgcagtctgccccttcctagcccctgttccctcccccaaccctatccctcctacctcacccgcagggggaaggagggaggctgacaagccttgaataaaacacaagcctccgtttctc

SEQ ID NO: 912 - DNA, 27394 bp, Homo sapiens
  source 1..27394: mol_type = other DNA
aggctttcgtcggcctccgccaacgcgccaccagttagaggcagggagtacctctccgagcggaagggccggcgtctccgaagcgcgggagcctccaaatcgcgcccttctgctctcacgagatctggtgacgtcagcgctcgctgccatcttggactcgggctgagtaataaattccccccgcaccgaaacgcggtctttctctagacgcgtcttgctgggagagtgtccgttgcttcccgtccgtgtcgcggccctgcggttggcggcctcctcgtggagcggagcaagggtaggccccacgtggcgtctttgcccggctccaagatggacggcagcggggactgggaggctgctctgggggagcacgtggcgccctgctcgcctgctcccggggcagctgggatggtggcggagtccggaggcctcctgccgccgtcgggcagggaggccggcggaggcggggccgtggccgcccccgagaggcgcccaggcggcggcggcggcggcccagcttcttctttcctcgcacagccaggcggcccctgctcgagtcccgcgtcgccatggccgcggttcccgagttgctgcagcagcaggaggaggaccgcagcaaggtgaggtcctcccagcctcagactcctgggcgggcggccctgcgagctccggggtcgctgcattctttcccttgcgcgtccataggccgtggctgctcgccgccatccccagcgcgggaagcacccgtgagacccgggcggcccctctccctggtcttcactgaaggctgccccggggaatccctgtggatgtcccggattctattaggacagaaccagagacgcgggaccttagccccagctcaggcgccggtgccgagcggacttggagagatgatctctggagaccccggaatgttctttttaaaactttcctcggcttcgtggtgaccagtaggtgaacgtgaaattgacttaacatgcgacagaccagtttggtttgttgcccccaaaataccctccttccccccaccttttactgagaagacttttttggggggggggcccaaacaacttgggaaattgcatcaagcgtccgaacatgctgcttacaactttagaaacgcaaaatgcgttgttgtgggagttgtgtaatttttagtaggtgctcaaatacttgctgaacttggtgtctatttttaagtcttgcccattgatgtaaactgtccctaggtcacgtgtatcttgaggtctaaaagattatttatgcaataaattgaaattcccatagccaattaaagattcagacgagcctccactctttttcattggttctttaaatttgcctcggtagctttgcgatgcatggtttgcgagcaacctttcttgcagaatcgtcaacgtaagtttttctgaccgatgaaaaagaacctctaaaaatacaaggctctcttaaaatgtaatttggagccgtcttaacttacacatttcttgagaagttaaaggcacctccatagagaaacttgttcatctagtaagtaaataccagagtttcaaagcggctggattgttccaacaagggtatcattgcattaattattaaaatagagctttctatacaggagggtgttgtttagagtggttttttttttgaaagttctttattactaaaacaaagtggaaacttgagaccacgattctttgtaaaacattataaaggtacttttctccataaagggtagataatggattgggattttggtagcattttattttttctttctttctggtacattcttttagctgtcttgattcggagtcagctaggtaaaaggactcaattgcttcaccccactctctggtagtacagtatattgcagctggtttttaaaatgacttccaccaccctgatcctccagcaaaattggagaatggttatgaaggccatttcctgcctgttttagaggctacagaaactgtccgtatctgtagcgaagagagttacatgacattgttttcctttttacattacaggaataaagagacaataaaaataaataattaccctgacgcgtggctttatttttgttttctgatctctgctgatgctgataacctgctgtggtctggcctagatggtgttatggttaactgaaagggagtttggggcaagtatgaaataatgggaaactaagtcttgggcaactttttgccataatacaatttcggtagtcaactgaaatgttttgtgtgttacctgaaatgtgtgttacttaaattgtttaaatgccctcctgataatttactttggtttggaattctccctaaggatggagttaattaagactcactaaggtagggggacatacttgattcttcaggattttgaattctagcccaatactcattttggccaattcagcaaaactgaaagggaatactgtgtcagtcgtgtctggtagccagacactggcattttgttacattctttagccgagggtgttggggtttgccttcttcctcagaaaatagttcaggggaagagatgcatggttaatttggttcctaactggtcctctatttactggtttttgattttttttttttttttgagacggagtctcgctctgtcgtccaggctggagcgcaatggctcgatctcagctcactgcaacttccgctttctgggttcaagcgattctcctgcctcagcctctcaagtagctgggattacagtcgctcaccgccatgcccggctaatttttgtatttttgtggagaccgggtttcaccatgttggccaggctggtatttgaactcgaccttcgcagcctagtgctatttttaactagggggttctccttccttgacagtaacaacttggccttaacttactgcttggttacagggactttggtgaatgatatctgtcctcttacctactcaggagtgtttgtagactaagtactgctgctctggtttcgtgtttaactggtgtggaagctgcctctaggggtatttttgttctccattagctagaatggagtgcagttggttagtataggaacaatcctgaactttgaccaataccatagcaagtccaaacttacaaactttgtggactgaagctttatgctacccttgcaactattttctaagttgaggaagtatgacgtatcaagcttcccacgccttagttctagttcagtaacttgtactcggtgtcttaagatccccatttgtgaatactctaaaaggtcattatctgttcacattattttggccataggtagaaatggccaagaggcttttttttttttttttttgagacagggtctggctctgtcacccaggcgggagtgcagtgtcacgatcacaactcactgcagcctcgacctggggagctcaggtgatcacccccacctcagcctcctgagtagctggggctacaggcacacaccagcatgcccacctaatttttgtattttttggtagagatggggtttcaccatccagttcaacatgccgggattacaggcatgagccattgtgcttggccaaggctgttaagttttctagatttgtttctgagctgtaaactcctcattcggtgagacctagtggtcatctaaactagaggttgagtttaaaattcagtttctcaacctggggagcactgttgacattttagcctgatcacttttgttgaggagtgccctctgggttgtaggatgtgaagcaactgtttttggcctctgctaggacgcggcctcctcccctcccatggtgataagaagtcaaaattgcctgtttgagaatcactggtttaaacggacttccttctaaaatggtgtgatatgggtggggtcaggttgtgttacagaagctagtctttgtgtgcttgttgcgaatttttcaggttttctattaatcttgcctaaggaaataacatgccatgtaaaaattagcattgttggatatctttgtgagaataaagcttttccactaatactgaggaaccttaacaaaaggtggtgaaagatggttttcttcagcaggttctgggtacttgagggttgcaaagggagggcttcgtgtttgtgtttgtgagtgtaggctttggacactggaaacttacctgagtttcttgtgctgcagaggggaacttggtttaaaattctgctgtttcagcatttttctgtctttattatcagggtcttgatgctcgagcaaattaggtgagaacagatctataggttagtaccctgaatgtcttaaatagcccgtggtcacaacagtgtgtagtgaagttaaatagtatttaaggaaacagtctaacttttaatgatcccaatagtgagaaacggctattaaagtgtaaattaagtttctctgcatgatctaactttccaaaaagtggcttcttcacccttaatacctgttttctgattggccattgaggtactctgacaagatctcctaaaagagatcttcacaccttcacatgctgcctaaaggcaaaccatagtaccccaggaggagtaagttgcagtttgaggggcagccaacacttaagtttaaaaatgggggtccttggcttgactcttctttttacattttggcataacttttttaggcattcctatatggtctggagagaaaactaattttctgcctgaaaagctcagtttctgaagggcacactcctaagcattctagtcatggtaaatggtgaggaatacaaatccagatggctcccttgtcagggttttcactttttctttcaagagcaccgcagagctaggacattgtgctgttagatacttggtagctggtgggtgataaaatgttggacttcttccctcacccttcctatatctttcatgaattttgttttgaattcttgtatttattttgtttagaattctttttctcaagacagtcttgctgtgttgcccaagctggtatcgaactcctgagctcaggccatcttcctgcactcagcctcctgaatgggcccctggtctgagtattggaatatttacatctgaatgatttgggaaatttgctgtacctcaaactcaagagtgaaagaaatgtccaaccaaaaagcgggcagcctgctctccatgctgccatttgtatttcaaactgagatgaccaaggttaagttcaaacaggcagctctaccactgttgctgaatcgtctttcttggtaaaggtaaattgtcaaacctatttcctgtgcatcttggtttgatcatgaagtgagaccatgaaggaaggcagtaaatgtccttcaacaccctcatccacatgagtaatatggaccatcttagctttgttgaagagggcttgttccagccttggcaacagagtgagaccctgctacaaaaaagggggcttgctgacttgatatggtatgccagtgaacttttgggagggagccatgatgggattgggtagtaggtgaaggcttttagctctgagtaaaggaaactggcatttctgttttttactttttgagacagggtctcagggtctcggcctgctcccaggctcgagttcagtggtctgatcgtagttcactgcagactcaaaatcctgagctcaagtgatcttcccacctcagcctcccagagtgttaggagtaaaggcataggccaccgagcctaggtgattttttttaaggctttgctgtgttgcccaggcttgtctcaaactcctggccgcgggcgatcctcctgcctcagcctcccaaagtgctgggattacagacaagaacctctctgcctggctgggtttcttttattcatttgttggacctgctttcttggtagcagtggtgtattgattcccagtaggatttatctgccaggagatccttacagatcattagttcagctgttttgctttgtgaattcatttgaaagtattataatttcggtacttagtaattagatggatttcttgacatgcattagatatttaaggcagtaatttaactctggttccatgttgattccattagtacatgggcttgcagccttgtgaaatgatgattcagtttatccattcgctgagtgcgctgcactgaccttcttccaagcctcagttcctgttctaggaacttgaggctatgtagcctgaaaatgccctgcagtctgcagtgttctactgtgaactgcttgtgtgttggcaggctaccggtaagaatggttggtgtcagcagggacggggccctctgagacccatctcacaaagatgagtggtgaaaatctgatcacttgctgcagccctttagttttttattaagccgatgcctgagtagctttaatagctattagctatgttagtagactgagatcttctgttagaagtctttagttctgttttccttgggggactaagaaattatattgcaggcctgaattacaggaaggggagaaccaatggctagggaatgagagccaatacctgtaaaagcagagttgggctgggcgcggtggctcacgcctataatcccaggactttgggaggctgaggcgggcagatcacgaggtcaggagttagagaccagcctgaccaacatggtgaaaccctgtctctactaaaaatacaaaaattagctgggtggggtggtgggcgcctgtaatcccagctactcaggaggctgaggcaggagtatctgggagaattgaaccccgggggtggaggtcgcggtgagctgagactgtgccactgcactccagcctgggcaacagagtgagactccgtctcaaaaaaaaaaaaaaaaaagcagagttaatatattgcttatagttagttgaaccagttgtttctcacacaccagtgccataatctaaagctgagattgaacacagataggtacgtattagttatcttcaggatggcagagaatagtaacaattcggagcaccaatgggaacattgtttcctgagagttcaaacagtaacaaagtagcatgtgtttcctaaatatgtatcatgtgaatctttaatatttgtggacattaatacaaatctagagtgtgacagaacatctttgaattttatattctcacttaacaaatattggactaggcaaggtgtggatatctttccagctgaaaatctgatcaaggaggcaggcttcttggctccatgctaagaatcatcgatgatttgtcatattggccctcttgctggcaaaatcttagtttcttaggcagtggaatgaaacataacaaaacaaaatccctagaggctaggaacagatagtttgaaagagaagacactgtagcatgtgctgcttaagtacatatcttctgcttttggaatggaaactaggaagtcatttaaatagatatgtgtcttttttatcctatctgtagtaatttatgtgggatattcaaataggaaaatacaggctagcactgcatattgtatccatgtcttacattgtatacaaatgactattagatttaaatgactgttcaactagccccaatctaacagatcagagattgtggagtttcacttctttggactgtgtctttttcattttggcactgagtctgcagtcaccataaccacttagaaaaaactgtattttttctgttctcctggtgggttctgagttttagaatcttgccttttgtgttgttcagtcatccaggtgccctttgccctctgtaagccattaaaccttttgaagaggcagctttgctggtagagtcgtaagtgaaatttggaccaaaagtgagtttatgaagactggtgggcaggagctcaacagctgcagggttgtcctgcagccagtgtctgatgtgccccagctgggaagctgatgaataggtgaggaaatgcacagggattccgtaactacttttctccttttagggaagtgccttggctctcttaccaaaagcactgcgattttttaaaacagttgaaaatgtgctttccaaatgaagccgtgcttgtttaccgtgaaggctgattataatccgtattgtaaggattgacctggtagggaagtacatcatgaactgaaactttacctaaaactttggatacgtgatccagtagtttcaagggaaatctacaaaagtcaggtttttaaaaattttttaaaaattctgaaatagagatgaggtctcaccgttttgctcaggctgggttgttgggtttgttttttatgtgtagtttttttttttttttttggagactcgctctgttgcccaggctgaagtgcagtggtgcgatcttggctcactgcaacctcctcctcccgagttcaagcagttcttctgcctcagcctcctgagtagctgggattacaggcgcacgccaccatgccaggctaatttgtgtgtgtttttttgtttgtttgtttttttaagacggagtttcgctctcatcgcccaggctggagtgcagtcgcgtgatgtcggctcactgcaacctctgcctcctgggttcaagcgattctcctacctcagcctcctgagtagctgggattacagatgtgcgccaccatgcccagctaatttttgtatttttggtagagacggggtttcaccgtgttggccaagatgttctcgatctcctgaccttgtgatctagctgcctccacctcccaaagtgctgggattacaggcgtgagccaccgtgcctggccactttttgtatttttagtagagacggggtttcaccatgttggtcaggctggtctcgatctcctgacctcaagtgatctgcctaccttggcatcccaaattgctgggattgcaggcgtgagccaccacacccagccagaagtcagttttaaaacttaaattatttgagagtaggtatattttcaatttgattcttacaagtgacctaagggatctggaaaagaggtaaaactttgcatggtaaaggtccggcatgcccaaggctggacttggttctaaagcctgctttgttaactgttgtaaacggccactgtaagcattgtaacatctgtggcctaagtcagagactcaagtgttggccagcagggctaaggagtactctgagcccttcaagcttaaggggggatggaggcagaggcaagtgagaggggaagagtggagcctggcaattatttagcaagttctgtagcactgtggagtgggtttgttgactaagcagaaggaatgctgaacttttggtcacacttgatgcttcccgagtgagagtacaaatgctgacttagaagctctagtcatttcacaagtttctacccatgtttgtctcatctggagggttatatgctataatatgagaaagttcatttaacttgcgcctgggggacattgagttaatgatggcctggatgctgaggggttttgccaatactctcttttagacagttctttaaggcccaaatacaacattgcattatttgcttatttggtggttaggactgtcatgtcaagtgattggagttttgcttgaatcccttcctagggcgaaatgtctgggcaaaatggctgctagtgaacctcggatgtttgatatgctgtggttgcagtcactcataacctagtggttttcttctttttgtcttcatcacattctgaaacaaaaaatatgtttctatactaaccagaaaggaagacaggtatagtcgggggtattacctctacatggggaaagggacgaaaagagaagataattattcagaggaacgaaaagcagctaaagcagctggtagcatccattgcagctttaactgtggtgcacaaatgagctccatttacttgattacatcccccttgggtcctcctattcgaattccaagggtatcccatgtggagttcacaggctcactgagtttgctgggcttgtgagcgaaaatggaactgtcagcatattcatttgagcagtgctagaagtcagggtttgtgactttaggaaatggaatcttaggaaatgtggcagtttttgagctctgggaaaggcaccttagacctgtcctgtgagctgtcctatgtctcctccagagaccatggctacttcttaggcctggctctgtttattcctgttcttgggcctgcctgaccttgacagataagcctaagatcagtagagtcgttggtatagcctctgcaatcacattcagttaatgatttgaggtatttttaaaggctgtatttgccagtgttaacttagcagaaggaaggaagctcttatcagaaaatacgccaaagctggagtcagttatgatcaaatgaagtcgcagaccttgaagctttatctttgtttgcagagatctcacaaatggacatgtgaaaattaagccagacaagcagatatttcataggagttatcaagaattcatgtggaagaaaaatacttaggttgagatgtgaggactcaaaagtatctgttttgatcttactaatagttgatgttaaaatcaacttctggtgactacttgagcttaattttttggaggaaagccattgtaataggctccctctggctttcagaattataaatatacagtgcttaaggaaaaagggagtacttgaaacttaagtaatccatgtgcttttagtgaatatatttagtctttttatagctgattgaccagattttcaagttttagaggttaagtacataagtttttagtcttgaactttttattttgaagaaagggacccaaagggaaatttggagtgaaatacctcatcttcttaattgtaatcttcacttggcattccgtgctttgggtaatccagtgttatgacaactttactttagcactccttacagtaaaaggaatggggcaatgagatgcttacgctatgagttcctcgtgccttgtgtgtcaggttttcagattgaccaccaccttgtctgctttaatgtacttttatttaagtcacttttccctaatagcccagttcctattagtgctgccactgttctctcctctcttttttttttttttttttttgacgggcagaaatggagttaggtagtttttttcctctcaatttccagctcagaaaatcagttaattgagtattcagagtgatgctcacacttgttgctcatgtgtaaccacagtgggattgtgctaattaagtaaggccttggttggtttttctaattcacccctcctgtctagattccttggctatttgaaacagtcccaggtttactctgaactctccacccaggatcctattccacatgactgttctctgtgccatctccccaggttttcctttcagatatttgtgtggcctggttaatgcctcttgaatgttcattgtactttggcatttatgtaagaattcaagattttgttctatttagttcaggccttagtgtacagtcaggtatttggccaaatgtattgtacatgacattattgtagctgttgtttacattacaggaatacttcggatataccaatgcatgtgaagaatgggtttcccctcagtttcacataaacttagaaatgtctcaactgacatttctttttcttttttttaatttttaattctttttttttttttttgagacagtttcgctctgtcgcccaggctagagtgcagtggtgtgatctcagctcactgcaagctccgcctccagtgttcaggccattctcctgcctcagcctcccaagtagctgggactacaggtgcccgccaccacgcttagctaattttttgtatttttagtagagacggggtttcaccatgttagccaggatggtctccatctcctgaccctgtgaaccacccgccttggcctcccaaagtgctgggattacaggggtgagccgccgcgcccagctcaactgacatttctaaatgatctatgtataaactgctttttagtaactactcatttttggaataattttttagggccaaatgagtttgaaactaatacgcaaaaaatgtatttcagctgagatctgtatctgtggacctgaatgttgatccctcgcttcagattgacatacctgatgcgctcagtgagagagacaaagtcaaatttacagtgcacacaaaggtaagtaacatgcagtggtaatacatacagtgctaggttgcagccttgttattcacagtggatgtgagaagagattccctgagcttgaaacagttgctattcgtagggtagcactattaagtgagaacctccctaatctatctcacagtaagcatcaggtgagtgccattgtggcggcagcagcattctgctgtggcagagccctgggctgtgggcattgtttttttgtttttttttttttttttttttttttttttttggagacagtctcattgtgttgcccaggctggaatgaagtggcaccatcttggctcactgcagcccctgcctcccgggttcaagcaattctcctgcctcagccaccagagtagctgggattacaggcctgagccaccacactcggctcaaactcctgacctcaggtgatgcacgtgcctcagcttcccaaagtgctgggattcaaggcgtgagccagagccaccacaccgggccccagctttgtttttaatttgcatccaagggaagtttgtctctgtagcttgctttttttcagcatttactaaattgggaaagacctttcccatgtggttttttcttaacgcctgggcggcttgaatagcacacttcagttattccggaggtagtgtaaaaagactggtgacataattctctgcctgagcttaccagatcaaaggaggtaaaatcagcattcactggagtgaaaaggaaggaagccagggacaatttttagaaccatagtaagttacagctaagaggtttttttaaaatttatttttcttctttgtcataagttgggggtggggggtaaattcagacttacaaaaatagaatttggggctgggttgggtggctcacacctgtaatcctagcacttcgggaggacaagatgggcagatcgtttgagcctgggcaacatggcaaaaacctgtctcttccaaaaatataaaaattagccggatgtggtagcacacacctgtagttccagctactcaggaggctgaggtgggaggatggcttaagagcctggaaggcagaggttgcagtgagccaagaagccaagatcattccactgcactccagcctgggtgacagccagaccctgtcccaaaaatgtatataaacaaaaaaaagtacacagaaacaaaaaaatagaattagggttgtggcttatttcttagaactgaacttctaccagtagattctgatgggatattcattacaagcttcagaaaggtggagtttggggagaaatcgttagagttcaggttgaatcttagctatgactttcatgacaggagatcatgtataactgctttgttctttactggatcatattatgatgtattatgcagaattttcccactgtgtagcctaggaaacccagatcacttatctaaaagtcgtggttaccagttaacttctttctttctttacagaccacactgcccacgtttcagagcccagagttttctgttacaaggcaacatgaagactttgtgtggctacatgacactcttattgaaacaacagactatgctgggcttattgtgagtcttttagaaaatcaaataagctagttctttctgccttgctatgcattagtttaaaagagacttatatccactttttttaatggattgtgaaaagttagatttcatctacctactggagtatttgctgactgtcaagtggaaagtatgtgaaggaatagtgttacagctttgaggtggtgcatacaggcttacattatttacattgtaaaggggtgtgaacagtgtaatgactttagtcttacctacctttaggtttggtttttctctggtatgttttttcctatgtcagtagaattgatttctaggaaacactgctattggtaatagtttgtgataagatttctcaaaagttgctgaaggaggccatgcctttaatcctagcactttgggaggccaaggtgggtggatcacctgagctcagaattttaagacgtgcctgggcaacatgatgagaccctgtctctactaaaaatacaaaaaatttgctgggcgtggtggtgcgtacctgtagtcccagccactggggaggctgaggcatgagaatcgcttgaacttgagaggcagaggttgcagtaagccgaggccgtgccacgtcactccagcctgggtgacagagcgagactctttctcccaaaaacaaaaaaagtgctcaaggaggcagttttcagcccttgattgttatttcttggcggcaggaacagacttaactgattttaaaggagatttccacgcgttttgtcctgccaggcagactgaagaagctctccaaatgatgattgcttaatcattaaacaaaattaataccgaagcttatatttagatatgtctttcattcaaaattagagtccttgattatcctttgggattaggaaaaaattcctttggaatactgaacactttataatcttgatggctcatctttggtgcttagcattcgttgtactagttttaggcgaacactgaagcagtatagacactgttgtgctctgaacaattgtctataatggataaactgaacaaatgattgccatcaaagtgaatatgcaactctcaggaagacacctcattttaaatgtccagaagagttaaggaaggttaagaaaaaacaggagttgacttttaaatagccccacaggagtggagtggttgtctcctgtggaccagcaagagtagaatgaggcaccaactagaaaacatcgctgctgggacaagaggctcatgagttcctgcctctgctgcagattccacctgctcctacgaagcccgactttgatggtcctcgagagaagatgcagaaactgggagaaggtgaagggtctatgaccaaagaagaatttgccaagatgaaacaagaactggaagcgtaagtggattttcctggtgggctctgtcttttgagaagtagaaaagtggtgctgtgtacaaaaataagtagaagaacctgacttaattttgttttaagtgcagctgtttaattaggtccctagcgtcgttttctaaaactagtaatacatcttgcatagtgtgggacatggtctttgtacttcacacattgattcattggaggccattgacactaatacccgatagagtagttgtcttttcccatatgtagggcatacttattaaggatgctggtctggcacagtgaggaaataaacttttgtgcctttataaattgctcataatgtacaaagcttttctttcggaagcttggttactagacgttgagaagaaactagagagttgggggtttcgtcatgtgttgccccggctggtctcgaactcctgagttcaagtgatcagcttgcttttgcctcccatagtgctgagattatagtgagctgcccctgggccaggccaaatagtgctgttatagagtagcattctcagtaaccatcacatagataatttgaaagaggaagtccaggtctacaggcagcaagtatattttaatctggttgtcatttaattttttcaaacaaaaatagatttttggaaagtttcttatgaatccatccttgcatttcctcatcttagctgaaaagtactcattcctcccctcttcaaccatcagctccccctctccaaacccctgtgtcatctagggcagcactcaaacctccaggccctgaaagcatttagcacacacttgagtggctctcgggaccagctctggggaatgaggcactgaacacaacagatccaagtttctaccgttaggaattttaaggtgacttttaatgtctaggttgagataaagctgctttgtaatttttgttaacttttagcttcattagactcatgctgtatacttaggctgcagttaaagggttctcattgctttaaagaaacaaatgttctgtggctactaagtaacagtaattgcatgtagatttaggagctcatggacttgacccatcaaatccagttacaacattgctttcctccatagtcttattccacagattcaaaaatggcaactgccttagtatctaactagacaccagtttatactgaaatactgtttggtccagttgcagtgttttatgtggtggcatgagcagggccatagaattaatcaggagtggtattggtcaggtagttgagctgtgtcaactgaatgccatgtgcacatctcttttcagtgagtatctcgctgtgtttaagaagactgtgtcctcccatgaagtctttcttcagcggctttcttctcaccctgttctcagtaaagatcgcaactttcatgttttcctggaatatgatcaggatgtaaggcatttttattccattttgataatccacttcaaatgtttatactttcaaaatgtacttgatagtttctactgctttaaagttttgaatttcttacacaatggaaacctttttagatgctgcttttccttcattgtaagtcattttttgtaaaactctgcttaaagaaaattttgacttctttccccttccaaaacctaggtttctttttaagaaattaacagtcccaaacatcccttagttaatttcttaacaattccaaacttaactaagttcattttaaggaaattaaaatttgtgtaatttattttcttcccacctacgctttttgttgaattatgacttttttcttttcttttttgaggcagaatctcgctctgtcatccaggctggagtgcagtggcgcgatctcggcttactgcaagctccaccttctgggttcacgccattctcctgcctcagcctcccgagtagctaggattacaggtgcccaccaccacacccggcttattttttgtatttttagtagagatggggtttcaccgcgttagccaagatggtctcgatctcctgacctcgtgatccgcccgccttggcctcccaaagtgctgggattacaggcgtgagccactgcgcccggccgcgaattatgacttttatgctatttttctttttaacatgttttggtttttgctacttaatatggatagaagagaacagtaattttcccaaggatttcagagccactaagacttagcttctagtcagtctttcaaaatctgtcaagccttttagaatgagatgacctacctatgtttgggtttagccattaggtgttttaagcttggaggttaaggcagaattaaagatactttatgcatttgcctgtactgataaagaggattacttaaaatgttactcagaacttctttaagagaatctagaaaaatccataccatataaactctttggaattttcttcttttagctaagtgttaggcggaaaaatactaaagagatgtttggtggcttcttcaaaagtgtggtgaaaagtgctgatgaagtcctttttactggagttaaggtaagtgacctttggctgttggagaaaattttttacttcatcgggaataggtgaccttttgtttctttgaaagagatacttgtgaaacaaatggttaacttttaagacatgtaagtgttcttcagattttggtaattttcatctacttattcaattttcacttatttcccagagcaccttgttctgtcccaggagaagcaacttgaacctttccacacttggcttcattttctccttttctgtaaggagggagattactcagttaatttctaaaataaagtacaagatcagtattttatcccactctcagaactacactgtccagtttggtcaccaactacaggtgatagagaagcacttgacatgcaacctagctggcacaactaaggaaccaaactttagattttatttacatactggatttcaaggcgttagcacaaagacaagaatacaaaataacgtttccgttaccgttagaggtatgatttactttactacttctcgggccttctcattcctttgtaactgagttacccttacaattactgtctggtatctggctttgccactccagggagcccagaatacaggtgctaagtagagagggcatcatcagaaattaggaaactcggacttggtccagtttaaggtgtatgggactgtcctgtatccatgcattatgggatatttggcattggcatccttggccaatgcctaccagataccaggatttcctcccagtctgaaaccaatcgagaaaaaaaaacctcattcacacacagataggtatccaaggctaagtggccatgttccacctggtagaaccattgtactagcgtaaaattgctgtgtcttagggtgccagttttactggtggttgttaagtgattcttctgtagacattttctgccagcccttgatttttcccagccttggttaagaaatagtatcgtaaatttgtaattccctgatctgtagaggttaaactttactcacgtttatatgccatgttctaagcaatatatttttatattgataaatgtaaaaggctgcagggatagtatatttcatgaaatgtctggttctttttttcttccttctaggaggtagatgacttctttgagcaagagaagaacttccttattaactattacaataggatcaaagattcttgtgtgaaagctgacaaaatgaccagatctcataaaagtaaatatcatttaccgctagtcagagctttgctgatgagcctggctgtgtttggataaaaagacttgtccttgtttctgcagatgttgccgatgactatatccacaccgcagcctgcttacatagcctggctttagaagagcccacagtcatcaaaaagtaagtttttttggaaaagcatttcccctaacccaattgaagagtgccgagtggtgtaattaaaagcataaatgagtagtgactacatggtcctgctctggagttacaagctcagtaagacaagtctctagcactcatcttacatgttctctggacataagacacttgtaagacaattgtaggggacttgggctcttctatatgtaaacaaatacagtaaatgttgtcaaagcagtagtttctgtcacacttaaaagcctgttttctttagttttggagtttgtaagagtttatcttgcatcttcccctggcaattggtgcttgcaattttgcctggtaatgccctagaccttctttttttttggcctgtgatgcagcctcaggagatcctgagaacatgtgcccctgccctggaccttgaagagatttggttatagtggtcatgagaataatttaatgaccccagtctaacacacagctgttttgatgtacaattttctgaaattaccttcattcattaattaaaaacccttccattttcactctgcacttatgtatgtgtttcagtttctccatcctgggcatttctggtgtaagacaatattttacttaacatccaggcttggcaaaacaggtgatactacttctgactcgaaattgaaaggctaatggcagaaccatgacgaattaaatagcatatttactgctttgtgatgcccatagcatagctcattagaaaccaaccttggtttacacagcattggcatttaataagaatatttgggcgcatggcaggatgaccgaagggtcaccaagaggctgagtgtggtgctgtacatgtgtgtaattttgtgaccattttctctactatttggggtcagttgaagtgagagcactacttttaaattaatgctaaagtaccaaaggctaggactcctgagttgacccattcctgtcttgcacactggtaagatcatgttttatagatgatttaagaccttaaaccaaaattatatgtacatttccaggtacctattgaaggttgctgagctatttgaaaaactaagggtaaggatttctgtgttggtcttcataatatatattttataatctatagctttctgccttgatggtgacctttccttttctatatagaaagtagagggtcgagtttcatcagatgaagatttgaagctaacagagctcctccgatactacatgctcaacattgaagctgctaaggtaggaagagagttgctcagcttctcagagcagtgcaggaccagaagtctgtttaaaaagtttctttatacaaaggagcagaataagaatttatcagacttgtttttataaatgacatgcctttctggcattgtatccataaagcttgtgtatctgacagcactgtatgggttgtgtgaagtagacaggtaatagtttgggggattataggtcattgatgtgggacataacatgcagaaagggctgtttctggggcaaagaagatttgggagtttttattgaattgcaagtatccctgcagcctttgagccgtgaagcgttatatgtatatgtggacaaaatggtaagcagaataacctttgggaatgaaacatgctttgtctgcattgccctgaacaaatatgttttaattttatgtgaaatgtattaaatcaggcaaaataaaattagataggattgtatgccctctaaggctgaaatgtcatcagaaagtaaaagagtaaaaaaaatttttccccccatcatgcaattttattttagttaatttgccctttggcatgttttctgaatcttgggagtttttaaaaacatacttttttaatagcctattttctactttcatggaattaagagctcacttacgattatttgagtatatacaaaaataggcctagtagtttcacccatcagttattatttcacctagttttaaatgtgtaatctatacatcataattgctcatttcagatactaaagtaacttctactctgttgtaagattgcaaagaatctttatatctgactaagtggatctccaaggtagattaccagaagcaggatttgcagggtagggttatgtttcttactacttcattgcccagttgtattttagcagcgctcaacttgacttacccagcagtgactgtatatttcaagttatctctgatacacaatatttaatttttaaagttaactttatttactgaattactggaaaacaaaagtccttctgttttcactcttgagtaatcacttgattcatataaggaattctaaaaaaagctctcaacaaagctatcagcattgctcatccctgcgaagctggagatttaaaaatactctgggagagggaaggtgtagaggtagattattgccactaacatctcaggtggtacattggcacttgggctattttttagactggtttagatacttagtatgtatacctgttaatttttttcccaggatctcttatacagacgcaccaaagccctcattgactatgagaactcaaacaaagctctggataaggcccggttaaagagcaaagacgtcaagttggctgaggcacaccagcaggagtgctgccagaaatttgaacaactttccgaatctgcaaaagaaggttgagcaggacattcttctttctgtactgtaatttgaaaataatttcaaacttagaaaagttctacaaatagtgcaaaaaacacccatgtatccttcacccagtgtcagcacttcacccctctgccttatcacttgcacatgcacagtcatcctcatggctttgcgtgcttacaaacgttacacacctggtttttctgtaccattggagattaagttgcatatgtcatgcttcttttagccctaaaaacgttgtggtttatttcctaagactgaagacattctcttgtatggttacagtatggttgtttgctgtgataaacttaactttgggtctacaatctgctctctgtattttcatgtttgtcttgatgtcctctacaagatccagtctaggattgcatctggttgtcttagctattagtctcctttactctggaatagttcttagtttttaacagtatcagtctttttagagaatctctttacaaatcctgtatttctgacttttggtaggtttcctcatgtttagatctggttatgggctcctggcagaatagaagtaatatgcccttattggggtgtcacttctgattggacagtgtgtctctccttcattcgtggtggtaattttgattactcaattagatagtatccaaatccagtttctccactgtgtagttactattttaacccccatcaatctgtggtgaggcaatttaagaccatgcaaataccttggtcttcatcaaacttcctccctaggtttagcatgtattaatgattcttgcctaaaccagctgttactctgacgattgcagaaagacgatttccctcatctctagctctagctttcctacccaagttggcacttgtcatcctactacaaaaaagccttcccttttctcagaaatttcctttatctttattagagtcatggactcccagtttttaaaatggtttagaattcattattgtattaccaagttatttttgatgcctgtccagactttgccaataggagcacctttaagctggcatgtggttgtaacagcctaacccgtcttttttagagtgataggccatgctaatcttactctctgctccagccttgaaactggccattttttcaaggagccagggttctttttctttgggaacagttaccagcatctgagtatgctcatcgtttcggggtatctctgcttctgtgcccttcagtggactgagctaggaaatgtatgtgtgtgtgcacacatatgccgttgcacacacatgcaggtttcagggatcacaagtccggtccatgtccacatccatagggttctttcttgccttatccatttcacctcttagagcagaggactttcaccatttctattgaacatgagtataatatgtagtccttacctaagaggattctgtggatcttctctggggttctcaggggccatggaacatgtcagagcaaatgttggaatggattacccagaatgtgagtagttgtagtggggcactgttggactcaatcccaaccccctaacgcgtgtttccatgaaaaattcatatcttacttagttttttcctaactttcttgtttcccagtggtagggtaatctagacatagggaaatgatgtgttcatcaacatgtttgaagctacctgggggaaacctagactttatagatttctaatcatttgtctgtctattcaggattataatacaatgccttaactgtaaggcacaaaggcacagagcttcctggcaaatgtcatgtagacaggctctgaggctgtgttgggttcttccaaagtaaccttcatgctaccctgtttctgaaacaattacagctttttttttttttttaaaactaaaattttcaaggaaacgtacacacttcaaaactactgagttgaaatcttataggccagtttcatggctctggaaattttagaggagattgaagaaaaaacataaaactttaaaaaatgatgccaattcaggtctacctttactgcctaaagttttcgcccacattgattatatcctatattcaaaatgccagataggtacactatctaaaaatacagtattctgtggaatgctgagattggtgggtcttaacctgtttgcctttggtataagtgctttctgagacttgcagctgagctgacgactagagttgagtcagtgggtaagggctggtttcacaggaggtgaatagttaagtgtatggagccctggtactgtgtgtaggtctagaggaaggcagggagcttatcttcacccaggatatccaagggactgataaacatcaccttgtagtgcaagcactatagacttgacatatcactatgaaatttgtgactttttaacttggatgtggctgcttgtattgtagttcttttgcacagcactgtagagacaggaaggagggtgagtctgctctgaacacttgagcaccagcagaaggttgggtgatggtcaaagttttagtcaagtaaaactgcaagacagaacttgatgtcacaaattcaatgaaggaattagggcggacatgcatattcttggtttgttccaatttccaatgggtcattaatgccgaattctgatggcaataggagtagatgaaatgaaaaagggctgggtgcagtggctcacgcctgtaatcccagcactttgggaggctgaggcgggcggatcacgaggtcaggagatcgagaccatcctggctaacacagggaaaccccgtctctactaaaaatacaaaaaattagccgggtgtggtggcgggcgcctgtagtcccagctactcgggaggctgaggcaggagaatggcgtgaacccaggagtcagagcttgcagtgagccgagatcccgccactgcactccagcctgggcaacagagcaagattccgtctcaagaaaaaaaaagaaaaaggagtagatgaaaaggaagcatgccctaaagatcatcaagtaaacctgtcttgaatacgtgtagcagtttttcactgttttggatttaaaaatgttttaagttttatttttaatcgacaagtcattgtattgcatttgtggaatacagtgtgatgctttgcaggtacataatgtgaaattattagatcaagctaattaacatctttcatttttttcagtggtaatacatttgaaatttgctgtttcaatatatattattgactgtagtcaccctgttgtgcagtagatctcaaaatttattccttgagtttagctgcagccttctacccattctctttcccaccttccccagcaccccaccctcatcctctgataaccatcattctgttctctacttctaggagttcaacttaagattttacctgtaagtgagatcatgtaatgtttgtctttctgtgcctggtttattttatttggcataatgtcctctaagatccatccacattgtcccatatgagagaattttgttattttaaaaggccggatagtataatgtatctatactacattgtcttcatccactgatggataattctcaattgattttgtattttggctattgtaaataatgctgcagtgaacatggaagtacggatatcccattgagatactgatttcagttccttttatattcccagaagtgggtttgctggatcatatggtaattctatttttagttttttgaggaacctctataccattttccatggtggctgtactaatttacattcccagcaacggtgtagaagagttcacttttctctgcattgttgctaacactgatctttcatctatttgagaaaatgcattctagcaggtgtgaggtaatctcattgtggttttaatttgcatttccctaatggctagtgctgctgaacgttgtttgcatgaacctggtatgtcttcttttgagaagcattttcacaagccattggtgaagtatgtggctcaccaccacccatactccagccctgttcccagtcactggtacctagagggtgagagtgaggctgctcatcaacgtgttctccaagtcataagctgctgctctcccactcacgatgcttggtgattcagtgatgttttccacttaaagacagtgatagctgtatcaccacagttaatagatgtctgatgtgtcccagtcacagagataatacaaatgtgaggaaataatgctggtgcctgaaagcattggagaccatttgtaagaatgccatttggtagttaaagtgaacatgaaaattgtttagtttttcttggtttcataaacattttttcttcctgtagaactgataaatttcaaacggaagagagtggcagcatttagaaagaatctaattgaaatgtctgaactggaaataaaacatgccagggtaagtgttttctacagatgaagccaacatcttttatggttttttccaagttatttcccagtttactaacccattgtcatcaggcagttggggtggccttgtggtattaatcgtctgtagtacttagttgatgggagccactcattgtttatttgtagtcttgtttataatgtcacccatgactaatttttagcaactttttttttttttttttaatagagatggggtttcaccattttggccaggctggacttgaacccctgacctcaggtgatccacctgccttggcctcccaaagtgctgggattacaggtgtgagctaaagctcccagccctaatttctagcaacttttattcaatctttccaaggcccttgccttcatggaacaacgcactgatagtgtcttaagaagttacagtaagcaggatcacatttaggagcaagcaggtgagggcagaggtgctggagtgaacgtcggctctttggctggtagccttacccactgagggagaggagctgaaacatgaaatggggatgcgtggtacgttgcagttcacctgggatttgatgaagagaagggccagcttgctctggctgactttaaacctcccgtgaaaagccgtgttggtgtacttgagtcattccaggtatatggcaagttttaataattcactggtctgccttgccttttttccccacagaacaatgtctcccttttgcagagctgtattgacttgttcaagaataactgatatgccttcactcagaagaaaagaaatgaatgtgaaagaaagccaagcatcacttgcacttaaatcattaccacggaagatatattagcttcaactttagtttaaaattatgtgaataaatattttgatttctacaaatcttaacatttaaccatgttggtttaaaaatattattgcttgctacttggacataactaatttttccttgtgcatttaatacctctgggcagaatccaaatactgggttctcccgtagttcgtctttagttactaagaaagggtgtaggacacattagccttctggaaacaagtagaagccatcacctggcccatgtccctacaaacccatgattgtcagggaggtgccagttacagcaggtgattcagctacttgaggtcggtaacagaccttccattcctcactgaaggtggggtttgtgtttttgttttgccctgttactccactggtagtcatctggtgtttgtactataacaacagcaagaaaatctcatttatctttatatactctttgcacctcctttttttagtcgagatataaatatttgaggggagagaaatatctacaggtatatatggaaacaaataatgtggtctgctttataagatggccagatctacattaggaaaagtataagccccctccctaatggccgctggggggtgagggcggtgtgttgtatgtctttgggtgtttgtttttttataaagcatataataaaataatcgtgctactaatgt

SEQ ID NO: 913 - DNA, 32744 bp, Homo sapiens
  source 1..32744: mol_type = other DNA
ccgtggtcgcgagagcgaaggagcggtctgagaatccggcttgagtgttaaaggctaagcgtgtctagctggacccgtggccccgaagaagcgagacaaggcgacgcggagctgtccctgacaccccgaggaccgagggacagcgaagggccggggccgccggccattgccaggcgccattaggtgacgcggccgtcacgcgatgacgcgctgaccggcagtggcctccacgtcgcaggttccgcaaagacctgtgggagcgacccgggagaaggagggccaagatggcggaagcggaggagtctccaggagacccggggacagcatcgcccaggcccctggtgagcttgggatctgcgacaaaagggaccgagggtgaggcagagtgccccctaaagaagtcgggggacgggctcgtggcctgagagccggagctccttccgcccggcaggcccttcttgtacccgatgccagaaccagtcccaacactgcacctgttctttgcgctaaccgctttgccccctgccctcgtggttccttccaggtctttttgtgaaactccgatctttcctttcccatcctcccaggtctcgtcatcgtcccctacattgtgttaaatggcgaactttaggtgatttcttaagttatcttttcttctgctgtcccctcattttatcaaaacctgtcaccagcctttgttgaaggaataatgagagattgcttcccgtgggacattaacgttttgttgcttataactttagtattgacttgttcagtgaccccagtaggccaggtttaacccctgtcgcagctccttgccattctcttcaccatacttgttctcctttcttattttttacttttttaaaaatcgagacaaggtctcactctgtcacccaggctggagggcagtggcgcggtctctgctcactgcaacctctgcctcccaggctcacgtgatcctcccacctcagcctccctagtagctaggaccacaggtgcgtgtcaccacaccaggctaatttttagtatttttttgtagagacggggttttaccatgttgcccaggctggtctcgaattcctgggctcaagctatcctcctgcctcggccttccaaagtgttgggattacaggcgtgagccactgtgcccggccatcttcactatactctcttgctcctgtctctgcaagggatagaatttccactgcaagcccaaagtgtggacaagtattttaagaacacaggctttggagttaaactttacttgggatggaatccacccactttgtgagtttcggcaagtcattttagggagggtgtttcttcatctgtaaaatggagataaaaatacctgcctcaaaacagtttttagaaagatcaaatggcataatttatgtaacgtgtctaatactatcagtaccatgaactgaggagtataatgaggtcaatattctgctcctgtccctcttctcaatgtgtttagttatatagtagttgctcagtaaatggttcttccctttcctctttttttttctttttctttttttgagacggagttttgctcttgtcacccaggttggagcacaatggcacaatctcagctcactgcaacctccacctctggggtttaagtgattctcctgcctcagcctcctgagtagctgggattacaggcgcctgccactacgtccagctaatttttgtatttttgtagagacgggctttcaccacgttggccaggctagtctcgaactcctgacgtcaggtgatctgcccgcctcggcctcccaaagtgctgggacacaggtgtgagccaccgtgcctggccccctttcctctgttttgaattagcaacttaacatagtgaactgagctgggagatcagtgaacttaattctagtcctagctctgctgcttactagctccatttgttcacctcttcactcactcaacaaatatttattgagcatccgctactatgttccaggcactcctttaggcactggggatatggcaataagagtgagttgtgttaagttctatcgtgaccttgagtaaaatcaggctgaaccccagtttcctcctttggaaaatggtgataggaacacatcactgaattagtgagagtactaaatgagataatatatacattgtgcctactgtgacattgtcataggtgcttagtagtttttagtttctttcatttaaacttctccacccctcttctgtgaagctttccccagttaacttcagtggttctgatcactcattactcaatatgcaatccgcttccattcaacaaatgtttagtgaactcccacaatgagtaatgcactgtgctagttgctgtagggaatgcaaagggcctgcctctatggtgctaccagtcttaagttttagggataagacaagtatacaatgctaaaataaggcagtatgtaagagaaagttacacaaagaatattacagaaatttaaaggaaaatgctatcatgtccagttggggtgaccaagctacatggtggaagttatatttgaaaggacttcaaaggatgggtaggatttgaaattgcaagtgagtataagagctatcaataactgagcacctgctacatgccaggtattgtgctagacatcctctgcgtatttgctactaaactttacagcaatcatttcagttaggtggcttttaactacattttatgtgcagatgaggatatgacatgcagggaggtttgatgatttccctagggtctacatccagttagtgccatgcatgaaatttgaacctagatctgactctgaagcccagacttatatatccatttatatataagtggatatatccattcatatatatatagaagcgcagacttatatatatccatttgtgctacacagcctcttgtgaacaaaggcacagaagttggaaggtgctagtatatttatagaacaacactttggctgaagcacagagaattattaggagataagccttcagaggtaagcctactgagttagggaggcagtatggaacagtggtggtttggaatgtgtactctggagtcagcttgcttaggtttgattctaagcactgtcacttaactagtgggatattggggaaattaccaaacccctccttgcctcagtttccccatctgtaaaatagagatataacaatacttagttcatagggttattaggtggaatgagttaacacattggataaattaacacacttaatagaatgcctggcatataataatgcaatgtgttatttcttattattggctactaacctgggaggcttaatgggctacaaagagccagtggaaatttttgaggagggaagaatttgaaatcatgaattggacaacataatagagggtaagttacagtgggggaatatctggaatctagagggccagtgaagctgttacagtagttctgagaagaaatgataaggatctggacaacagcagtggcaggagacaagaggatttgagacaaggcagaatccacgagggtttgtagcgtgtgaaggaggatttgtcttagatcagtattttccaaactttagtgtgctagcagtcatctggggaatcttgttaatttgcaggttctgattcagttggtctgggatagggcccgagattttgcatttcttacagactccctggagatgctgctgctgctgctcccagtaccacattttgaagagcatggctatagacacccaagagtatagtgacactctgaacaaaaatagataatatataaggagggttagctggatgagggccttaaaagttgactaattcagtttgggacatgtttagtttgagatactggcaggccattcaatagatatccaacaggcagttggactttaaaacatgcacttcagggcgcagaagaggtcttgcctagagttgttgatttaggagtcatctgcacagggttaaaaagacagaatcttgggtaatgcctgtatttagggggcaggaagaagagataggctgtaataatggctgcagtctggggtcttttttttttttttgagccggagttttgctcttgttgcccagggttggagtgcaatggtgccacctcggctcactgcaacctctgcctcccaggttcaagtgattctcctgcctcagcctccccaagtagctgggatcacaggcatgcaccaccatgtgcagcaaatttttgtatttttagtagagacagggtttcacagtgttggccaggctggtcttgaactatagtctgggatctttggaagatctcaggctatgaggaagctggccccaggtgaaggggctggctggagaccatgccactggctaccccgtcatccactcctgggagccaggcctctttgagctgattcctgcttcatgcttccccgtgttgattcctttttccaggattttggtcaatagtataacccatttgctcccagctattttttttagggttgcagtccctgcttttattgtgtgttttttggccctgcctctacctgttccccttactggcccaagccaggcagagcaatgttcatgtgtgtttctgtgagcacatctatatatgtgcaagagcctgcctgctgatgggaaaggggagggacatggatccaagtcgcctttcccgctgagggctagacagagagcagggtccattagctgaggtcctggaagtcctgtcttttatacatggagctggagggccatagttcctgactcagctcatggaacactgttgctgattcttgaagagacaaaggggagagagtaggggatcacatgggacttcagtgactacagagacttctgataccaactacctggagttaggccaaactgcacaggttaaaagcacagtcctctacaagactgctcttcagacaccagccacaattttgggggttcccaggaccatcctcacttcagagcaagtagcaacaaattcacgggttcccacgttccgctcaggtttatttcttttttggcacaatctcagctcactgcagcctctgccttagcctcctgagtatctgggactacaggtacatgccaccatgcccggctaacttttgtattttgggtagagacggggtttcaccctgttggccaggctggtctcgaactcctgacctcaagttatccgcccatcttggcctcccaaattgctgggattacaggcgtgagccacggcacctggccctcccctcaggtttcataattcactagaatgactcataggactcagaacagcactctacttaaaattacagttttattatagcaaagggatacaaatccaaatgtgcaaaagagagagatacacagggcgaggtctgacagggtcccaaacacaaagattccttgtcttgtccctgtggattcaagacatgttaccctcctggtttgctggtatgtgacaatatgcagagtattgccaatcagggaagttcactcatgtgtctatagtttttattggggtttcattatgattaattggaccattgctcacataatggaactcaatctccagggtcccaccactcccgaaagtttgggcttatatgttgtgacttaaagccccaaacctctagtcatatgtgcggtgtttctgacgtggttagcccccatcctgagtcatcaccagagtacaaactacgtaagggcctactgtgactcacctgtaagcataaactaccagagcccctgtgaatatcaaaaatactcctctgtcattcaggaaattctaagtttagaggctaactctcaagtacaggggacaaaggccagctaaattctttattatacagtagtgacagaactggaattgactccatgggaatcttgaacttgagctaacatttatccagcccctattgtgttcctgtattaatacatttcttcctcacaataaccctgtgatgatggtaccattatctcaattttacagaggaggaaactgaagcacagagaggctaagtaacctgctcagtgtcacatggatagtacaagatggaactgggatttgaactcaggctatttggcctgcactcttaaccagtattctccaaataccatgttgagcattgagtatgtgctaggtgctgtgcagtgttatttatctttatagcagtattgtttccatgtgagatccctgtttgactttaaagcctgtttttttcctactgtactacaatgcttctcctagcagtagcaggcaacagggaaactgaaaacaagcaatcctggcacttgaaagggcagtgttatagtagtgaggagaaaatatggcttcaaaaagtgttggttttggctgggcatggtgcctcacgcctgtaatcccagcattttgtgaggccaaggcgggcggatcacttgaggtcaggagtttgagaccagcctggccaacatggcaaaaccctgtctctactaaaaatacaaaaattacccgggcatggtggtgggtgcctgtaatcccaactactaggggggctgagacaggagactcgcttgaatccaggaaacagaggttgcagtgagccgagatcacgccactgcactccagcctgggtgacagagcaagactgtctcaaaacaaaccaaatgggttggtttacgcattacatgctgcagagtattcaaagagagtgaggcttgaatgcagatccttgtatttcttgattatgtgaggctacttttggagagcacaatgtcagtaaagtggtgagaaggccaatgccagattacagaggattaagtgcgaaagtaaagtttgatcaagcaagagaaggagagtagtttgagagaatggcagaaacaagggagtgatgtatttttaaattttattacagaagctttcaaatgtgtaaataaaatgaagagtagcataatgaacctcatatacctatcaacattctattattttattggtctcaccacattttttttggcctttttatttaaaactaattttaggcatatagaaaagtgcaaaaatagtagagagagtgcctgtattcccttcgcccagattcctctaatgctaacgttgtacataagcatagtacactgataagaaccaagaaattaacattagtaaaacactattacctatagaccatatttgaattttagcaggttttccacttatggccttttttgttccaagatcttatctaggatcccacattgcatttagttgttatttttccttcatttcttccagtctgtaatggttcttcagtcttttcttatctttcataatcttttctgagtattttaaagcaaagcccagacatatcatcttcatttgtaaatacttccctacgtttctctaacaggtaaggactttttctttgttatcatacataacaaaactaataataactgcactccagcctgggcaacagagtgagactccatttcaaaaaaaaaaagaaaaggtaaattggatccccatatacaccttcaacaattatctacttacgatgaatcttctttcttctacagccctacctactttctttattattttgaagcaaatcccaggcatcattacattagtaaatatttggtatgtatctctaaaagataaggattctggctgggcacggtggctcatacctgtaatcccagcactttgggaggccgagatgggcagattgcttgagcccagaggttcgagatcagcctgggcaacatgacaaaaccctgtctctactaaaaatttaaagagtagcctggtgtggtggcacatgcttacagtcccagctacttgaaaggctgagatgggaggattgcttgagcctgggagattgaggctgctgtgagctatgatcatgttattgcaatcctgcctatatgacagagcaagaccttgtctctaaaaaaaaacaataaataaataaataagaaatttttttttgattttgtattattttagagttgccttcttgctatgttgcccaggctggagtgcagtggctgttcacagtcgtgatcatagcacccgcagccttcaacttctggcctgaagggacactctcacctcagtctcccaactagctggaactataggtgtgtgccacagttcccaaattagaattctgcttttaaagagaacataaccacaataacattaatgcatgtaaaaaattaataacttcttaatatatctcagggttcaaatttccaattatctcctaaattatatttttataatttaaaaattggcccactgcctgtttttctaagtatagttttctgggaacagagctacacttatttatttatgtgttatctttagctgctttcatgctacaatggcagagttcagcagttgcaacagaaaccatatggctctcaaaacctgaaatatttactgtttgaccctttacagaaagtttggtgacccctgctttaggcaattatcttttagaataattaaaaataggaagaaatgtcatatttactttcattttaactaatttgggagatcatttatttatgtaaatccaagtttccttctgatatcatattccttcttccagaggaacttcctttagcatttcttgtagaatatattttagcttttgcttgtctgaaaaacgtttttactttgactttatttttaatagttattgctgggtttagaattcagtgttgatagttttattcttttagcactctaaaagtgtccctccattttcttttggtttgcatagtttctggtgagatgtctttctttgtttatttgtttgtttatattttgttagagatgtctattataatttttttttttttttgagatggagtctcgccctgtcacttaggctggaatgctgtggcatggtcttggctcactgcaacctccgcctcctgagttcaagctattctcctgtctcagcctcccaagtagctgggattacaggcacctgccaccatgcccagctaattttttgtatttttagtagagatggggtttcaccatgttggccaggctggtcttgaactcctgatctcaggtgatccacctgcctcggcctcccaaagtgctcagattacaggcgtgagccaccatgccggccttttattgtgattcttatctttgttcctgtaaatgcaatgcctttctctttggctactttcaagattttctctttatctttggttttcaatagtttgtgtctaggtttgtggattttttcattttgtcctttggtattcatcttgattggggttctcttggcttgtatctgtcatttgatgtctcattatttttggaaaattctcagctattctttttttttttttttgagacagagtctcactctggagttcagtggcgtgatcttgggctctgcaagcctcgacctcctgggctcaggtgatcctcccaccatagccttctgagtagctgggactagaggtgtgtgccaccactcctggctaatttttaaatatttttttgtagagatggggtttcgccatgttgcccaggctggtctggaactccctggctcaagcaatctgtctgccttggcctcccaaagtgctaggattacaggcatcagccactgcggttagcctatatctcttcagagccattatctttctattcttctgggattccaattatttacataataagaccatttaatgttttcccatagttcctagatactctattcttttttcttttcttcttttactcttctccttttgttttagtttgcataattttgactgacctagctctgaattctttctttggtattgaggtaactgataaggctggcaaaggcattctttatctgttactatgttcatgtatttctagcattgccatctgattcttacagtttccatctctttgcagaaattcatcatcattcatgcatgtaccttttctactagagccttttgcatattaaacatagtaatcttaaatttcttttctgataattctaacatcttggtcatctcagagcctggttttgttaattgctttgtctcatagtgggttgttttttcatgtgagtatgggggagataatttgttattgatattgaacgctggacatcatgtacacactgctagaagtggcacatctctgctgctgagttgtcagtcagtaggggttaagtcagtctagtcagggttgagctttgtttgttttgttgttgttgttgttgctatggttaccttcagtgcatcaccagcttcagattcctctgttgttaccttgagtttaggggtgggggtgctatgttgtcccagtgttttgttttttgttgttgtttttttttttttgagacagcatctcactctgttgcccaggctggattgcaatggcgtgatcatatcttactgcagccttgacctcctgggctcaagtgatcctcccactttagcctcctcagtagctgggaccacagttagttgcatgccaccatgcccaactaattttttaaaaacattttttgtagagatgggggtctcactgtgttacccagactagtctcaaactcctagcatcaagcgattctcctacctcagctacccagagttggggttacaggcatgagccactgcacccagccccaatgtttttattaatgttcatgttctgtactcagcttctgtctttgcccttgcatctcatggtgagtctctttctaagctctagcacttcctccagcagtagactgctgttgtttattactccatacttgctagcctggtgataggggccagggaaaggggattctttgttttcatagtctagtctctgccttaggcagaccatgtgtccctgggtctcctgggtagcactttcttagtgatcctgtccccctcctagctgaaggaaactcttaatggtctgggcccaggatggttttctgtccatcccttagtagtagagagcttttccttttccctttctccagcttcagtgagttgtcacctgtgttctgaaggcaacttgtttttgtctaagtggctttaaggctctttcctctaggggcttttttctagagaagagcctgtaagtgggtgtgaactccccttgcgtctattgcttccagggattctgtactcttgtgctgatccatacttggactttagcaatttatttaaaattttatttgaattcttacccatctgtgtggtgtggtgtgcagcattgtcttcccctcatgctttgctactgttgagccagtgctgatgtctcttcgtggaagcacctggctttctttagatttcatccaggctacttggtctccctacaactcagttctcagatgaattcagggaaagttatgattcagtaaagtatctagccttttctcattattctacttggggaatggtctttccagcttcctatatcttaatcagaagtcaaattacagtgttatatagtcacttgaaataggtgctatctttgtggttgtgtgtttatttcaatacatggtagtttcattggtttaattttttctctcagtttcagggattgcttccttcaaattttaattttgtttaataattgtgtgaagtgtttatatgattgcaagtcatttatatggacaacatatattgaaaaaagcctagtttctctccctgtctgctctatcctattcctttctttcctctataagaaacctttaaaaaaaaattctatggcatgtttcttatatttaagaaatatgagtgtggttaagaaattgtttttgttttattttattttattttattttatattttatattttatttattttatttatttatttatttgtttattttttgtatttttttgtattttattttattataacggagttttgttcttgttgcccaggctggagtgcaatggcgtgatctcggctcaccgcaaccttcacctcccgggttcaagcgattctcctgcctcagcctcccgagtagctgggattacaggcatgcgccaccacgcgcagctaattttgtatttttagtagagatgggatttctccatgttggtcaggctggtctcaaactcccgacctcaggtgatctgcccgcctcggcctcccaaagtgctgggattacgggcatgagccaccatgcccagccttttacaaattctttgaacatcctcattccttctaaaatttcagtatactgtctgcatttcatttatctgcaactgttgcccattaaaaattgtgcctactgggccaaaaactgtatgagaagtcattgcctctattttcttaggaatttgtagatttgagttttggttgtaataaaatttgacggatgtgaacatcctcattctttctaaaatttcagtatactgtcttgtgtttcctttatctgcaactgttgcccactaaaaattgtgcctactggcccaaaaactgtatgagaaggcattgcctctattttcttaggaatttgtagatttgagtttcggttgtaataacatttggcagatgactatgaatttaaaagttcacattctttattcactttgaaaattttatttgctctgtgattgccaggtaacctgtaaagactgtaatcaaggtatattttgctatttccctgtttcccgcacttgcctttatggttcatgtaatgctcatttttagccagcagaggccactagagcctgttagggagcagaagtgcaacagaaacgtggccattctaagacagtgattgctaaaaggtcactttttaataactttacaattattatctcagtcttgctagcttgtgccatgtgaagattttatgctaaatgttggtgggcaagaaggtgtctatgacatttactttagttttttcattatgtttaatctttaaagaaataaatttgaggattattgttaactgcattgtgtaatgtctgttgagctaacacctactttcctatgtaaaaccctacaaaatacatggtcccaactctctaggaaatgatgatatatatgaggaatgctacagtttattacaggcttactttttttcccctgactcttctcagtttgcaggcctttcagatatatccatctcacaagacatccccgtagaaggagaaatcaccattcctatgagatctcgcatccgggagtttgacagctccacattaaatgaatctgttcgcaataccatcgtaagttagactagttgagagaacttctgttcagtatcatgggactaagtaactaatagtactttgcaatattttcatttggttcactgattttgaatatattttatatactgaagtttaatattttatcctagagattaatttggtacagcctttttggagagcagtttggttataatgcatattaataatcttaaaacagcaaggtgcggtggctcgcgcctgtaatctcagccctttgggaggccaaggcaggcggatcacctgagctcaggagttcgagaccaacctggcccagatggtgaaacccccatctctactaaaaatacaaagattagccagacatggtggcatatgcctgaaatcccagctgcttgggagactgaatcgcttgtctccgggaggctgaggttgcagtgagccgagatcgcaccactgcactctggcctgggcgacagagcaagactccatctcaaaaaacaaaaaaaaggtcttaaaatgtccaaatctttttaaaccaatatattatcatacttctccaaatgtagtataaggaaagttttaaaatgtaaaacaaaaattttcaacattaaagtatcaatatacaaagatgtttattatagcattctttgtaataggggaaagctagaaataaatgaaccacagatgaggtattggttaggtaaattatgttatatctttgtggtgggatgctaagcaactattataaattatgtttacaaagtgtttaataacgggtaaaattctaggtgaaaaaattaaaacagaattagctcagtggtgctttgagaggttgtatttgtattactgaacccttcttccagtttcttgattttttttttttttttgtatctggcatctaggattcatttaccaattaaattgggaatgttaaaaatttatttcatatattgcaaagaatgtagtagctagagagcaggctaattggtccttggaacctcatcttctatgaactgaatgtcacatactgtgttttgtagagcagctttttatagtacaattgttttagtttctttaagcagcctattgggagggctgtgtttcttttttatggattttttcaacatcaaaacagaacagatcaaaacagatgtggaaaggtgttaaaagttggcttaagaagttaatagaaaaagcataccctacctctctggtttgtttgtgtagtgaaggagttgaactggaattatctgcaaaattcagtgaagagttcacaggagattgaaatgaaagaaattttagcaaattaagtaaggctgctggcaaccttggtcatcacaatacaacaagttgtttctgtctttcagatgcgtgatctaaaagctgttgggaaaaaattcatgcatgttttgtacccaaggaaaagtaatactcttttgagagattgtaagtatatgaggtttttaagggtttgcttaatctatctcactgtaccttatcgtaagtactttataaggcaaagtctctgtggtaataaaactgacatcattttgtaggataaaaaaatatgtaaacgaatatgtaaatcaaacttctggcagaaattaaaaattgattttattttatttttattttcatttttttttgagacagagtctcactctgacttccaggctggagtgcaatggtatgatcttggctcactgcaacctccgcctcctgtgttcaagtaattttcatgcctcagcctcctgagtagctgggattaaaggcgcccaccaccatgcccagctaatttttttgtatttttagtagagacggatttcaccaggttggccaggctggtttccaactcccgatctcaggtgatccacccacctcggcctcccaaagtgctaggattacaggcagacattaaaaatttagattggaatctcagagattgaaacattttgcttattatattgtcctcatcagtaaatgtacactggccaggcatggtggctcatacatgtaataccagcactttgggaggccgaggcaggagaattgtttgaactcaggagtttgagaccagcctgggcaacatggcgagacctcatttctactaaaaataaaaaaactagccaggcctggtagcacaagcctgtagtcctagctacttgggaggctgaggtgggaggattgcttgagtccaggagatcaaggctgtagtgccgtgactgtgccactgcaccctagcctgggtgacagagtgagacctgtctcaaaaaaaaaaaaatatatatatatatatatatatattttaaaaaatgctctagtggttactacaaaatacatttctggaggctgctaatttacaatatttacatttattacataatattcctggaagctgctgacacataaagagttaatgatctccaagggaaaggcaaatgtttaaatttttgtttgttagttttttgagatggagtctcgctctgttgcccaggctggagtgcaatggcacaatctcagcttactgcaacctctgcctccagggttcaggagattcttctgcctcagcctctggaacagctgggattacaggtgccccaccaccacatccagctaatttttgtgttgttagtagagacgggttttgccatgttggccaggctggtctcgaactgctgacctgaagtgatccacctgccttggcctcccagagtgctgggattacaggcaagagccaccaccccggcctaaatgttaaattaatatgatagtaaatacccgtaaacatttaacaaattaatagtacctttattgacagtttgattttcaagcctatcatttagtctgatgactgctttctttattagagttctgtcaaaacagacagcgtctcattctgttacccaggctcaaatgcaatggcgtaatcatagctcactgcagtctcaaactcctgggctcaagcagtccttctgccagtctcctgagtagctgggactgtaggcacacatggctagtttttaaatattttgtagagatgggggtctccctatgttgcccaggcttgtctaaaactcctggccttggccgggcgcggtggctcacgcctgtaatcccagcactttgggaggccgaggcgggcggatcacgaggtcaggagatcgagaccatcctggctaacacggtgaaaccccgtctctactaaaaatacaaaaaattagccgggcgtggtggtgggcgcctgtaatcccagctactcgggaggctgaggcaggagaatggcatgaacccaagaggcggagcttgcagtgagccgggatagcgccactgcagtccagcttgggcgaaagagtgagactccgtctcaaaaaaaaaaaaaataaaaaaaataaaaaaataaaactcctggcctcaagcagtctgcccacctcagcctcctaaagtgctgggattacaggcaagagccactgcccagccaatgttttattttttcaactttttgttaaaaactaagacaaaagcacacactttggtctaggccttcacagggtcagaattggatcattagtacaattgtcttccacctctgtatctgtcctattggaaggtcttctggggcattaacacgcatgaaactgccatctttgatgataacaatgccttcttctggaatatctactgaaggacctgcctgagactgtgttatggttgactttttttttttttagagacatgatcttgttctgtcactcaggctggaatgcagtggtgtgattatagctcactgtggcctcaaacttctaggctcaagccattctcccacctcaggctcccatgcccggagcctgtgccaccatgcccagctaatttttaaatttttttgtctgggcacgatggctcatgcttctaatcccagcgctttggcaggccgaggtgggtggaacacctgaggtcaggagttccaggctagcctggccaacatggtgaaaccctgtctcattacaaatacaaaaattagctaagcgtggtggcaggcgcctgtagtcccagctactccggaggctgaggcggaagaatcgcttgaacccgggaggtggaggttgcagtgagccaagattgcaccattgcactccagcctgggtgaaaagagggaaactctgtctcaaaaaaacaaaaaacaaaaaacaaaccacatttttttagagacagggtcttgctatgttacccaggctgaactttttaagtagaagtatactccaacataacaatgaaaagtataatatagtaaacacgtaaaccacagtaacatagtcattttttgtcattatcaagtagagtattatgtagtgtacataattgttctatatttttatatgactgtcaacatactaggtttgtttataccagcatcaccacagacacgtgagtaatgtgttgtactagatgtcactaggtgataggaatttttcagctccattataattttatgggaccactatcattgaccgaaatatcattatgtggcacatgacagtacacttgaattcagtttttaagttgagcagttaaaaaaaaattaatgaaattagcagcagttttattagaagtggtaggattatggttttttatgtcttttccaaactttccacaatggtgtcaaaattacttatacaattaaaaaataaacaatattaagtatataaatttgcgtacctctcttgggtaaggttatatacatgtgaggttaaagttcgatgtggaatatttgcctttttggaatgaattgaggaaggtaattgtgctctaagctatgtgctactgaactgttggcatgcaaatcactcagcagctttttttgtttgtttttttgagacagagtcttgctctgtcacccaggctggagtgtagtgagtggaggttgcgatcttggctcactgcaacctctgcctcctgggtttaagggattctcctgcctcagcctccctagtaggtgagattacaggtatgtgccaccacacctggctaatttttttgtatttttagttagagacgggatttcaccatgttggccaggctcatctcaaactcctgaccttaagtgatcttcccgcctcagcttcccaaagtgctgggattacaggcatgagctaccgaacccgaccaaatcactcagcagctgtttttgtttgtttgtttgtttgtttttgagacggagtcttgcactgtcacccaggctggagtgcagtggcacaatcttggctcactgcaacctctgccacccgggttcaagcaattcccatgcctcagcctcccaagtagctgggattacaggcacgtgccaccatgcccagcgaatattttgtatttaatagagatgggatttcatcatgttgcccaggcaggtctcaaactcctgagctcaggccatccgcccgcctcggcctcccaaagtgctaggattacaggcgtgagccacagcatccagcctgcagcttttgattgaggaccatgtttgctagacctgatgttggcagagcctgcagagccttttgcagttttcagaaagctttcatatgttattaaagtttaaccttgtgaaattaccaatactgggctgttttttcacctagaagaatagcaactctatattaattcaatatactaattataaaagggaagcagtatgacagagtggcaagaactttggtctaagaatcaaaagaccaggctgggtgtggtggcttatgcctgtaatcccagcactttgcgaggctgaggcaggtggatcgcttgaggccaggagtttgagaccagcctgggcaacatggtgaaactccatctgtacaaaaaataaaagttagctgggtgtggtggcgtgtgcctgtagtcccaattattcaggaggctgaggtaggaggatcacctgagcctgggaggttgaggctgcagtgagccatgatcgcaccactgcactctagcctgggcaacagagtgagaccctgtttcaaaaaaaaaaaaaaaagaaaagaatcaggccaggtgcggtggctcacgcctgtaaccccagcactttgggaggccaaggtaggcagatcacctgaggtcagttcgaaatcatgctggccaacatggtgaaaccccgtctctactaaaaacacaaaaattagccaagtatgatagcgggtgcctgtaatcccagctactcgggaggctgaggcaggagaattgcttgaacccaggaggcagaggatgctatgagctgagattgcgccattgcactccagcctgggcaacaaaagccaaactccatctcaaaaaaaaaaaaaaaaatcaatagccctaggttctggtcccacctccacatataaagctaggcaagtcatttccttctcagcttcattttttgtatttgtgaactgagcatgattatacttgccttgtctaatgcagtctctgactggtaaagtgccttggctatagtctttttttcttagaatatggggtagggaacctaggtctgctgattgtttgtccattggtctttaattatagcgtgccagcatgtgtcttagtagatggggagaaggaaagggtgatttgtgggatatgaaataagcgaaactggaagtctatgtaaagaagtgcattcaggattaggggacagggagggcaggtggtgggagaggagaggtaggaaggcttggccagccaaagagagccttgatgtctgaattctaggagggagagaggtagatattagaataaagacagaaaatattaccttcgcttctgtcttttcttgtcttgtaggggatttgtggggccctttgatcctttgtgtgacactcgcattgtaagtacttgcattttctttctttgtcatttgagctagactagacttttttgtggatttccaaaattgtgggggattttgattgaatatttcatttaggacttatatgacatgttgtacatgttatactccttaggtatttaagcctctaaagtcactttccaaatcaattaaaatatgatgaaattaggctcaccttccttaaccaatgacattttagtctgttttagccatgtctattcaacaaacatttatttacttatttactctcctgttcctccctattattaaactaagtgaattaaggtttaagcaccctttgtttgcaaacataattctctgtaatcttactaaaaatatgaatgagaatgagaataaattaggagagttaaaagcaagatcatgtttcagagtgttgtacttttccatacacattgtaggtaaaggaagaggacggggaaggagaagaaggttacactagagagatgaatataaccattgatagagcgggaaaaaatactgccctggaattcagttctgagttcgcattctgactctgctgtcagctagctatgtgactttgggctactaataaccaatgtttgtataatttttcccagtttgcagaaaactttaaaatactttctcttattttaacctcattgcaataattaaaattattttatttttctttttttttttgacaaacaagctcaggttcaaaaaggttgaggatttaaccaagatcacataatcagtggtagacctgagattcaacctcaggtttcctcactacctattttgtacctctagggttcattacacatctcttcccacctggtcactctgggtcgcctcttccatatctgtaaagggagtggttgagggtcctttccaggcttaaccctttatgggtctaaattcactaagtttcttgctgacctctctaattttttaaatttaaattgagcatatattaatttaggtaataatgtagagtactatttcttatgcttttagtaaccatgttaagggatgcagcctaatgccttgatggaggggtttatattagatgtcccgagcatatatattttttttacttttgaaagtttaaccttatagattatgtagtttaaccccacttagttgcagagaaaactggagtcccaggacatcaagtgacatatctagtgacagaattaggatcagtatctgggtctcttgccttccaggctagttaatattctttccatcataccatgctgaagcaacagggattccagacaacaagtgatgagtgctggccattctttgcatctggttgtcacgacttggaatggaatatgcatatcatagaatacaaaagcctgtgcatactgccaagtagcatagcagggcaagaaagacttacagtgtgacttctctatactgtttaataagaagaggttgtgagcttacagttattatttttcttggtaataacaccaagtccaaatattcaaaacagtttatatctgtaaaattcttagacaaagaaaggatatttaagtggttgttcaactactcaattccaaagcaaaaccctttagtaataatctgtatgttttgattttttaaaaatcaacaactaaaaaggtttatagactgtttccatttttatttattatttttattttgttttgaggcagtctcactcagttacccaggctgagttggtggtgtgattacagctcactgcagcctcaacctcccaggctcaagcgattctcccaactcagcctttctagtagctaggactataggcgtgtaccaccatggccaactaattttttattttttgtagagacgggggtttcgtcatgttgcccaggctggtatcgaactcctggcctcaagcgatctgcctgtcgtggcctcccaaagtgctgagattacaggctaagccaccatacctggcctatttccatttttaaatatctcaactgaaatcttaacccaagaactacaaattctgatgtgtctaaaggctagaatagtaacctaaatgcatgtagtagtgatatggtgactgtaagccccttgtacttatgtcagttacacttgattgttgcagtgttggaatgcaggctcaatgttagaaagtctaacagttttttcaagaaaatctagaaattcatattcttatgtgaaataaaatagtgtcaacttaaattcaaaatcatcttaaatattatataagcccaaggcctcattatatatgagccacatttgacccttcagtttataacctctgcttaaaaaaaaggtcttcaataattcatttaaacatttcaacaaggtcaaatggagcaccccttgtagtcctgaggcatttggaatttgcagtaagggagccttgccaaatgcttgtgtcattttccttttagcacaacctacatattacagatcttcaggtgaggtatggcacagcaatctgattcaaagtttgagaacccatgccttaactttgttgccctaagtaaaagattaagcaattcttacgctgtttccttttctcagaatgctgcaaagagactctgcagatagtgaaaaagatggagggccccaatttgcagaggtgtttgtcattgtctggtttggtgcagttaccatcaccctcaactcaaaacttcttggagggaacatgtgagtattattaaaatgcattctttttttcctcttgccaggtagtatatcttagattaaggaatacaggctagctagatttttttttttttttgagacagggtgtcactctgtcacccaggctcgagtgcattggtgtgatcatggcttactgcagcctctatctcccaggctcagcgtcccaagtagctgggatcctcctgccccagcatcccgagtagctgggactacaggcatgtgctactatgcctggctaattaaaaaaatttttttttttgtagagatggggtcccactgtattgcctaggctggttttgaactcctgggttcaagtgatcctcccaccttggcctcccaaaatgctgggattacaggcatgagccaccatacctggcctcatattttgttttaaagaaaaatcaaactaaataagggccaaagagaagtgttcttaaaaccactaccactgtacagagataaccttgttaagttaaattatcttaaattatcagaggtcctttgataagcttcagatgccctttccaggccctgaaatcataggcagacttttttgtgtaagaagagtatgtacgttttggggggcaagtggtccctagcttttaacaaattctcaagtataataggtctataaactagaaaggattaagaaccactaccttagaggttcagagaaagatatctgtaggaactagagcagatcatctggtgttagatgattgacttttaaggaatttgagaggagaggaggaagagtatggggaaagaaaattaaagcatgtacttaattttttttttttttgagatggagtctcgctctgtccaggctggagtgcagtggcacaagctcagctcactgcaacctccacctcccaggttcaagcgattttcctgcctcagcctcctgagtagctgggattacaggtgcctgccacaatgcccggctaatttttttttgtatttttagtagagacggggtttcaccatgttggccaggctggtcttgaacttctgacctcaggtgatccacccccccacccttggcctcccaaagtgttggtattacaggcgtgagccatcgcgcccagccaaaagcatgtacttaataattaatgttaggatgtagatgttatgtaccaagaaggaggcaacattccgttacatagagaaatctatgtaataagctgtgtcataacacccatcagttgtatttatgatctttattaatgtattttgtttttaagatctttttttcagagcctctgtgtgctgggttactgtatacttcccttgacagtagcaatgctgatttgccggctggtacttttggctgatccaggacctgtaaacttcatggttcggctttttgtggtgattgtgatgtttgcctggtctatagttggtaagtatgtacttatttccacaataacagaacagacaaaaacatgatttaatgatgaagaccagatgaggagcagtataagtccaaagttagatgtgagtgatatgattcttgatagtattatccatagaaccctcttccctgagtaggcaatgatggggcttatctgagttggatatctggacttataagatgtggagagtcacatcttttttctttctttaaaaaaaaaaaaaggttgggaaagtggattacactacatttagcctagtcctggtatatacaaggcattaggtgacttgtggaatgactgggatcttttcctgataaactaattaaaataaaaataataacatttacagattgcttatcaaaggccaggcactgtttaagtgctttatatatattatcccatttaagcctcacagcaactctaatagagaaatactgttattagtcccatcttacagatgaagaacagttacagagaagttgagcagcttgccctaggttgcattacttgtgagtaagagagtcaaattgcaaaccaggcagtcatgaacctttaagaactatactataccaccttccagtgtagattgtaagtatcattatatagcacttttctgcttcagtagaacattttgctaaagactaggaagggcctatagcaatgataatgaatgctatgtgctcattgtttttatattcctaaagttctcttaagattccagcttaaatttagaagtgttcactagcttctgctttaatggataggcagactgcttaatatttttaagtgtagtaacatctcattgctctggaacatggttgaaagctaagaagtaatccaacaaaggtctgagagagccagaactgatattccaaagactgtatattaagcttgggtgcttttcccatggggagagcccctcattctctcactgagaatctcataattaccataaatgtaattatacttacttagttatccagtgtccaggctcacaggtgatcacgaagtagaatcataggagagagaaactttaattcagcaaacattaatcacaaactatgcgtcaggcataattttaggcatggtctttgtccttggagttcacaatctaacagagcagcccgacgtgaaaacatttaaaggcaataggtgttctaagtgggaaatggagatttatacacagtacagtgggacagacatgattattcaggaaagatttcccagagatgtgatgatgatgatgattagtatttgagacagagtctcactctgtcacccaggctggagtgcagtggcactatctcggctcactgtaacctccacctcctggattcaagcagttctcctgcctcagcctcccgagtagctgggattacagctatgtgccaccacatccgattaatgtttgtgtttttagtagagatggggtttcaccatgttggccaggctggtctcgaactcctgacctcaggtgatccacccgccttggcctctcaaagtgctgggattacagacatgagccaccgcacctggctgattattttcatttatttatttatttggctaaaaatatatatatatatatatgtttttatattattattatactttaagttctgggatacatgtgcagaacatgcaggtttgttacataggtatacacatgccatggtggtttgctgcacccatcaacccatcatctacattaggtatttctcctaatgctattcctcccctagcccccccagcctctgacaggccccagtgtgtgatgtacccctccctgtgtccatgtgttctcattgttcaacccccacttatgagtgagaacatgtggtgtttggttttctgttcctgtggtagtttgctgagaatgatggttttcagcttcatacaaaggatatgaactcaaccttttacgtggctgcatagtattccatggtgtatatgtgccacattttctttatccagtctatcattgatgggcatttgggttggttccaagtctttgctattgtgaacagtgcagcagtaaacataggtgtgcatgtgtctttatagtattacccagtaatgggattgatgggtcaaatggtatttctggttctagatccttgaagaatcgccacactgtcttccacaatgcttgaactaatttacactcccaccaacagtgtaaaaatatttctatttcttcacatcctctccagcatctgttgtttcctgactttttaatgatagccattctaactggcgtgagatggtatctcattgtggttttgatttgcatttctctcatgagcagtgatgatgagcttttattcatatgtttgttggccgcataaatgtcttctcttgagaagtgtctgttcatatccttcgcccactttttgatggggttgtctttttcttgtaaatttgtttaggttctttgtagattctggatattagccctttgtcagatggatagattgcaaaaattttttcccattctgtaggttgcctattcactctgatgatagtttcttttgctgtgcagaagctctttagtttaattagatcccatttgtcagttttggcttttgttgctattgcttttggtgttttagtcatgaagtctttgcctatgcctatgtcctaaatggtactatctaggttttcttgtagggtttttatggttttaggtgttacatttaagtctttaatccatcttgagttaatttttgtataaggtataaggaaagggtccagtttcagttttctgcatatggctagccagttttcccaacaccatttattaactagggaatcctttccccattgctggtttttatcaggcttgtcaaagatcagatgattttggatgggaggcattatttctgaggcctctgttctgttccatcggtctatatatctgttttggtaccagtactgtgctgttttggttaccatagccttgtagtatagttggaggtcagatagagtgataactccagctttgttctttttgtttaggattgtcttggctatatgggctcttttttggttccatatgaaatttaaagtagttttttctacttctgtgaagaaagtcaatggtagcttgacggggatagcattgaatctgtaaattactttgggcagtatggccattttcatgatattgattcttcctatccatcagcatggaatgtttttccatttgtttgtgttctctcttatgtccttgagcagtggtttgtagttctccttgaagaggtccttcatatcccttgtaagttggattcctaggtattttattctctttgtagcaattgtgaatgggagttcactcatgatttggctctctgtctgttattggtatataggaaggcttgtgatttttgcacattgattttgtatcctgagactttgctgaagttgcttatcagcttaaggagattatgggctgagacgatggggttttctaaatatacaatcatgtcatctgcaaacagagacaatttgacttcctgtctttctatttgaataccctttatttctttctcttgcctgatttccctggccagactttatgttgaataggagtggtaagagagggtatccttgtcttgtgctggttttcaaggggaatgcttccagcttttgcccattaagtatgatattggctatgggtttgtcataaatagctcttattattttgagatacgttccatcaatacctagtttattgagagtttttagcatgaagcggtgttgaattttatcaaaggccttttctgcatctgttgagataatcatgtggtttttgtcattggttctgtttatgtgatgaattacgtttattgatttgcatatgttgaaccaaccttgcatcccagggatgaagctgacttgatcatggtgggtaagctttttgatatgctgctggattcagtttgcaagtattttattgaggattttcacagtgatgttcatcaaggatattggcctgaaattttctttttttgttgtgtctttgccaggttttggtttcaggatgatgctggcctcacgaaatgagttagggaggaatccctcttcttctattgtttggaatagtttcagacggaatggtaccagctcctcttgtacctctggtagaatttagctgtgaatctggctggtcatgggctttttttgattggtaggctattaattactgcttcaatttcagaacttattattggtctattcagggattcgacgtcttcctggtttagtcttgggagggattatgtgtccaggaatttatcaatttcttctagatgttctggtttatttgcatagaggtatttatagtattctctgatggtagtttgtatttctgtgggatcagtgttgatcttcaatttatcagtttttattgtgtctatctgattcttctctcttttcttctttattagtctggctagcggtctattttgttaatctttccaaaaaaaacagttcctgtattcattgattttttgaagggtttttcttgtctctatctccttcagttctgctctgatcttagttatttcttatcttctgccagtttttgaatttgtttgctcttgcttctctagttcttttaattgtgatgttagggtgtcagttttagatctttcccgctttgtcctgtgggcatttagtgctataaatttccctctaaacactgctttagctctgttgcagagattctggtatgttccgtctttgttcttattggtttcaaaaaacttgtttatttctgccttaatttcgttgtttacctagtagtcattcaagagcaggtcgttcagtttctgtgtagctgtgcggttttgagtgagtttcttaatcctgagttctaatttgattgcactgtgatctgagagactatgatttccattcttttgcattctgttgttatgatttccattcttttgcctttgttgaggagtattttacttccaattatgtggtcaattttagaataagtgtgatgtggtgctgagaaaaatgtatattcagttgatttggggtagatatcttttaggtccatttggtccagagctgagttcaagtcctgaatatccttgttaattttctgtctcgtctatctgtctaatattgacagtggggtgttaaagtctcccactattattgtgtgggagtataagtctctttgtaggtctttaagaatttgttttatgaacctgggtgctcctgtattgggtgcatatatatttaggatagttagctcttcttgttgcattgatccctttaccattatgtaatgcccttctttgtcttttttgatctttgttggtttaaagtctgttttatcagagactaggattgcaacccctactttttttgctttccatttgcttggtaaatattcttccatccctttattttgagcttatatgtgtctttgcacgtgatatgggtctcctgaatacagcacactgatgggtcttgactctttatccaatttgccagtctgtgtcttttaattggggcatttagcccatttgtattttaggttaatattgttatgtgtaaatttgatactgtcattatgatgctagctcgttattttgcccattagttgatgccatttcttcatagtgtcgatagtctttacaattagttacgtttttgcagtggctggtactggtttttcctttccatgtttagtgcttccttcaggagctattgtaaggcagtcctggtggtgacaaaatctctcagaatttgcttgtctataaaggattttatttctccttcacttatgaagattagtttgtctggatatgaaattctgggttgagaattcttttctttaagaatgttgaatattggcccccactctcttcttgtagggtttctgccgagagatcagctgttagtctgatgggcttccctttgtgggtaacccgacctttctctctggctgcctttaacattttttccttcatttcagattggtgaatctgacaattatgtgtcttggggttgttcttctcaaggaatatctttgtggtgttctctgtatttcctgaatttgagtattggcctgccttcctaggttggggaagttctcttggataatatcctgaagagtgttttccaacttggttccattctccctgtcactttctggtacaccaatcaaaggtaggtttggtcttttcacatagtcccatatttcttggaggctttgttcattcctcttcattcttttttctctaatcttgtcttcctactttatttcattaagttgatcttcaatctctgatatcttttcttctgcttgatcgattcagctattgacacttgtgtatgcttcatgaagttctcatgctgtgtttttgagctccgtcaggtcatttatgttctctaaactggttattctagttagcaatttctctaacctttcttcaaggtggttagcttccttgcattgcattagaacatgctcctttagctcagaggagtttgttattacccaccttctgaagtctactgtcagttcgtcaaactcattcttcatccagttttgttcccttgctggcaaggagttgtgatcctttggaggagaagagacattctggtttttggaattttcggcctttttgtgctggtttttcctcatcttcatggatttatctacctttggtctttgatgttggtgaccttcagatggggtttctgtgtggatgtcctttttttgatgttgatgctattcctttctgtttgttagttttccttctaacagtcaggcccctctgctgcaggtctgcttaagtttgctggaggtccactccagaccctgtttgcctgggtatcaccagcagaggctgcagaacagccaagattgctgcctgctccttcctctggaatcttcatcccagaggggcacctgccagatgccagccagagctctcctgtatgaggtgtccgtcaacccctgctgggaggtgtctcccagtcaggaggcatgggggtcagggatccacttgaggaagcagtctgtcccttagcagagttgaagcactgtgcgctgctctcttcagagctggcaggcaggaatgtttaagttgctgaagctgtgcttacagctgctccatcccccaggtgctctgtcccatgaagatgggagttttatctataagcccctgactggggctgctgactttctttcagtgatgccctgcccagagaggagaaatctagagaggtagtctggctacagcagctttgctgagctgtggtgggctctggccagtttcaacttccctgtggctttctttacactgtgaggggaaaactgcctactcaagcctcaataatggtggttgcccttccctccaccaagctcaagcatcctaggtccacttcagactgctgtgctggcagtgagaatttcaagccagtggatcttagcttgctgggctccatgggggtgggatccgttgagctagaccacttggctccctggcttcagctccctttccaggggagtgaacacttctgtctcgctggtgttccagacaccactagggtataaaaaaaaactcctgcagctagcttggtgtctgcccaaatggccgcccagttttgtgcttgaaatccagggccctggtggcataggcatccgagggagtgtcctggtgtgcgggttgtgaagaccatggggaaagtgtagtatctgggctggaatgcaccgttcctcatggcacagtccctcatggcttcccttggctagggtagggagttccccgaccccttgtgcttcctaggtgaggcgattccccaccctgcttcagctcaccccccgtgggctgcacccactgtctaaccagtcccaatgagatgaactgggtacctcagttggaaatgcacaaatcacctgccttctgtattgatcttgctgggagctgcagaccggagctgttcctattcggccatcttgccagccacctcctgttatttttctttaaagagatggggtttcactctgtcattcagtctggagtggaatggtgcaaccgtaacatattgcagccttgaactcttggcttcaagcagttctcccacctcagcctcccgagtagccgagattacaggcataagctgtagcacccagcgagaggaatgattcttttttgtttgtttgtttgtttgtttgttttttgagactgggtctttctctgtcacccaggctggagtgcagtggcgccatcttggctcactgcaacctctgcctcttgagttcaaacaattatcctgcctcagccacccgagtagctgggattacaggtgcccgccaccacacctggctaatttttgtatttttattagagatggggtttcaccatgttggccaagctggtctcgaactcctgacctctggtgatccgcctgcctttgcctcccaaagtgctggaattacaggcatgagccactgtgcctggtcagaagggtgattcttgatgagtaaaacgatgattaggtttttcttagatggacaagggagggatggcgtttaaaagagctgacaatttcagaagcacagtta

SEQ ID NO: 914 - DNA, 4843 bp, Homo sapiens
  source 1..4843: mol_type = other DNA
atcgtgaggcggagcgcggtggggtgggtgcggaagggggcgaggcccgaggagtggagccgggcttgtgattgggtcttgtaagggcagccgggcgtctattggccggggaagccgtaatggcaggcagcaggggcgggccccttctggaaggttctaagatagggtataagaggcagggtggcgggcggaaaccggtctcattgaactcgcctgcagctcttgggttttttgtggcttccttcgttattggagccaggcctacaccccaggtaaaacctctgctcaagagttgggttgtgggtctgggagcgtgcagcctccacacaggcctgttgggcttgctgaggcttgggggttctgagaatctcgtcgaggcgagtgtgcggctccttctaccggcttaaagggcctcagttttcggtgggatggcagcggtatttggttgcagccggcaggacggaaatgtagggagtgggccgcagtggccccaggggaggctgggagacgcccggcggccgcgtggcgggggagggttgctgcatcggtttgcctggcgcgcggggaagtggagccagcgttttctttcacccagttccctgcttagtccagtcccaccgtggttcttcagagctgttcttggcgtgcttccagtatgggggtacattccggagtagttaaaagcccgttgactcccgggggcactggcacctggcgagggaggggaacagacagtgctcagttcggggtaagaccacgtgttgagcaacgccccacgccgtctgggtagatgggtccttcatctagggcgtgctctgctgcggttggcacggcaacctggactgcagcactagttctggacctcgcgcgtgcttagacaggaggtgatgggcactattacctcttggcagtggccatacgtttttcctggttaagtgttctgttaagggatgagggaaatattttgattaattgaatttttaaaccagatttttctttttttcagcaaccatgtccaagggacctgcagttggtattgatcttggcaccacctactcttgtgtgggtgttttccagcacggaaaagtcgagataattgccaatgatcagggaaaccgaaccactccaagctatgtcgcctttacggacactgaacggttgatcggtgatgccgcaaagaatcaagttgcaatgaaccccaccaacacagtttttggtgagttcctaattttaaatgacagaacaaatataacagggctaggaagcacaaaagtttatgaaacgtgaggagggaactttttgattttagaaaaactgagctgagagacttgttatcaagtctgttataaaacaggttgtagaaacctttcaggctgaaatctggataacgtaggaggttgaagtttgaacctttgctacctatatggtagttgaattcacctacctatgaactgttaggtatttgagtaatcatggacttgagttttatcagaagagctatgaaattgaaagtgttttcatttgacaccttttacagatgccaaacgtctgattggacgcagatttgatgatgctgttgtccagtctgatatgaaacattggccctttatggtggtgaatgatgctggcaggcccaaggtccaagtagaatacaagggagagaccaaaagcttctatccagaggaggtgtcttctatggttctgacaaagatgaaggaaattgcagaagcctaccttgggaaggtgaggttggtttttcagtatggggtgcattccggagtagttaaaagcccgatgactcccgggggcactggcacctggcgagggaggggaacagatggggctcagctcagggttaagaccacgtgcccaacagtgccctaggctctctaggtagatgggtctgtcaacaccagaaaccagtgaatcttgacaattacacagtaatttacattttggtggggggggtgctccagctgttctttcaccagcattaatccatttgctggagtttgcatatatgtaagtataatagttaccaatctgtggtcttttccttattcctagactgttaccaatgctgtggtcacagtgccagcttactttaatgactctcagcgtcaggctaccaaagatgctggaactattgctggtctcaatgtacttagaattattaatgagccaactgctgctgctattgcttacggcttagacaaaaaggtatgtaccatttgtgatgcaagttcggattattttaagattaatttgatccatcgtaaatttaaatgagattgtttttaacggcaggttggagcagaaagaaacgtgctcatctttgacctgggaggtggcacttttgatgtgtcaatcctcactattgaggatggaatctttgaggtcaagtctacagctggagacacccacttgggtggagaagattttgacaaccgaatggtcaaccattttattgctgagtttaagcgcaagcataagaaggacatcagtgagaacaagagagctgtaagacgcctccgtactgcttgtgaacgtgctaagcgtaccctctcttccagcacccaggccagtattgagatcgattctctctatgaaggaatcgacttctatacctccattacccgtgcccgatttgaagaactgaatgctgacctgttccgtggcaccctggacccagtagagaaagcccttcgagatgccaaactagacaagtcacagattcatgatattgtcctggttggtggttctactcgtatccccaagattcagaagcttctccaagacttcttcaatggaaaagaactgaataagagcatcaaccctgatgaagctgttgcttatggtgcaggtaacaatggtatctcaattaaccctaaaggcaggcaggcccaaggtgactcgctgtgatgagtgattgttaaacattcgtagtttccaccaaaagcttggctaatgatggcaacaccttccttggatgtctgagcgagtgatagttaaaacaggagctatgtactgggttttcttttaacttcttttaacgttaactttttgtttgctagctgtccaggcagccatcttgtctggagacaagtctgagaatgttcaagatttgctgctcttggatgtcactcctctttcccttggtattgaaactgctggtggagtcatgactgtcctcatcaagcgtaataccaccattcctaccaagcagacacagaccttcactacctattctgacaaccagcctggtgtgcttattcaggtatgtttctgtacttctcttgtttggcttactgataacagataaagggaagtcttgactgactcgctatgatgatggattccaaaaccattcgtagtttccaccagaaagtcttatgttggccagttccttccttggatgtttgagcgaccattcttccttagcaggaccctagcactgtcacagacctggagtccattgtagtaatttgttttatttcctaccaaggtttatgaaggcgagcgtgccatgacaaaggataacaacctgcttggcaagtttgaactcacaggcatacctcctgcaccccgaggtgttcctcagattgaagtcacttttgacattgatgccaatggtatactcaatgtctctgctgtggacaagagtacgggaaaagagaacaagattactatcactaatgacaagggtaaggaggcactgtcatctggtcttgacagggataatggtatttcaattgagttactggtgcctaagggcgtctagctaagagaaactagagttacacatacacaggtaatttaaggcttttacttagagttaatttctttcctaggccgtttgagcaaggaagacattgaacgtatggtccaggaagctgagaagtacaaagctgaagatgagaagcagagggacaaggtgtcatccaagaattcacttgagtcctatgccttcaacatgaaagcaactgttgaagatgagaaacttcaaggcaagattaacgatgaggacaaacagaagattctggacaagtgtaatgaaattatcaactggcttgataagaatcaggtttgtgttttttttttttttttttcctcccccactcaatggaggggaaggggatggtaaaccaagcttgagctggatttcagtgtagggtcacaatgatgaatggtccaaaacattcgcggtttccaccagaattcaaggtgttggcaactaccttccttggatgtctgagtgacccaagatgttaaggaagaataaggccctattttaatgttggtagtggccctcttgtaagagtttgcgccagacttttagtatcagattgcgtcagggagaaagaagggttattaacattaaaagaacttgcagtaattcctttttctcttcctcagactgctgagaaggaagaatttgaacatcaacagaaagagctggagaaagtttgcaaccccatcatcaccaagctgtaccagagtgcaggaggcatgccaggaggaatgcctgggggatttcctggtggtggagctcctccctctggtggtgcttcctcagggcccaccattgaagaggttgattaagccaaccaagtgtagatgtagcattgttccacacatttaaaacatttgaaggacctaaattcgtagcaaattctgtggcagttttaaaaagttaagctgctatagtaagttactgggcattctcaatacttgaatatggaacatatgcacaggggaaggaaataacattgcactttataaacactgtattgtaagtggaaaatgcaatgtcttaaataaaactatttaaaattggcaccat

SEQ ID NO: 915 - DNA, 32742 bp, Homo sapiens
  source 1..32742: mol_type = other DNA
gagcccagtcgagccgcgctcacctcgggctcccgctccgtctccacctccgcctttgccctggcggcgcgaccccgtcccgggcgcggcccccagcagtcgcgcgccgttagcctcgcgcccgccgcgcagtccgggcccggcgcgatgggggccgccgccggccggagcccccacctggggcccgcgcccgcccgccgcccgcagcgctctctgctcctgctgcagctgctgctgctcgtcgctgccccggggtccacgcaggcccaggccgccccgttccccgagctgtgcaggtgggtggcccgcccggacgcaggctccgctcgcggtgcccggggtgagcggccggcgtggggggcggggagcgctcgaggagctcctggggtctccaagtcgcctccgttccgcgccggggtccgccccgttcccgagggaaagttgcctgcgtggtgtccgcgagtcccgccgggtcccgtgcgcaggcggggggcgcgggggcacacgcggtcgtggcggtcctggagccccgcgtccggccacttgtggctgtcgctgagtcgggggtggctttgtgcggagcggtcgccccggcccttggggtcggcgcctgccctcgcgcggccgggcgtccgggaaagttggaggcaggaactccagtttgctttgttcccgctgcgcgtttgcatcagagtttcgccagcggggcaccggtgaggcccctcggtgtggagaggctcaccggggcgttggagcccgcaggaatggtcctggagttgagtgtttgtggtttcatttgctgattgatttccccccgtgggctcattttctctttaaagaatatatatatatatatatttttagcaggcggtgacttttgtcttctttagattgggggcagggggtgtcgtccagtgtgagctttcaagacttgacccttcacttctctgagcccaacttcctgcctggttgctcacatgatgtcattgtctccggggcggattattctagtggatcttgctctgggaaccatgattgtataacccatcagtcccatcgagggctgttcacctcgcgcaactgctagcagtccagggcctggggaacttcgaatttcaggaattttctgaccatccttttctggactgtttaggatgatggaaaattcagcttttgtttatttttttaaactttggtaaaaaggaagcaggatgaaaagttttgaacagacaacagtttctccctgttactgttacttttacaagttacttttacaagttacttttcagagtgaaacaaagttgagcctactttgggctgaacttggagtttgtggtagggtttatggggggggttcttatttttcccatgcatcagagatagttttattagcacccctgtgttcagaacatgcagaaattagtctaaggagggtgaggctgatctcacgatagaaactctttggaaaggcccatattttttatgctcccttttttggaaggggaagggtggatggagggagagtttgtgacactagtttaaagaccagttagctaccctaagatacatagttactccagtaactagtatgatacagagaaatggtggcagcttaaacgaggtcaggctgagaacaacatttagaggaaggcattttggaataatggcttctgtgaccaaaaataagaaattaactcgcctgggcgcggtggctcatgcccggaatccagcactttggaaggccgaggtgggcgggtcacttgagtccaggagttggaggccagcttcagcaacatggcgaaaccccgtctctacaaaaaatatgaaaattagagccgggcgcggtggcacactcctgtcctcccagttaagggaggctgaggtggtaggataacgttagccccgcaggtcgaggttgcagtgagttgtgatcgagtcgagttgcactctagtctgggcgacagagcaaggccctgtctcaaaaataaataaataaatacaataagaaattaacccagctggcctagtgtggttgaagtcttggtcttgttaacaaattgaagtttgttttcttcacagttaagattaaggtggcttcaagggcagactgatactttggctgattgatgggacccttacttttgcattaggttagtcatggcagtgtcttgaacctgtgttcacgaacttcatctccaggtggaacacggcctcttggtctagtaggaatggcctttgtatctttacgtttttctggccactgtcacacgtgggcatacttagcaaatgctgaagaggtttctgaggttgatatgcattgtgaatataataagatctgccctttgtagtcttagaatatcttaaaagttgtgtttaatttttctgccagattttcttaggatgacaaatctgccaatcatttcagagacggattttcacccacctctttccctgttacttccctgtagttgcacatgcagacttctccagaaccacttgcaatctctactttaaacccaacatgtgccaagtgaacttcctgtctgttcctgttttataattttttgaggcagggtctcaccgcgttgcccaggcagaagtgcagtggtgcagtcatagctcactacagtcgtgaactcctgggctcaggcagtccttccacctcacccttctgtgtagctgggattacaggtgtgtgccaccccacttggcttattatatattttttaaaatttttaatagagatgacgtcttgctatgttgcccaggctggcctcaagctcctatcctcaagtaatcttcctgcgtcagcctcccaaagtgttgggattacaggcatgaggcaccatgctgggtttatgttcctgttttaaactgatacctctccttaaatactttttgaaaacttttcttggggcgggggaggttatcagtcatctgtacttttatgagataaaactggctaaaatttccgtaaatgtagcatgtagttgaggaataggaatgtaagttgattttttttttaatttgatacaaaaaattttatcgtgtcaccaaggtgtgacgtgttaagctccattttaattttgttcctgggcatcagtttgctgaaatgtaaataactcggccaggtctccactgtgagcatgaaaagtcgagtcctacaaatgtccccgtttgtttttgctgcttggtcacatggaggcagtcccaaatgtacagaaggatcacattccaaatgtttgtaaattggtaatttcatacgtggaatgtgtttttccattgatagtattcttgttcattgtatggcccccagaaagtcattatccttgcaaaggttttggagcacccagacaccatatggctttaacagaatcctagccgtaaattctcattgtctctaaaagatggagttggatttccaggaaaactacctctcctcccaagcccagctctctagaacctagagagaatatttttcatctgcagtcgcttagacccacaagagggacatgagggcctgcttcaggggtgcctgcgaggcaccttgtgggggcaaagcttcaaggtgacctttggctctgagcactcctgggatggggtgcggttcctggtgcagttagttattgggaggaacgaaggagacagcaccatttcagcagcagctttaactgtgtccgtgcacgtggaggggcctgccctctgagttgtgcattgaacagcaggcacgacaaaggctcatttcccaaagtgtatctggcttgaagcagcgctttaaataagtgcatggttttttttggagagactcagcaaagcatttttcaagtgtcaagtggattacttgccaggtggtcccagtgctgagttagaagttaatgattcttatgcaggtatttcttgggaggtgatattgctagtacaaagttagtagaaaacttgtttctgaggctagtgtgataggctgtgggactggcctgtagaaaagacctggggcaggaaggagtgttgaaggtcagtggagggcgggaatagtagagcaagaagagagggcattcaggaggagaggagcagaggccaggccatgcaaaaccaacaacagtgtctaaagtgatctcagcttgtcagtggctttacttattaccatatgctttaaactttgtaaaatgtcatattatatatgtaatatgcaagtttccaccctttagttaggtgttaacaagatgcttaatgggtgaggtcttagcagtgtgcattaatgataaaataatgctttgggatggttagatttaaggtagttaagagcttcaaaatttgtacaggacaagttttccccaaattgtttaggtataaatgctagaaagtttttattatattgaggacaagagaataatgaagccagctgggagttgaggttggtttagttactgtctctaaggagatttttttttccctgtaatttttccaaaggaacagtgcttatatgcctaatttgggccacatgttaaacctggatcacatccatttgtgtgtgtgcatttcaacagtaagtgtatgtggaagcctaaggttgttaattatggttacattagatctcatggattaattctcagaacagcatcctgacagattcccaggaaatgaatgcctgcgttgggcctcacgtcttttgtcagcatttcatagagagagggatttttaaaagatggggctgagagaaataattgagatgttcccttccctattttgatcttggtatataaactattgtattggggaaagaactgagcaggctctagaactgagcctagtggcagagagtagcttatcactttgcaggtgctgttctttttcttcctccttttcttctttggattgtcctagccacagagagctcttgctaatgttgtaactggtcatgaatggtgtatgaggaggtgggcgtagcagctgtttgacttcatgggacccaccagactgtaatgccgaattacaattttgcatttccaccagtgatgtatgagagttccagttctatatccttgtcaacacctgtcagtgttaggtttagccattcaagtggagttgtaatggtatctcagtgtggtttcagctttcatctctctgctgactcatgatgttgagcaagaaaggaacatcttttcttgtatttattggaatcctggatgatgttcaccattatcatgtgcttactgactgggtattttttgtagtgtcctttaaaaatcatattttgtcccttttaccccttaaaaattgtttttgggttcttctccttattgagctttaggagctcctcatgtcttctgggtacaagttctttcttagatatgtgtgaggtatgagtgttttctttcagtctttgccttgcctttaaattttctcagtgatatcctttgaagaacagatttaaaaaaatttgatggactataactttttatggtttgtgcttttggtagcttgagaaatcaaccttaaaactagtgacatttgacctgggtaattttttgtttggagggctatcctgggcattgtaggatgtcagccagcattcctggcctctactcactagatgctaagactatactctaccactccccctcccccagtggtaacaaataaaaatgtctccaggcatatcaaaggccctggaggggagggggcaaaatcacatccaattgagaaccactggcctaccccaaggtctcaaagattttctcctgtctctgcctctagaagttttttggttttaactttgattccttaactctaggatcaatttttgtggtttaatttttatatatgatgtttgaagaaaactcaaaccatatttttcctttgctctcattccatgaacagtcatcaacacagaagacctccgtaatcaaatgtgtggtcgtttttccccaggcaccaagcagtgacccctggccaattcaattcctgaccctgtctacctggagatagtgtcagatgccacaggtttggggctcagttcccgagaccgctccccaccccacaccagtcacaagtccgggcctctggaacttctgaccaactggcttcaatttggggttcccagagtgcctctttgggtctgattaatttgctagagtgacttacagaactcaggaaaacactgatgattagcagtttatgaggatattacaagggatacggatgaagagatgtttagggcgaggtattggggaaggggtgcggagcctctgtgacctccctggctcactaccctccaggaattgccgtgcattcaactatttggaagctcccccaacccagtttttatggaagcttcaggaggtcagcatttcttctcccgggtatagggtgggaccctcactggggaggatcttaagacccacagtccaaaagcagggaagatgagagtcctaccttggggcaggtggaaggaggggcaggtggagagattgtttcctgaggcctgacacacccaacattataacaaaagaccaatactaggactgtggaagttggcagccagaaaccagatgggaaaaaaaaacccatacatgtattatatatatttatatatatatatatataaagtatatgtattgtgtatatattatataagcatatttattatatatatattatagtgtatattatatatgtattatatataatatataatatatagttatatataatatatacacacgcacatatataaataacaccacaaaaagggtaaaagtttatttatttccatgaatatatctagttctgtttactaatactttatgaaatatgcttacagctctgtttttaagtgagattgggctacagtttttttgctctgctgttcttgatggattttgttattaataatatgtttgctttgtggaaggagctagttagcttttagtatttttgtatgtggtgaaacagtttgtatataagatggacattttctgtttcttaaagtttggtagaattcaccagtaaaactatctggccctggcaggctcttaggtggaatatcatcggggaggacttttgattatggttttttctagttttattttcagttttatctagtttatttttctattcagattttctactttttcttgggccaattttggtaatctctattttcctagaaaattgtcattttaattgtgtattcatatttaataagtagcatgctactctcatatttttgatactctatagctctaggtaaatttttaaaattcctgatgtttacttgtgtacttttttcttaattatatttactaaagacttatttacctttttaaagtctttccaaaagaactagtgttttgttttttcatcttttcaccttttatttgcaattttattaatttatccactcagtaacttctacatcatttttctgtttctcgtttgacttgaatgcttagctcttttattttaaatcattttgcataattaagaaatatatttaaagcttcatgtttctttcttcggagtaccataccactcatagattctgatacttttttttttctccatatttcaattttgtgtattccctttttggattcaaaagttctatctgtttcaacttcctggacccactaaatttttagatttttatttttttcaggtccatggactttgggggttttaaatttattttttccattgtgcgggtaaatgtggtggaacttactgacatttcccttgtggcctaacacctagtcaagttgggagggtattatgtgtttggaaaaaaagttctctgtttgggtcaaagttactcatggtgctgttcagcttttctttgccctaactcttcttcggtttgtctgttgcttttattatttgtatctggctgccgctgtggacaggcatgtagctggatgtcgtttgctgctgtcgcccagcttaccagttctcccatggttcagatgttcttctgcttccctgttgtcttttgttgcagaatctcagctgatgtgtagtcacagctgcctgttctttctgcgtggacgctgtagcttctgtcaaccctctgaagatctctcttaaagttctgctctgattgctctattaattatttttccttgggcccagtttctttggtttgagtttgtcaccatgattgcatggtgctggtgcccttgcagtgacaggtgactcctgaccgtgcactctgcagtgggtctccacccgaccttggctgcctccttgtgcagctgcgtggggtagggctgggagcagttgttggaatttggctgtaaattgttttcagggagactaggggatgggcaggatgtgcctctgtggctgttcttggcgctttaggtcctttccaccctcccaatgtcacccccaagcgctgttctgccaagacacagctgctaaacccctgttgattgctgctggcagcgtgtggcctgagacgggggatctggattgttgagttggctgtgtccaatcacttcttttctctggacctcattttcctcctcaagaggggtgggacttagttttctttctctctttcctatttgaaaacctctcattagggagttagttttggaagtcactttcctgggcttgaatccagactcctcccctcacaggccttgggcaagtcacagaacctctgaagtcttcctttccgtgtgtgtccagtcaggatgctaaccatgtttgtaggctaggcgtgggatgctaaccgtgttgtaggctaggcgtgggatgctaaccgtgttgtaggctaggcgtgggatgctaaccgtgttgtaggctaggcgtgggatgctaaccgtgttgtaggctaggtgtgggaattggaagacatttgaatgcctggcacgtcctcggtgttcattggtgctgtagtggtagcagttgctttatctgtaagttacagatgctgccttacatcagggatttatttttataacctgtttctcgccctcccagagctctccattagtgtcttggggtttctgcctcaaccagagagcatttcttcttcatctgtttcatgattggcactccacgtaagcttcctcatgagaaagaaaggtttccactgtttaaaaaagtttcaaagccactggactccgtgatttccgggtccattttgcatcccaaattctgcagttctgaggtttgcagccttgaggagtccttcctcactcagattcccccaaacaatgaggagcttgataattcgaggtgtggagtttggatgggggccgggggtcaccctcctgcatgtggtggcttggtcccaggctaggctgggagaaagggggctgtcgtggttccagggcaagaagagccgtcctccctgtttccctgtggtaggatcaggaagtctcagctaacttctgcacatggtcaagggggtcctgtcctcacttaggcctctccaggcctccctggagggtggaggaatgggtgctgttgtaggtgggaacagaagtgtccaggccagtggcttggatgtgaaagtgcttcataaattccaccttgctgtgcaacttaaaaaaaaaaagtacggtcgtttaggttttcgaggtgcccaaagcaatgcgtcataagcctatttttgtctccgtgttagccagggcagaggggcactttcctgtgactcctccagggtggggaaaatcccaggtgctctgtgaacctggccgttcagccagctgcagacctttggtaggagttttctttttccttttgtgtgcttttcgatcccctgggggcaaccattattcagtacatctggagggcaagttgtccaggaagaggaagcagatcctaggagtgtcgtccttcactgggagaggtgtaggaagtgagggggatggtggaagtactggcccgagctctgttttcaggagtgtgtgacagcaaaaactggcctttgcagttgagttgcctgtgggctatggcctagagggaaggccaggagggtcttgctgttagggctgccaccttcttcatgcctgctgtgtgctgggaggagagagctccttcagagcggacccaccattggattttgagtgtgtgcaaaattaacttgttgctatctgcatggttatctgtactccagaatcagttatacattttaaaacagctgtttagtactgaaaaaactcccccaacactccctgcgccccaccctggcctgcaaatagagtgccaagccaccagaatagaagtgctaaagtagtgagtttcctagaagtggcaagcctgagactccagtgagtcaccctcattgttcccctgaggcaccctgcctccacctgctctctgctctcgaagcgtcagttataccagcacttctctcttctcttttgtctctttttacagtcacccctttagagtgacaggcagcgtgagctcatggccttgactttgctggacatgcggagggagaggagagctggtggcagagtcgggggttgggccctgaggatggggctgttttattggagagtccgctgtcaccaggcctttctgtaaaaggctggaagtgagcgagtgaaccaggcaccctggtggggggcctgcatgtcagacccagcgggaagcatgtctgacttggttgagaggcagctaagggcccagtgtgtctgggtgggctgagccattgggagaatggagggaggggccagagagcacggaggattagctgtggccagatcacagaggctgtgggactttgggctccctctgggtaaaagccagagcccttgaggacttcagtagattggtggattgaaaggcacatgggccggtgctgtggctcatgcctgtaatcccagcactttgggaggccgaggcgggtggatcacgaggtcaggagatcgagaccacggtgaaaccctgtctctactaaaaatacaaaaaatcttagatgggcgcggtggcgggcgcctgtagtcccagctactcgggaggctgtggcaggagaatggtgtgaacccgggaggcggagcttgcagtgagctgagatcgcaccgctgcactccagcctgggcaacacagtgagactccgtctcaaaaaagaaagaaagaaagaaagaaagaaagaaagaaagaaagaaagaaagaaagaaaggtacatggaagattcgattgcttggattgccttagggaactatgagatccctaggtgagggttgcagttgagcatggtagctgcttttcctcttcaggttgcctttaggctgcgatggagatagcatgagctctggagcaggacaggcttctttctaacatgggcttggccactttgtgaatttgtgatcagagacaaggtcacggacctcactgggacctccctaggctgtccattctgagtctgtaagaaggtggagaggggcagccccagctgggtgttaggctttgcggagcctctgctgtctgatgtttggctccagcatcttcaaagcaggggcttttctcctctgtccacctgattggcctttgtgaggaaccaccacctggcggtggcctcattagcatcatgggccagccagctgagctgacagcccgcaggttttctagaaaggcccaccttcccttgtagtttgcacactccaggaagggccctgggtctgggagggttttctgggaccttggtgacagggagagtagggggctgaacattaaggtctgaattctgcgctgggggctggattgtccttaaaggcggttggcctcagacatccacatggcaaagcagggagtttagcccatctacaactcttctttatacatgaggagcaaagtatgagaccgcccaggtaattgctctgattggaagaaaatcatcacggagcagggtttagggttgaaatactggcctgcatcctgtactgttgagttgatctgagccaaggatagcagagaggaccagccatttttgtggtagctttctgttgtggagggcacttgcccacctcctgggaacgccacaccctggtgtgtttgcccttgttctgtttcccctgctgctcttctgctggaagctctggactcacctgtctctgttgtggatggtgcagggcgggcaggccagagtggcatccttgtcctgagaggtcccaggaggcagttgagtgtgtatgtgtgcgtgagtgcgtgtgtgagtgcacgagtgtgtgagtgcaagtgtgtgtgtctgagtgtctgtgagtgcaagtgtgtgtgtctgagtgtgtgtgtgtgagtgtgtttgtctgagtgcgtgtgtctctgtcttcatcagctcctaggagatgcctccggacaggggcctgcccgtctctccctccagttccttgccagtgtcatgtgacactcctttcagagggcaccccccgcccccagccaactcacctttttttgtaaacttagtttttaagcagtccaactctctctctggattcaaatgaaagctttagatcatagtctgtttcgatagctctgtgttcctggtggtggttttctcctcacaatgaccttgtaggctagctgagttttgtcgaggaagttgagctgggagagactggctcacacagcttgttagtcagcgctggggcaggaatctggcccaggcccttcatggcacctttcttagggtagcgtgccccctctctattccaggtgacctctgttacgcagtccccattgcctgccctggttccctgggctctgacatcaacttagatgtcgtgtttgacttagggcttccagccggatccctctccatacaccgggcttccttccagaccctgcatacctctcagggaaaaccaaaggctgacgtttggcatttccctgcttctatttatttgtatttgtcggccctgtatctttgtccacagctttgtgggtttgttagaataggaagtgaagtacttcctatataagctctggccatgctgtgtcaaactcacgtgcttccccagccttcagctcggggtaggagtcttcatgcaaatcagattgtttctcttttagtgtaggcaacagcaagttgttgacgacagtggttaccttaggctcttgacattctgctcccaaggtccagtgtgggaaccctgcctccttgctcctcttccttgctgttttttccctttctccttagttaaggagactggtctggatttctgaaggtgactgtgctggatatgtatgagctgaaacactgtctgatactgttgagggacagtagtgagccaggtgatttcttgaatactctgttagaggacttgcgtgcatgtcgaaagtaggagaatcttttttggatgttcaggttggaaacacttcacattctctttgtctccaacatgttagatttgttgcttgctgtagactcagagaaacatttctctagctagtgaccatgtatcttgttatgtgaatttcacttatgtgtcaccaactgggtttctgtcttttaaggaaaccaaattacagattcacacgtgcctacttttattattactgatcccatcctgcctttatcttgctttattaattgcaggccagtagtaaaatgtttaatagttacatgaccattagcataaccccaagattcacagggactgaggaaactaagatatattttaaaagagtttggatatatggcaataaatgaggaagggacagagtgatacttcatggagatgttttgtgttgaagggaaggaacccagttttctaagatttattttctttaagagattgagcataccatatattttgatcatagaattttacatactttagatgctagctgtttttaaaaggaaagaactccaaattacatcttgcaagctattgtggttttgcaagcattgagtgatggcatatatgaaaactctgagaggtgtcatattaagataccaatgtcagtttaaagatattctatatctgtatccctatgacattgtattttgaattttttatttttcatttttggacagacatttagaactcactcagtggagatggctctgcatctctgttttaagctttttgaactctaggcagctgtgtcggcctggggctacattgacttcttcattgcagcccctcgattggtttcgtctggaccagggtgggtttcgattgcggcccttgctggaacagtagcaggaaagtagaaacaccttcctgtctctgggttaaccagctgacagtctgttacttgtgtgcttccttctaattggtaatctgccaacacctttcaggatattatgaaatttcaagcaaatgaggttaaaatggaacctctgtacttctgaacaggcgtggactgactgcagttctccaggatagtttcagcagaagcagtgagattacagtcaggagcaaaacagtatctgagctttctttatgggaaagattccgactgtgtgcttggtttatatggttaaattaattgcccttgttaaattaaaaaaatagggtatgtttctgccacagactttgctttaaaagcagagatcttctaaagtcatttgccttgtatttgacttctgctgctccccgtttcctgctgggcctgatggtttgattgtagaatgtttctgagttgtgtcactgttggactctgctgagctgagtagtctcattaaaggagagtgtgcatctgagttgaggaagacaatatagatgtggaccttgtttgtagagttcacaagctgcttacatagaaatagcaaggacagtgcagccagtgggaaggagccggctgagggacttgatattatttccatggaaaccagttgggtatgggaagagaggttgtggaaggcaatgctctggtgtttggcaattcacactgtgcagaagagaaagcagaactggactgggagtatagagtagcagaagtttaagcttggggaagaagttgagcaaggaaaagcatatgatctgttgatcagcatgatgtgatgtggtctgaatcttcagacagttcacagctttttcatagaggctgtcctcagatgggttcaaccattctgagaattctgcctttacgatataagtagtatccatgacattaaaaacgagaagagaagcgttttggccaatgacggactgcataaactacagtctgcataaatgaccttggtcctagaagattaggatgaagctgaacaattcttatcacctagtgatgctgtagccattgtaatgtcgtagcacaatgcattagtcacatgtttgtggtaatactgctgtaaacgaacccactgcgctaccagtcttatgaaagcgtccagtcaggtcctaggcctttaggtccactcactcactgactcacccagagccgcttccagtcctgcaggctccattcattataagtgccctaggcaagtgtgccattttaatcctttataccatatctttgctgcaccttttctacgtttagatatgtgtcacatgttacagttgcctggggtattcagtgcagcgtcatgctgtgtgggtttgtagcctgggaacaataggacataccatatagcctaggtttgtagtaggcgacaccatctatgtgtgtgcagatacactcgatgatgtttgagcagtgacagaattgcctcatgacacatttctgatgacgtatcgccattaagtgagtgactataaaccagtccccccatcagcagttacacttcctgaggtttcagttacccatggtcacttgcagtctgaaaatatgaagatattttgagagagagatgccacattcacataccttttattacagttataattgtgctattttattattagttgttaatcttttacaactaatttataaattaaacttaatcatgggtatgtatgtaaaggaaaaaccatatccgaaaccgtattcctggttccaggcctctactgggggtcttgtatctgtgattacaaggtgctgcgaagggataactgtaatttttctatatgactagcattttattgaatcaagttgtgtagatggttggcaatataataggaactcagagatctttatgccatacagagtctgtccttttaatggcatttattgtgacaagatttaaactaaagttttgtggaatgttttgccagtttttgtgttgtaactgaaactaaatgttttctgaaaagttaaaaccatttctttaaatggaaaataaatgaagccgtttacctaattggttaaggactcacccgtgggcctcacaccgcctaggttaattcttcactttataattccgtgatgttgggcaagttcctcattctgagccttgggatatttggcttcaaagctgaggaacttgggagggttggataatggcatcacgttctgtggggagatttggctcacatgttagctgtgtgggtgagagccgtgctgtcatgcgttcttagccactggccagtttccttctcaagccatcagtagagatgctgatcctgcatctgccagtcattgctccaggagggaagacattactgtcccagagtgacggtgtcattggggataacagacacttcagaaaatgccaccactgagctgtatgaagtgccatggcagctagtgctggagctgtggattcagccggggagcactgtctggaggagctgctgcagcacatgtgtgtctctccagctgtcaggctggcctttggagtgcatttggattttttgagaatgagagagggaccattggctaactgttttacgctctgaaaaatgacatagaatagcaaagattttacttatttttgctgattttctagaacattttctgtcccagagtgatggttttgaagaaccagcgttcttggaaagatggttttgcatccagaagagtgattttaactaaaatcaggctgcctcccttgaggatggtcactgaattttgtacaactgggacaacggacagggatcctgggttgtttccagtggacaagccgcttctgtgggggcctttgcagttctccccgctcctctcctgtgtcccgctggtttccttcagttgagatggaatacagcatagagtcagtgacttttagaagacttgacagagtttcaggaaaatgctcactgggctttcttacctatcctgctgcagaactttttttttttttttttgagatggagtctcactctgtcacccagtctggagtgcagtggtgcgatctcggctcactgcaacctccacctcctggattcaagctattctcgtgcctcagcctcccgagtagttgggactataagcgtgcgcgaccatgcctggctaatttttgtgtgtgtgtgtgtgtgtgtgtgtgtgttttttttttttttttaagtagattcagggtttcaccatgttggccaggctggtctcgaactcctgacctcaagtgatcctcccaccttggcctcccaaagtgctgtgattacaggcatgtgccactgcgcatggcctgaagttctttctttcagaaaatgtattcaacacattcttttgtgtgtgtttgagtgaagacggtgtttccacacagcttgcagatactttcttccagaagcttgtttgttgctaacatttaacatcttactgttacagcttagttttctctttgattgaatatattgatctctttttttttttttctgttggcttttttcttaagtctttacttgtgtaagctcagataacttagtctagaatgtaggctttttctgggaatctcagctgaatggtttcatttgcttggctgttaaatgaaccatactgtttggaatagtttcctaattctggctgtacatgttcacttcaggtagagaattttctaacagacaaactttcagacaaaaaatttattattcctcaaagatatcattacattttatttagtctgtaataattttattgcttctgaaaccattttctagttctataatgtgatcatggtgcttttaaactttaatatcaagttaattttaagaatgattttagcttaggccattctaggggcttggcctttaatctgaaaagaaatttagaatcctttagtttcaaacatgtgatttcttaaaacttgttgtcagttatttatacgattttcaagtttattatgaaatagtctttaaaaaatatttactttagtggaaacatatctagtgatagtttaaccagggtgcataccagagtacataatagtttttggaatattcttcataaattttcagagagattatttaaaccacatgactgtttctgagctcctgttgatactaggggctaggcatattcgttttttctttttgagacagagtctcgctgtgttgcccaggctggagtgcagtggcacaatctcagctcactgcaacctctacctcccaggttcaagcgatactcctgcctcagcctccctagtagctgggactataggcgtgcaccaccacgcccggctaatttttgtatttttagtagagacggagtttcaccatactggtcaggctgatcttgatctcctgacctcgtgatctgcatgcctcagcctcccaaagtgctgggattacaggcatgaggcaccacgccctgccattagtttgttttaaaggagacataatgtccgttgaaacatcagaatgttttaagtactgacagcttgcaggtgtctttggagtgaagtttagaaacctgctgtgaccattcttcattttaaagctgtgactaagaactctgagatattggtgccttcgcctcaagtgctgctgatgggtttgaatggcattgaggttgccaggcctggaggagggctgccttgtgctgagtggttaaatcacccccctgaaaaaagtcagtgtttcaagtattttaataggctcctcctttcctactcccataaccacttacatttgataaatcttgacaaaacaagtatgaaatccaagtagagaaaataatataattgaatagagcaacacttttctttctagcaaccctgatttccagattatcaggacaatatccctcattttattcttttttaaatcttgattctgctccccaagcaaacacactctttaccttatttagatatcccctttgcaagaatggtggatttcttttaagaaaagcatagcaggccgggcgcggtggctcacgcctgtaatcccagcactttgggaagctgaggcaggcggatcacgagatcaggagattaagaccatcctggctaacatggtgaaaccctatctctactaaaaatacaaaacattagctgggtgtggtggtgggtgcctgtagtgccagctacgggaggctgaggcaggagaatggcgtgaacccgggaggtggagcttgcaatgagcggagattgcgccactgcactccagcctgggcgacagagtgagactccgtctcaaaaaaaaaaaaaaaaaaaaaaaagaaaagcatagcattttaggtacgtgtggatctctttagcgttgattcctaccagttaactcattttaaatgacaccctcatgcaccaatatcatatacttaggattgtgaaatagtttaatgatgccactgccgctacttgaagtttgtctctgttatcctggagaaactagtcatggctcctgaataagagattagcatttttcctgagtagtagccaagtctttgtttacttgtttatcttgtatcctgcaacctggaatatacactccgagagggcagggcgtctttgttttgttcattgctgtactctcctgtgcctcccgcagtaagtacttaagaaatacttgtgaaacacatgaataaaggttaacgaagggcaaaggaaacaagcctttattgatgatttttctctgtgcccagtaatacttgggttattttctcatgtccttgagtcatcttgactctaggagacacctcttaacatgttcctgctgaaaaagctgagctgaggagtcataccccgagggtatcaccctaagattgggcacctgagtaccccagcctgctcttcaggtctgtagctgcttagtggctatcagaccttccaagtctccatgcttttgaaggcctatgtgtgcggtttggtttcttggcaggggggtttgatgggttcccagacctaggagttcttggcgcctcgtcttccagtgaccccaccagggctgctctttctcctccattgctgaaactagttcagggttggggaggagggcacgtgggggggcctggtggttggttttgtgctgagtcattgccttggtgcactgtggaaggaagctctgggaggtggacggctccttctgtgagggagtgcttctgtcgtcaagggagtactgcatagggtgaataacacagttatgtagatatatatggtggtcttacccccagggcctccacaactcctggatgggcctagcctaagcaattctgatttaacttattgcccctccttttagcaatactgttgagttaaataacagtttttgcattgaaaataaaaaaattttatttttgtagagatgggatcttggtatgttgcccaggctggcctgaaactgctggcttcaagtgatcctctggccttcgcctcccaaagtgctgggatacaggcacgagccactggccaggtctttattttttgcattttgcaaggacattttaagtcactttcttccttttctgtttttactcctgctgaggagatgatccccattttacaaaatggacaaaacattctccccagggaagggaagagtagacatttgagaataattgttttcacagaaccgggaaaccacctattttgtcccaagtatactgattgatgcattagcaataactcactatctgctttgccagaggtttgaacaatgagtgttaatgcttggtgtagtgaattttgtgtgatttcgaatctgatagctgactcattgcacagctctgtcttgcgagttcagatctgaactgtagctctaagaggtaaaagcagaagtggagctgcctttcatgccatagctagttttttaataaaatagagttaaaaaatcctttggcttttcagcattttggtgtgattggaaaggctattactatcttatattcagcatgagtcttgagcaattactgattaatatgatttggctgtgtctccacccaaatctcagcttgtagttcccataatccccatgtgttgtgggagggacctggtgggaggcaattgaatcatgggggcggttacccttatgctgttctcgtggtcatgagtgagttctcacgagatctgatggttttataaggggctttttccccttttgctccgcacttctccttgctgaaaaagaatgtgtttgcttccccttctgtcacgattgtaagtttcttgaggcctccctagccatgcttaactatgagtcaattaaacctctttcctttataaattacccagtcttgagtatgtctttattagcagtgtgagaacagactaatacactgatctgagttgatattcttaaattaatggtaagatatttcttttttttttttctttggagacagagtctcgcactgttgaccgagctggagtgcagtggcacgatctcggctcactgcaacctccgtctcccaggttgaagcagttctcctgcctcaccctcctaggtagctgtaattataggcgtgtgccaccacgcccagctaatttttgtatttttagtagagatggggtttcattatgttggccaggctggtcttgaacgcctgacctcgtgatccacccacctcggcctcccaaagtgctgggattacagacgtgagccaccatgcccagccagatacttctattttgataatctttgagtcctgaggtagcttcagaatggattgaaccacagacagatggtgttagtagtttctgccctggcttctttgcaacttaacatacttgactttttagtgtttttggctaaggaaagtgtattttctagtttgtggcagttttaagcaaatgtggcttgaataaaactagagagaagtttaatttttgataaatcagtgacattgacaagttgtttttcttcctttccagttatacatgggaagctgttgataccaaaaataatgtactttataaaatcaacatctgtggaagtgtggatattgtccagtgcgggccatcaagtgctgtttgtatgcacgacttgaagacacgcacttatcattcagtgggtaagtagaactacctgaaattactggattggcaatatgattccccaattttgcaaaaatgactgtgtatagctatacgtatatagcgatacaaaaattttgaatgtttagaaatcataagtgtttataatacataatacacatttgttagtagttaaaaatgctaacggtttgaatgtctagtatgagctaaaactaggttggttctgtctagtggatactatacagacagctgttatgaagaattatgtagatgtgtatttgatattgaaagctgtctcctagatggctctcccttctcacccacacttttcttaaaccctgtttttacattctcccccagcccacatttccttttagtgctcccccgactcccattcctttgtaccttccagctttggctgtagttcccagacagtgtttctgctgtcaaagatggtcactggagttaggcttacattaaaggttaaataaatagtcctgaggattggcagtctcagagaaagaggtgcagccccttctttcctagggttcgtttcattccccaaatgtatgccttttgggtcaggatcgctatccttctgtgaagaatatgaatccaagtggattaatatatcagcaccaggttacatagagtggagtcagggcagatgcctgaaggaagggaggcagggcagacagaaaagcagaatgcattgcccttggatttggcaacatggatgtccgtggtgacctttcactaaggcagttagaataatgaggtttgaccacaatggatgctcgtgacatagagatggtatatgactagggactgtctgataactagaagaagatgctaggtgggcttttggatttgggagagaagcttactgtggtagctctgtcattttcttttgtgttttaaacattttaatatttttatagatttggcagttcaagtgcagtttgttacatggatatattgcatagttgtaaatctgggtttttaatacccgtcacccgaatagtgtacattatacccagtagataatttctaattcctcaccccccaacctttctgagtctccagtgtctgttattccactgtccgtgtccatgtgtacctattatttagtttctacttataagtgagaacatgtggtatttggtgttctctttctgagttattttacttaggataatgtgctattgttcaattcatgttgctgcaaaacatgtgatttcattcttttttatggccaacatgtggaatttgtccatagaaaagaatgaaatcacacacacacacacacacacacacacacacaaacacacaccacattttttgttatccagtcatccattgatggacacttaggtttattccatatctttgcaattatggatagtgctgtgataaacatatgagtgcaggtgtctttctgatgatttttttccttcaagtatatattcagtagtgggattgctggatggaatggtagttctatttttagttccttgatagatctctatactgttttccatagaggacatcctaatttacattcccaccagtgtatgtaagcattcccgtttttctacgttcttgccaacatcttttgctttttgactttttaataattgccattccagtgggtataagatggtgtctcatggttttaatttgcctttctctgatgattagggatgtggaacatttttacatatgcttgttggccatttgtatgtctttagagaaatgtctgttcatgtcctttgccctctttttaaaggggttctttttttctttttgaattgtttgagttccttgtagattctggatgttagtcctttgtcagatgcacagtttgcaaatattttcacccattctgtaggttttctgtttactctgctgtgcagaagctttttagtttaattaaatcttacttggctatttttgttttgttgcatttgcttttgaggttttagttatgaaatctttgtctaggccaatgtccaggagagtgtttcctgggttttgttctagaatattcatagtttcagatcttacatttaagtctccaacttttgtatatggtgagagatagggttctagtttcattcttctgcatgtggctgtccagttttcccagcaccgtttattgaatagggtgtcccttcgccagtgttatgtttttgtcaactttgtcaaagatcagttggttttaagtatgtggccctgactctgggttctctattctgttccattgatctgtgtgcctatttttatatcagtaccatgctgtttgattactatagccttcaggtataatttgaagtcaggtaacatgatgcctccagctttgttctttttgtttaggattgcttttgctattcaggctttggctactcatatggttccatatgaattttaggattgtttttctaattctgtgaaaaatgacattggtactttgataagaattgcactgaatctgcagattgctttgggcattatggtcatgttaacaatactaattcttctaggccatgatttttgcatctgtgttcattagggatattggcctatagttttccttttttgttgtgtccttgccttgctttggtgttagggtgttactggcttcatagaacaagttagggaggattccctccaacttgatttttttttttttttttttttttttcagggagtagtctcagtgggattggtaccagttctttgtacctttggtagaatttggctctcaatctgtctggtcctgtgctttttcttgggagatttttaaagtactgattcaatctcactcctttttactggtcttttcaggatttctgtttcttccgattcaatcttgggaggttgtatgtttccaggaatgtatccatttcctctaggttttctagtttttgagtgtagagatgtttatagtagcctctgatgatcttttgtctttccatagtatcaatgtctactttttcatttctgattgtgcttatttgaattgtgtctcttctttttttggttaatttgagtagtagtccattgattatgttcatcttttcaaagaaccaactttgttttgttgatcctttgcattttttggggggggtctcaatttcgtttagttctgctctgatttttgttatttcttctgttaggtttcaatttggtttgttcttttttttttctagtgccatgagggttacattaggtcattaatttgtgatctttatttttgatgtaggcatttagtgctataaacttccctcttaccgctgctttgctgtatcccagaggttttggtccattgtgtctctatttatattcatttcaaaaaatttttacatttcatcctaactttgtcattgacccaaaggttattcaggagcaggttgtttaatgttcatgtatttgtgtagttttgagagttctcctcttggaattgatttctagttttattccgctgtgatctggaaagatagttgatatgatttcagtttttaaaaatgtactgagactgttctgtggcctaacatatggtctaccctggagactgttccatgtgctaagaggaatgtatgtcctgtggttgttgggtagaatgatctttaaatgtcttttaggtccatttaatcctgagtccaatttaagttcagtgttttattgttgattttctgtgttgatgatctttctagtgcttgtagtgaggtgttgaagtctctcattattattacattgctgtctatctcctcttaggtctagtggtaatgattttatgaatctgagtgctttggtgtggggtgcatttgtatttaggatggttatatcttgttgaattgatcccgttatcattatttaatggtcttttttttttcttttttaactattattgacttaaaagtctcttttatctaaatgttgcttctcccgctcacttttggtttctatttgcatggaatatcttttcctacctatttaccttgagtctttgtttttaccagttaggtggttttctgtaagcaacatatggttggatcatttttttttttaaatctagttcaccaatctatatcttttatgtaaaggatttaattcatttatgttcagagttaatattgatatgtgaggttttgttcctgtcatagtgttaattgttaactagttgctttttagtgtcaattgtataattattttataagatgtgagttttataccttttgtctgactgggttaattcaaacctgtctttaagctattagattctcttttctgctggtctagtctgctgttcaagctttcaactgtattttgtaattcctacaatgaatttttcatttctggaatttctgtctggttttctaaaaaatagctttctctagtaaaattttaatttagatcctatatttttccgatttctttgtgttggttttttgactttctcttggatcttattgcgcttctttaaaatcaatattttgaattccttagctggtatttcaaggatttcattttctttagggtccactgctggagagttagtgtgagtctttggggatgttgcagcgctcttttttttttttttttttttaatacttctagagttgttactctgtttcattctcatctggataaactatctcttctttatttttgaatttactttggcaggatttttttttttcccttgagaatgtgaatataacgtatgttgtatatagttgtttgacttcagttctgggtactttcagtgacagagactctgagtttcttggttatagttggcctttttgtggtagctttctcaaatgctagtgatagtaatgatgtgcttgggtgtgtgagcaggatcctcaccgtctcccgcggggcctggaaggcagagttctcaggaagttattttgttctcccttgctttgcactttggcagcagaatttatattgggttgtgcaggccagcaggtggtatttatgggtaaaaaccagctgcagtggaatccgatgggtgggtctatgagtctctgtgcttgacctttgtttaatgggggaagctctgttgcttcaggcagtggagtggtctgtggaatgcacagtggcctgagctacctgctcagcccctgagtgggggacaaagctggacagaactgaactgccagttcttctcttggatactccagtggctcaagcaccagccctaacaggggtagcaggggtagctgtgtagaaggtgccaaggtgtctgcggggaggtgtgggggttgctccagctccatggcctgggcaggtgggagcacaatctgcctccctgtcacaccccgtcctggcgctgggaatattcagaacatgagaatatcgctgtctgtctcaggctgcagtgtagtgagtgctacgagagacacctgtccatggcttaccaccaatgtgtcttctgtagtgagcctcctccctcaacccaaagcacacacatttgtagctctcctgctctttgccgcaggaatgctgtgggtccgtgtagagagggtgaggccccacctttcgtgcaagtcctggctcagtggaagtcgtgcaagtccactgccagtggaaatgcagcttcccctaacagccacagaatggccactgtcctgtgtgcctgtgccaacctgtgggagcagccatgactgtgcccacagcagtgggtagagggtgggggaggagaagtcctactacccacatccgtgcccaagcactgagaccacctggctcctgggctggaagcatactcctcccttgcagggctgagtacagcacccctgtctccactgcatgtggcacaggccacaagccatgctcctgggcacaggaaagtgcatgctcctttgtcccaaggagtgcccccttggcatgctgtactctttcttcccttaggagcagcactccctgagggtagatctctgggaaccctgcagctcccctgggtccagccagccctgtgtggctgctgcagtctcagcaggtgccaagaaaggtctgcagggcctctggtgatacggagacatcagtgctgagcttccccaggcagtcctcccactgctgccgccactgccacccaggtccagtggagggtgagcaacctggcataagtggtagtctgatgtaatgccctcaggaagtccccaaattgctgcccgcaccagtgtttgggtttgtgagggcagaaaagctctcccacagttcgggtaccagcagtcgaccacagaggtgaggggcagcaacagcattcccgccacccctttcaaaggaataccaagtccctcagggctcctagccgctctctgcccctctcgtttcctgctttttattttttgccctcgtttcatcccaggggttctccaccaggctccagtgctctccacttgatactccattctggcgacggttgctcacctgtaacttgggttcttctgagaaccggcctctggcaactctgttcagctgtcttgaaacaaaagaaacccccacttgtcattttgcatggaaattgctaaacacagttaaaagagctttgtagaaagcagtgtttagagtacgaagataagggagtgcgaggtctgctgattgaggcccagctcctgtttgatttccctctctctctacaaagagaccatccagactgaaaaacctggtgagagggatttgaggcctgggattgagatctgagaaagcactagattgttgtgaattcttgggtctgacattatccttggtgatatacttaggaaacttacaggtgagatggccagtttactcattgtgctcttttgagaactcacagagaaaggccacaagtaattctgttggccagtgttatgtaggtgttcagaaagaaggaaaagtagctttcttcttgattttattataatacttcaatatttttggctaatgaaagtatgtcttgagtttatggtagtatagtatggtatggtatagtgtaataccacatagactgatgccagatggaggcaacttacttgaaggataatttgtgagcttggcctcactggacaaagtttgagtttgaccaagttctgtggaccttgaaagccagggaggagaagagttgttatttttttgtagggagtggatccattacagatcttttgtgatggtaacggggaggtgatgtgatggaaggtgtttttaggaagctggccccgtggaataggaaacgatgcctacaggggagataccaaagataactagatgactaaaaagtaacttacaggttaagatgatgatgatactattataaaccagcagtttccaatctcattttttcccccagatatgtgtgacagatccctttcccagagcttgaaacttccagagggagtcatcatatatactttcaggactctcagtaacggctccctttcttcaactggagagagcagtttgtatgagtcaatgagagtgacattcacagtagcatagggataatcccgaatcaaatctaatttgcatatacaataaaaatacctaaattttgttgcacattcatgtgctaggcctaatgtttaaaagtaaaatatctcatttaattcattcaacaaccctttaaagtaggtgatttcatttccctcatgttataaatgaagaaatggaagcgcaaaatggatctgtgttctacagtgggcaggtctgtgcaaatctgcccccgaagtccaaggaagttgagaggctgaagaaggaggctgacacccagtttctcagaaagaaacatttaatacggacttatgaatagaagccacatctcaagaagtcacgagatgggatggatccctctgccatcacccactccagacccagggatcatacaccatagggaaggggtggttcagaaggaatgtgtaggacaattgaagtaggttttttgacctaaggggaggattcgtgataattacctgctcttacacaaggaacagtagataaactggaaatcttggaggccttcctggaactggggttaatcggaagtcagcagggctgtttggcctccagaatggcgttactttagcctccacaatgagcaccttgctggaggtggtgtggttatggatttgaatgtggacagccggctccagagcctgtgtactcactcagggctgtgcttttgtgtgagtcatggggtcacatcagacagattggagctgaaatggagaccaggatgggagatctgaatgtgtggctctgagaggacatctgagaacgaacttcttttgatcttgttagaaaggaaaaaatgtgaaccttcaaaacaaccacaagaactggagctccccgcagatcagaggaacagaagagctagcatagaaatagatccaaatatgtatgggaacttaagataacttacaaccaaaaaattgggtgtaagtagctattgtctcttacgaaacaaagttcaatccctcctttagatcacatactgaaattacagctcagttaagatttgaaagtaaaaagacaatagaacattggaaaaaaaattagtaacatatagatataatctagaagagccttccttaaggaatcctggaagccatacaggagaagaggaacatttcttattacataccttttaatgactaaaaggtgttctaaagacaaaagacatacactagactgggaaaaacatttccagcatgtttgccaatgtactattaggatgagagcttttcttaaaaattggtaagaaagacagacacccaggagaaaaatggcaaagtcaaagaacaggtaattcacaaaagaagaaatccagatgctcaatacaacttcactaataagccaggtggattagtcctttctcacattgctgtaaagaactacctgatacttggtaatttatgaaggagagaggttggattcacagttctgaaggctgtgtaggaagcatggctggggaggcctcaggaaacttaaaatcatggcagcaggtgaaggggaagcaggcagcttcttcacatggtgacaggagaggagtggggcggtgctacacactttcaaacaagcacatctagtgagaactcttatcacgagacagcacttggggatggtgctacaccattggaaaccagccccgtgatccagttacctcccaccaggccccacctccaacactcgggatcacaattcatcatgagatttgggtggcgagacagagctaagccgcatcaccaggtataaatgcaaatcagagcaattatgagatctcatttttctttgagaagttggcagaaatttaaatggttgaatcatagagtgctggcaaggagcctggaaatgggcacatttatttatacgttgctgtaggaagacggttgtctctaaatccttttgggaagataatagttggtgtgaggttgtttttttttttttttttttttttttgagacagaatcttgctctgttgcccaggccggagtgcagtggcgccatcttggctcactgcatcctccgccccctgggtttaagcgattctcctgcttcagcctcctgagtagcttggattacgggcaccaccatgtccggctaattttttttttgtatttttagtagagatggggtttcaccatgttggccaggctggtcttgaactcctgacctcaagtgatccacccgccttggccccccaaagtgctgggattacaggtgtgagccaccacgcctggcctggtatgagttttaaagtgccctgaagcaggggtcctcaacccccgggccacagactggtagcggtttgtagcctgttaggagctgggctgcacagcaggaggtgagtggtgggtgacagagtgaagcttcgtctgtatttacagccgctccccattgcttgcactactgcctgagctctgcatcctgttagataagtggcagcagtagatgcttataggagcgcgaaccctattgtgaactgcacatgcaagggatctaggttgtgaccccttatgagaatctagtgcctgatgatttgtcagtgtctcccatcacccccagatgggaccatctagttgcatgaaaacaagctcggggcttccactgattctgcactgtggtgtgttgtataattatttcaattacatattacaatgtaataataatagaaataaagggtacaataaatgtaatatgcttgaatcatcccgaaaccatcccacccccagtccaagtccatggaaaaactgtctttcatgaaaccagtctctggtgccaacaaggttgggggctgctgccctaaaattttttatagtgagaaacaaatattaagacctcaatgctggtttaaacaatattacattattttaaattgaggaatcatacattatccacacatccaaggagctcagaagaaattaaaaaaatcatacattagtttttccttaggcaaacaatattacatatgtgaatcttagcaaatgttagccatcattttcatagggcctgtgaacaatatttggtcccatttgcaacctaattat

SEQ ID NO: 916 - DNA, 16552 bp, Homo sapiens
  source 1..16552: mol_type = other DNA
cttacccggcgtgccccgcgcccggaggcgctgacgtggccgccgtcagagccgccatcttgtgggagcaaaaccaacgcctggctcggagcagcagcctctgaggtgagggcgaggggcgcgggccggtgtgggccgcagagacgttggagccggcgggggctggggactggcctcggggcgacttgaggttcgcgaagggcacgtcgacccccgcggcggcggcggcgacagggccgggccgggggcggacgcagacgggccgggctgaggctggggcccggccggagtcggggctgggcggacgggcgggtcggtgagctcctcgcacccctcacaggttcccgaagtcgctcgcggccgcttgtcctcctctgcctgtccctgcccccgcccgtcgcccggaagtccgcttggacgccgggctcttctccaggaaacctgggcttcctgcttccctcgcctctgcctttctcgtttcccgaggccgcccgcgcgtggacggttgggattagcggccgcgggggccggtgggggtcgtggggcctcccccacccgagtacaggcgagcgagcggcatccgggcggacccccgcctcggggaccgggaaactgaggctcgggcggcctgagacgccgtcaaggtcatgtaggtggtgggggcttgcatcttcgcctcccgactccatccagttcgtgtttgctgtgaagacggtaccgggtcaggggtggtgagagcgggcgggcaggtggacaggaaccccgtgcccttccctgtctgctgaacggaatgcgtggacctccgggggagcccagagtgcctcccttcacaccagtgagacgcaatttggggtcagcactcagggcaccggtggcctccagagggccggtcgatcttcgctttaactccagggtggtttccttgacgttgtcggcagtagataagaaggcctcttctgagctggtgaatctttaacctacctgaatctttaacctgcctgcggaacgacctgctcgcagactctaggccgcagaggccggccccagcgctctctcggagcacagcctgggtggttacggcgtgtgagattggggctggacagccgtgcgcacctagagtgttaaataaccattccgacggcacctcctggcactccctttcagtccaggcagccagttgctgctttgcaggaattgagcagaaatgcactcggaatcgcgggcaggaaaagaagggaggtcggaggctttggatggtccccgaagtcgccgcctagttgagagctgtagagttggtgccactgcccctgttggagtgggcagttgtagttcttgtttcagaactagtggtcagcagttttctttgccggctgttgcaaggctggtggttctggcgttttccgcagtgtgttgggaggagtgtgagatgccgcggtgcagttgtgtgcggcccctgtggccctctgctgttgcgttagccattgtctaacacgtgtgaccgcatggatggtgtcctcatttaatttgaattttcaccagcactgcctaggtagccagaaccataaggtcctgaaatgccgtactattagctgggtccaaaattgagaagaattgagtagtgtaaatgttagtcacacatctcattggacacattgttagagtgtgttgtccatgttttcacatgttggtagactggagaatagctgtcacttgtcttcaggcgtatcttgttgaaaataaatccaaatcactgcagcagtaggaatatgctgttgcctgtgaggcagattttcggatttgctagttgaaaaagatttgaaacagttggtttggacaacagctgagtcacacaatgactgtgagtgaaaagcaaaaactggttctgtgcccctcacagttctggttttgtacatcatgtggtctagctatgggctgtacctcttgcacaatatggagaggacattcagacatcttcaactgctcatctgcccctacggaccagacaggcttgaaactataggaagatgcatttgacctttcatttttcagttcagtagaatttaatatggactgtcagccgctgcggtgatcatggaagtagacctaagagaaaaaaacttgtgcaagttcacacgtggagtagtatatgaccatggtttcagagaactgaagcagttctttttagattcttcaaattaaatgtctccttggtgtatttaaacctgctgttactcacaggccaggctccaccaagctttcctacacacttcttcctgagctgtgaccattctcctgagcaagaggctgcagccagcctgggctggcgggcccatactgtctctcataggcattctctccccttgacctttcacctccgtaaattcaagagggtgaaaggaaatagagtgcactgtcaaagataattgggagagaaacacgaaaaggcctcgcagtggggatcttaaattatgagaacttgtgttttctgtgttgtgcctgctcctcattggcgtggatggttggtaggggcattctgcccgtagcgtctgaagtggtcttttggaaaagatttggccccttcatgttgggattccaggacttgccttcatcctcaggttaatattctcctgtgattgttacaagctctctaaggcatagttgcatttattgccttacagctgcgcagctgccgcaccgtccagataggtagtttcacattctcaggtgggtcagatgaccttgttagcgacttgacagacatgtcctggatgctctttgttcccaggaggctctcaggtcctcccccagggtcctgtcactcagccacctacagggatggggagacagtgaggctggctgataagccataaagtccttgactaatcctggtttcctggttctcacacagtggtaacaagggcttgcagccggttgtcagccaacagactgggaagggtggtgcttcttacaggccctgataacaggagaagcctaaatgacaagagaagagacagggaaagcataaaaggcaggcagattttcacaggcacagcaattgaaaatgattctgtttagaaggcagacattctcccacacccttgaggcccagggctcactgctggtgtacagcatgaagtggacaggagagttgattcagtccatgaacatttcaggaagttagaagtctatagttgtggattgcaaaatacatatctggcctgcctcccatttcctggctaaaatacttggaatctccgaagtgatgatgtctttttgtaccctaatgagttgaccagtgatgggcagcccctacgaaacttcagggtagggctagtcacagggccaaggcaggattagagggtttcagccccaccctccaattttcccagagtggagagggactgaagattgagctggtcaccaatagccaataatttaatcaatcacacctataccatgaagtcacacttttgccttcagtagttaacagcatctacagccccgtgtttccacatttgtacaaaggaatgttcagactgaaccacacttaagtacaattttgaaacagcatgaggctgggcgtagtgcctcacgcctgtaatcccagcactttgggaggctgaggcgggtggatcatgaggtcaggagattgagaccatcctggcgaacatggtgataccccgactctactaaaaatacaaaaaaataggccaggtgtggtggtgtgcacctgtagtcccagctacccgggaggctggggcaggagaatggcgtgaacccgggaggtggagcttgcagggagcagagatcgcgccactgcactccagcctgggcaacagagcgagactttgtctcaaaaaaaaaaaaaagaaaaaaaagaaacagcatgaaattccttgttgatgggaaatacccgaaaggcctgcctgggttttcagagagcttccagaaagctgaattcatggaggttcctggagaatggcacagccaggagggaaaggtagcgccgtgtctcttccctcatacaccgcccactgcatctctccatctgtatcctttgtaacatcctttatgaaaaaccagtaacctttagtgtttttctgagttctgtgagccactctagcaaattaattgaacccaaggggaaggagttatgggaaccctgatttatagatggctgtccagaagcacaggtaaaataacctggagtttgtgattgcctccaggtagacagtgtcagaattgaactgaattaaacgacacctagctggtgtctgctgcagaacgcagaactggttgcttgcttggcatgtagggagaaacccctgctcatgtggtgtgagaagcgacctgtgttataagagtgtgtgagaaactgagtttgggttttcctatgtcctcaaaatagtatattttgaaagccttctaggcagaatgtattaaaatagtttttactccctgaagggatgccagcaagctagaaagattcatttccaaagggcttccagtggtagcatggctagacatgagacatctttccatttgtgtcatacagcaagttatttttgcagtaccatatacgctatgcgggaaacttttaagtattttataggtttgatttaggtacaaatggccaagaagctatcatctatactcatcctggggattgggaacggaggcagttagatgtgcctgtgctttgtaccttctgtagatgggaatgcagttgctcactcaccaatcaaatttattgatttatatttaaaatactatgaatacatcttctggcaattttggtggtgacattttccttaaaatatttgtactagccaggcactgtggctcacacctgtgtagtgcaatctacttgggaggctgaggcaggagagtggatcacttgaacctaggaggtcaaggttgcagtgagctgtgatcataaccactgcactccagcttgagtaacagagcaggacccttagctcttaaaaaaatttatacctactcatcagctgaggacctgggggcaggtttagaaaacagattttgaacacacatccttccctccctcttgtgtctgacatcactgagctgccacacttttgccttcagtagttaacagcatctacaaccccattttcccacatttttatggtcaaaagaatgttcagactgacccacacatgagtacagtttttaaaaagcatgcaattccttgttgatgcgataggtttttcgtgacgaacttaatttttagggaaagcacatctgcagatgtgtacagttgatcttcatgagccctatgggcctgataaacattcttttgccattgttttctcctctccttggtggtgagtcacttgtgcagtgcccagcggaagagggtgggaggctggggaggaaggcctgttctgggcaaaggaagccctgcttgatgagcatgaggctccacgggggcagtggctgtgacggtgagtgccacacagagctgcccacactggtggagggaaggcagggagataccaggaccatccggaaggggctgagtgtcatttgacaggtgccatgtgagcagagatgtgaaggagtggcccgggacaatcagggcagaatccctgaggtgagtgcgctggctggcagagtttggagacctgtcaggagtagggtgcatactgggtgggaagcctgctggggtgtgcagtggccctcggagggggtccgcggttcccagaaaaaggaatttggtaatctgtggtggcatttttgggtggcagcactggcacctttggcagtggcaagaacacttcctgtctgaccttcatgtaggggaggtcgtctgatgtcccagacctgttataaatatgaaaaaaaaatttttgtgcatagttttaacaggtgttctgaagttccaggaacaaaatcaccttataaatcaaagatgactgtgtattgttctcttcagaatcacagcaagaattcagtttccagaaggaaaagctacagtagttgcttcatggacatggcttgcccttgaggttggtggtgtcagtgcatgagcagcctggtaagggtggttctctggccgccacccttggtcctctagcgtggttgtgaagtcactttcctttactccccattgcatcatagttgggacagagcagtggttctctgccgtcttgtgcgagtgctgggatgctgtctctacttccttttgggttgccagaggcagcatttagagcacagtgtgggcattatgttgtggaccaaggcagcctattgcaaggacctgatcgggcggcagccgtggggcagctctgagtagaacatcgggtcacctggctgactggtgtgctgagaacacgcaggaggaggctggagacggggttcttgcctggggaacaggagggaggctactcgcatcacagcggagaatgcctgttgggtttgggaggggggtttcggctgcaaagctggctgtcaaggggcaggaattgggaggagggtctaaagtcttgaagagaaatgtggggtcgttgtgtaggggccaccatcacctggagagcagggcagatgccagcgtgtgtgtgagaactaggtcacttgaagggaggtccccagagtgtccccggggtgtgcctttctctcacctaggtctggagtgcctccagaagcgaggatttcctgcaagggcggtggcctcccagggtctgtgggggggcatccccgtctctttacatgtctgactgaccagagtggggtggggtggcaaggtggtgctcgtcccaaagctgggggaaacctggtgatggttcccactcccattgttgcacttcgcttttgatttctctggaagagcaagtctttgtgtggtgtttcccctcagcctacatttttaaaatgaacgtttcttgaaggcagaaatcaagttttaggcattggctcaatcactggtgcagccattgcattaattttctttaacctggtgcggagaagctacaagggccccacccccttctagtggttggaggaaggagcaacttgctctcccagtttatgacagcaacaccagcagtgtgctgttccagttccccttttttttttcaagtggtgtagaaaggggccttcagggccctggatcccccagccccacacaatggtgggcctatgttcgtccagaacagtgcctggcagtagctcagtgcccagcatgtctgtggtgagtgtgtagttcaggaagtgaactggcaaaactgagtatcaccctctcttcctgggttcttgccactcccctgaaaaccagggtagcattgtcacatcagatagctccgctacgtgtgcgctgaccatgctgagatgggcactgtggactcagcctctggtcattgctggaaccagcggcctccatgtgaggtacaggggaacgcactgctagcagatggttgggatgtggacactcgtcctgccctcttggcttggtgctgtgccatcgcacagtcattcgctgtttagcatgcatgggagagagtgaagcacaagggcccaggcccctgggagtgcctgccctcaagttggaagagcccttgggcacagcataggcgcctggcagaattggactgggccatgatccagggcattgggacctcacctaggagttggggttctggtcagaagccctgtggagacagggtctcccctgtgggcaccaaactgacctcaaactgctggttctttggccctggggacggggctggttgaagtactctcccggcagctgtcacctgcagggagaggtgggggtaggggtgctgtgtttcttagctgttcctcgttgcagtgttaaatccctgcaggttccttattctcagcttgtgttgtgagtttcagtgttgggggctaatgtgggtttgcgtttttggtcttggttttcccagtggccagtccatcagccactgcactgggggccaggtagaggccaactgcaccctgcctgccagagtagaaatactggtaggccccaggctctgctgccccttccatgtccttgtgtaagcatccatggacaaagctgactcacggggtgtgcacagctgcagggaggccaggaaacaggggttttattctagagggccttgtgctcagtgacagaccagagtcccatcactgagagagcagggctggggcagcacaaaggactggagagcatttgccatgatgccatgtgcacagccagtgcaagtccttcattgtagctgtggtcagaggtcatgagacactgccttcagcagccctgggagtccacctggtgtgtggttagagctgtgcatctgcagatttcagaaggacttacgtttggtgaggtgctttgaagtaacacttcacaaataccaagaagcaagaaatacacaaataagcaggtaatggttctttggtgtttacattagctagtgggcaacggttctttggtgttcacattagctatagtcccagaactcagtccatgaggtggaatcacaaaaatggaattcatttctggctgtcagtacacaaactgatttaagatatcaccttgaattttaagctgacaaacagtgatctaaactgaatttcactgattgccccacctgaaagtcagacctgatagataatgccctcccttaactcaaggccagcagcagatgtgttagaggggacccttgtgcctcgcagccctcatctcctaatggctgtggggtcactgtgtcgagttgtaatgcctaatgagctcctctaaaaacatcctgaaacttgtgtaaaaaaaacagcagactcccagtggaactcgccttcagatgcagcccagaataagagttctagaatgtgtgtgccatccttttgtctcaatctgcatgattgcaagtctcttcaacatgattgggtgcgtggagtgtctcggtcatgtgtcttcccctctgagcatgccttttgattcgcacctgtgtcacaattgtgccagcctgtgagatgtgtctgcctgtcaccagtatcggcacatttagttttccctttacgtgagttttggtaaaatagtgacaaaatgtaatgcagtgctcagtcacagaaaaatgtcaggcctacagaaatggagcatttggctggcgggtagcgtgatgaccataggctttatttggctggtgtggtaaacaagcagcagcttgtgcaggtgagaataaatggccatattgcatttcattttaaggactcccttaaaatgaaaatcttcgtgtgggacatgaacacaggctttcacgaaattgatcatctacactatatgtatgactgttgaaaggctgttgttcctcagaaattcttaaaatgttatgtaatgtacatgagtcccttcaggaagtcatcagctttgttcagtttcctcagattagatagtaaaactgagattatgaactataaagatgtgtgtaatttatctgtcagtgaacttgactttaataaaagctttttgaaaaagaactctgggtggggtgcattggctcacacacatagtcccaactactgtggaggtcagggcaggaggatcactggagcccaagagttcaagatcagcctgggcaggatagcgagaccctgtctatagaaaatattaaaaatcagctaggcatggtggcttgcccttgcattccctgccacttgggaggctgaggtgggaggttcgcttgagcccaggagctcaaggctgcaatgggctgtgatcgaaccactgaattccaacctgggtgacagagtgaggccctgtctcaaaaagagaactctcgatgtcactggctttccatgtaagcagagcacatcatgtgagccccattcgtggatgtcagtcagcagaacagaatcttggacctggagcttgtttgtcctgtgctagaggttggaggtgtctctgtctttctgttggttcctgtcagttcaggtcacttagagattctgttacatacaccagctctgacaggttgggggagatgatcaaccttccgcctgcgcctgttcccttccctgactcatgccaaagtatccctgagatctgcaagggaccgaggacagtactggctggtggtctgggtacaggccacagaggcatctggaccccatgtgcatctggaccagtttggttggatccattcatggacacaaaacggatgtgaactcacagagctacattttctccctgcccctgttcaggcacagtgaggtgtcggggaatgtagctgccagagttgactgtcccgttctttggtgtaatgcctgaaggccacctttaccattggtctgtggtcctcactgaagaaagaaacattcttcctaaaagactttttttcctcagagttggagcccacagcgtggtcaggaaagagaagtagccactggtggctcctggcatcctcctgctgggcagccccttctcaaagtgtgaggggtccccttgtgtacaagcaggaaggctctgagaaagtcaggtttgctcctaccacaggataattccgatgaacctgaaaagcgggttttggcttgtgtgcagggactctggtggaagaaagggtgacagcacctggcctgggcatgacacaagttaggacccgtaccaagaggccctggaattgagggtgggggttgctgtggactctttctccctcttaggaaactctattgggtctccatctgtcacagaagcagtaaatgatgtaggggctgccaggtatagggtcctgtggggatgctggaacatgccgaggcaggacgtgccagccaccctctgcccatatgtgcagcagggccacagatgtgcttgtcggtaggagagaccaagctgtctgtgtgccgatgtcttgacacctgagacttcaggttcacccatcctggttctgccattccattgcagggtggcttccctcctttggggactcttaacgctttggtctgttaaaaaaaaaaaaaaaaatccgggcgtggtggctcactcctgtaatcccagcactttgggaggccgaggtgggctgatcatctgaggtcaggggttcgaggccagccctgaccaacatggtgaaaccccgtctctactaaaaataaaaataaaaattagctcagcgtggtggcacgcgcctgtagtcccagctactcgggaagctgaggcaagagaatctcgaacctgggaggcagaggttgcagtgagccgagatcgcacctgagaggttgcagtgagctgagatcaagccactgcactccagcctggatgacagagtgagactctgtctcaaaaaaaaaaaaaaaaaaaaaagccaccaatggggagggcctgggattactggcatcacaaaccccactgcctgcaggctgcatgatctcctgggcatggttggcggcactgccccgggcatgaggaggcagcaggcatgtgtggatcacggacagtgctggggtcgagggggttggtgacggtgtgacaccccttcccctgagtggctgggtgttactgtcaattctcccaagtgctgtgcttcagtggtcgtggcagtctggtgctgcctctgcccaactggcaggcgacccttattcctgagtccctgctgacttggtgtcctaggtttattcctcctagacttgttaacttgtacagttaacaagcctttgacaccacacaccctcgcctcagctttccaaccccctagtaataacaacatcaggactccctgagtatcctccaccatatgttttcctggagtaactcataaaaggccctcttttcgttccatttcatgcttgggtttttcatgcgaacctgtcattattagtttttccgcattgcctagagttgcccaaccccataataagaatacgtaggtggcgtgccccattcttgcaggtgtccacttcctgctccagtctgagggggttggctaggctgctgctctctctccatgtggggttggctaggctgctgctctctctccacgttgctgtgggctcgcatcctctccctggttccctgggggagcttcttagggagggagcatgtgagagatctgaggccctgcagtttgggagttattttcattctcccctaacacttgttggatactttggctgggtatagaattaaagggtttcgaaagcagtgtttcagagtcttccattctctggggcatcagaggtgtcatttgcccctgtgcattctggagtccaccttgcacctttattgggtctcatctaggtccttggctttgcgcttcagccctttgaggccgaagcccagattcctgggtccccactctggaacagggaaaaatttcaccccgtaatttcgtacgttctttctttttagggtttctgttggttgatatcttaagttactcctcatcttcctttttcattctgtttgtttttgttctgccttctgagcaccttcattttgaattttccttttcagctatttgtgtatctatcaggtttctctccttgtcctttgttaaaatagtattctgtcttcagtctcctgtcttggttgcctccttgcagattccttttatatttgggtctcttatgttggtggcctttcaaaggcagacaggcctgtctcttggtggggggtgggggtgggcggagctccagttgcttgtgtgtggatctgctggggcatatagaactctcaggaattattctggaatttcatggctcaagtgtgttgtcatggctcagcgcaggcctaagccctgctgcagctgctcccctagaccaagcttgtccaacccttaggccgcatgtggcccaggatggctttgaacccgacccaacacaaatttctaataaaacattgagattttgggggtttttgttttggtttggttcaccagctgttgtgttagtatattttgtgtgtggtccaagacaattcttcttccattgtggcccagggtagccaagattggacattgctgccctaggcagtcccagcttcatcccttgggtcccaggcggtccagttttctctgcctggtcaatcatcacatccaaggtcttcctcccttttctctctgcccttcaaggcgtgtgtgtcattttggtgtcttcattggtagtggttgcaggagtggactgagagggcaggtattcagtctcttctgtgctccatgggtggtggtcttcctctgggcttagaaaacctggccgtccccaaaaagggaacactacagtgaaggtccttataaatttcagaactcatttaaatttcagaataggtgacatgttcaaaaccaagagcaaagtgtccaaaggacactgatccagcttgaaggggttctgtggctcatctgggatgatggcagtgttaaatcagacacgggcggccagttcacacccactgaaacacacaggcatgtgtgggctcttgctgatgttgagaaatggagaagaggcatttccttgccgtagcgtgctggggtgactggatgagagagtcaccagcggacagtcatggctgtgattcagccaaaagccacctgtgtgtggaacccctggtggaggaggtctgatgaggggtgggtgtgctcacaggctcctggcatgtcctcttgaaggcagaagccttcctcactcggggtaagccccgcttgcgggtgcagtgaagaagcagtcattgtttcagaaagtgaccagtgttttctaaagtccctgttcgggataaaatcacctgattcgtgaaattgcccactggccagtgaggccaaagcctaacaacttcagtgtcctcacagaggcgtctgggcagtggaggcccttcctgctggagtctccgcagggctctgatggtgggtgccagctgacttaattgctgtccccgatatttgtgttctgctgagggaacccctacccttgcggtgtggggcagacatggcgggcgtgccccatcgaggctgtgtcctcatgggagtgtgtccctgaaggtgtcctgctgagtctggcgtggccctgtgtgctctggtccttgtgagtgtgggcaggcacagtgagtggtgctctctggccctggaaggttctgtgttggggtgtagaggagccttgcacgcacctggaagccagtcctcaggcagccagcctcccctcctgcataggctgggatgaggcagcctttctggccatgcagctgtggggacagcttcccaagatgagggcaacagtttctcaattcctgactcagccattttccctcagcccccatcctgaggtggatttggggggcatgggaggcagggctctttccctgtttccctgcaggcttccaggaggtggggtgaggcagtggtgcatccctgggtgggtgggttctgagcaaccactgctgggcagcacagaaccagacatggagcaccttgtctctccaggtgtccctggccagtgtccttccacctgtccacaagcatggggaacatcttcgccaacctcttcaagggcctttttggcaaaaaagaaatgcgcatcctcatggtgggcctggatgctgcagggaagaccacgatcctctacaagcttaagctgggtgagatcgtgaccaccattcccaccataggtgaggtgggggccagcagggagtgggctgggctgggctgggccaaggtacaaggcctcaccctgcatcccgcacccaggcttcaacgtggaaaccgtggagtacaagaacatcagcttcactgtgtgggacgtgggtggccaggacaagatccggcccctgtggcgccactacttccagaacacacaaggtaagtggctggggcctggtcccatgggcactcctgcttctagagagggggggccagcccatagatggggcatcgatgcccatagatgcggcaggggggctgtgttcccatgaccatttgacactggctgcccggcaggcctgatcttcgtggtggacagcaatgacagagagcgtgtgaacgaggcccgtgaggagctcatgaggatgctggccgaggacgagctccgggatgctgtcctcctggtgttcgccaacaagcaggtaggcgcccgggccagcctggggaatgtgaggagccagtgtgggttccgcctggtggtaggggttactggaggctggtggggcccctttctctgtcctgtggacagcccttcccaccaacccttccttcccccaggacctccccaacgccatgaatgcggccgagatcacagacaagctggggctgcactcactacgccacaggaactggtacattcaggccacctgcgccaccagcggcgacgggctctatgaaggactggactggctgtccaatcagctccggaaccagaagtgaacgcgacccccctccctctcactcctcttgccctctgctttactctcatgtggcaaacgtgcggctcgtggtgtgagtgccagaagctgcctccgtggtttggtcaccgtgtgcatcgcaccgtgctgtaaatgtggcagacgcagcctgcggccaggctttttatttaatgtaaatagtttttgtttccaatgaggcagtttctggtactcctatgcaatattactcagctttttttattgtaaaaagaaaaatcaactcactgttcagtgctgagaggggatgtaggcccatgggcacctggcctccaggagtcgctgtgttgggagagccggccacgcccttggctttagagctgtgttgaaatccattttggtggttggtttttaacccaaactcagtgcattttttaaaatagttaagaatccaagtcgagaacacttgaacacacagaagggagaccccgcctagcatagatttgcagttacggcctggatgccagtcgccagcccagctgttcccctcgggaacatgaggtggtggtggcgcagcagactgcgatcaattctgcatggtcacagtagagatccccgcaactcgcttgtccttgggtcaccctgcattccatagccatgtgcttgtccctgtgctcccacggttcccaggggccaggctgggagcccacagccaccccactatgccgcaggccgccctacccaccttcaggcagcctatgggacgcagggccccatctgtccctcggtcgccgtgtggccagagtgggtccgtcgtccccaacactcgtgctcgctcagacactttggcaggatgtctggggcctcaccagcaggagcgcgtgcaagccgggcaggcggtccacctagacccacagcccctcgggagcaccccacctctgtgtgtgatgtagctttctctccctcagcctgcaagggtccgatttgccatcgaaaaagacaacctctacttttttcttttgtattttgataaacactgaagctggagctgttaaatttatcttggggaaacctcagaactggtctatttggtgtcgtggaacctcttactgctttcaatacacgattagtaatcaactgttttgtatacttgttttcagttttcatttcgacaaacaagcactgtaattatagctattagaataaaatctcttaactatttca

SEQ ID NO: 917 - DNA, 3055 bp, Homo sapiens
  source 1..3055: mol_type = other DNA
aaatcacagcccttcagctgccacggtgagaacgcagcactcgggttaggaagcggatctcgcaagctccgagcgtcagctgccgggtacggtctttggcgttagcgcttctcccatcccatgagtgcccccagcagagtccagtcggactgtcatcctttctgcgactctggcgctggtcccgagcagctcacgggcccgtgtgcttccgggtctgagattggcatggtggaccaggtggagggtgtggcctctactaggaggcaaattcgtaaagacctcggcttgggactccgggaactcgggccccagatccttgttcgagctggtcttcagtttccccatctgtacgctgaagagcctggggtccagtaacccccatcatcacccagtttacagaagaggaaactgaggcccagacggggagcagctgacaccaagtcgttaagagaatcagcgaaggggctgggaatccaggacctgcgccttttacccaccgcggcgccggtctcacgtgcagtcccttcgctcttctcccctagttcggtgccatggcgtcccagggtcgtcggcggaggcccctgcggaggccggagacggtggtgccgggggaggcgaccgagacggattccgagcgctctgcgtcctcgtcggaggaggaggagctgtacctgggtccttcgggcccgacgcgcggccgccccacggggctgcgggtggctggggaagccgcggagaccgactcggagccggagccggagccggaaccgacggccgcgccgagggacctgcctccactcgtggtgcagcgggaatcggcggaggaggcctggggcacggaggaggccccggcgcccgcccccgcgcgctcgctcctgcaacttcggctggcggagagccaggcgcggctggaccacgacgtggcggccgccgtgagcggtgtctaccgccgtgcaggccgcgacgtggccgccctggctagtaggctggcggcagcccaggcggcggggctggcggcggcccacagcgtgcgcctggcgcgcggggacctttgtgcgctggccgagcgtctggacatcgtggctggctgccgcctgctgccggacatccgcggcgtgccagggaccgagcctgagaaagacccggggccgcgggcctagccatgattctacttcccaacctgactgcaatttgggggtaggccttgctgcctctgggacctgactctgtctcctgtgtctcttatcaccccccacccccgctcccatcttggtgtcacccatgggggctaatccggtccccttggataatgctttatattggatatagttcaacccctactgcggagaccagggccccactatccttagatctggttcctctcccgatcctgaccctgccgcctggttctgagccttcccctggggcttggctccagcctttgttacatagttgctccttaatctgtttccaccctgggggctcaccaattttttttttttttttttttttttggagacagggtgtttatctgtcacccaggctagagtgcagtggcgggattactgctcactgcaacctcgacctcctgggctcaagtgatcctcccagctcagccttcaagagtagctgggactgcagacctgcaccaccacgtccagctgcccggttaatttttttctgtcggtttgaagaggggagaaggtctcactatgttgcccaggcttgtctcaaactcccgggctcaagcaatcctcccactgtggcgtcccaaagtgctggggttacaggtgtgagccaccacacactgggctctgctctgcctttctgagtttggtttctgcttatggtggggagcttgttcccgttcttcccacaagaacccaggatgtggcacagcttccctgccgtcttccttcactcagttggctacgcctcccatcctagctccacttccagaactgccttcaccctaggctgggtccttgttttgtttttagagacagggtctcactgtgtctcccaggctggagtacagtggcgtgatctcggctcactgccacctccacctcccgagttcaagcgattctcctgcctcagcctcccgagtagctaggattacaggcatgcaccaccacgcctggctactttttatatttttagtagagatgaggtttcaccttgttggccaggctggtctcgaactcctggcctcaggtgatccacccgcctcacctcctaaaatgctgggattacaggcgtgggccactgcgcctagccagctgggtccttgttctgctgcccaagcttggccctggttccgtgtgctggttctactttttgttctcccatctgcctcctgcctcctcccctttgagcttagccccgccctctcagcctgatttctgtttcccaagtccagcagtgtcgtgggataggttttgctttcttttactgtctccatcctacttacacctccctgatcctggggtctggggactccccatggtttccttccttctgcaggcccaaaatgatggcccctcttaacccaaggcaggggatcttcctcccaactccctggaccaaggtggcatttcctgcacacccctccaggccaagatgatgctcgctctcaactctgtaggccaaggtggcgtctcctcttgactctccagacctaaagtgacacccttcaggcacttcgggcccaattcagcccagtcctggtgctttcagcgccagatgacagcactttgcagataagaacgatatgatgtgtggatttcactacatttggctcctggatgctataaaaggacttggatttctgacttggctcagggactggggttagcagtctctttctgctccttttcacctgtgttttcttccgatcccagctctggtccctcagccgcattcatatttactctcctctcccagcctgatatccctgtccctcatctcaacccgaagccaagatctgagcccccaagatggagaatggggaggagctttttatggcggactgattaaaactcttaagcattta

SEQ ID NO: 918 - DNA, 32742 bp, Homo sapiens
  source 1..32742: mol_type = other DNA
ctcagctcccagctccccgctcccggctcccggcgcccggcgcccggcgcggagctgttcctcaaacgacacgcagccgaggtgggtgggtgtggggacgcgggagccagtgtcgtcggatcggcccgcagtccgctgtcctgctgagcccggaggccgcctggatggagccgccgctcccggtcggagcccagccgcttgccgtatccgccggagagaagggagaggggaggccgcgcagggccgggggtgggggtcgggggccctgcggaacacggtggggcggggcaaccgggtggcccagaggccgagcagagagggggagggggccggcgcgggagacgaagcagggcggggcggggcgggggagggcggcggtggggggggggtggaagacccccttcgccccgcagtgcaccactcctccccaccgcgcttccgaaggagacccttgactagcgcccgcatactgtcgagggtatggagatgaagggtcctctccgggagccctgcgccctgaccctagcccagaggaacgggcaatatgagtaagtaaccacctgattcccacagaggaggggagcctgccattacctcccaaccccaaaccgcgacgggtcacccactgtcctcctactgaagccacgcgggcaacaggttcaggtccaggtgtgaagtgccagtgctctctaacctcggggctttgtccccaacttccaagcctctggattgtgcttggcagtgtggctcagtggaaggactgaatgggcggggaagcaggaagcctgggttcttagttcctgcccctgcaactgacatgtgttgtgtaacgttgggcaagtcaataaagctttctgggccaaagttaactcttcagtttaataaaaccattaactgccttaccttacagcctttggaattataactgggggaaaaataaatgcgagagtggcttccaaaaagtaaaagtgctatggaaatgcttcattgttaacgttacagacttgtcttaaccctattcagctggtttctccagtctccccgtccccttatcccactgggttgaaggcatattcattaattcagtaatggtttagtgtaggccagaaactgcctcacttactgactttactgttagaaagaaaaggtaatgaaatgtgtagagatagaaatgacagtattttatcagtgtgtcaccttcctctctgccataggagctccgtaaatactgttgactgattgatcaaaagattattttgataagctatcaccatagctgctaacctcactctattgtcactaatatcttatctcaaaaatatccatggtgaccattacgtatcataggcccctatccctgtgtgcccaagacacctcacttggatattcattggcttcttgacatcatattccttcccagtttaaaaattgttcacttaaatcttgccatctcccaacattggcttctgcctaaaaccaattttctcagtccccacttttagatcctctgtatctatgctgtcagatttacacggaagaaattcccactggcccaacctgctcttctctgagactattggtgccactctaactggatgtcagctaattctgtgaagtagctctttcataggtcctgcttagtcagctctactgggaagttcatcaaacccggatttcatcaaaccctggaagactagtttaatgaaactaaactaaattcagaatttaataaaacaaaattcagcagaaaagtggaacaccactaacatttccaaaggctagagtgggttacagagaggtgacccttgggcaaaccagtaaaacttgtgtgccttggtttcctctaatgtaaaaacaaaatcatgaagattgaatagagtagctacattgttgagatgaccacagcccagaatctagtccctcggattagtagatttggaactctgttgagctaataaggaagtcgtgtgttccaattctgtgtaagttatgggggtatagttgggggtatatgtgggggtatggggctgctatataactaacattaatatataggtaacactatataacaactatataactaacaactaatatagttgttgctatattagcagtttatatataaactatgtaaatagttttaaatatatataaactatagttttaaatacatataaactatagtttatatataaactaacatataactaacaactaatatagttgttgctatataactaacattcaatggctgcttatgtgccaggtactgttctaagcccttttcattagttagttcatttaatccacatgtgagggttactataagatagtaatatcatcatcccccttttatagatacagaaattgaagcacagacaggttaagtcacttgtttgcaattagggagtagaatacctgagatctgatcctatgtaacatgtctcagaattacactgagaagtttctcttgaaagcatttgctggagacacctaataccataataccatctgtaatcctcatattcttgtctctctggtgtcttttctgactcgagtgtccagaactttttacttttggcttttttatcctagaacttgaagcctgacttaaatctttaggtctgtggttcctactgtcaaccataggaaatttgcttgaccaaaattacaattaaaaatcagggtttttttggaaacagggaatcaaacacttaagattcatatttttcaaggataatagattatgacaaaacctgtttgacctttaaccttccttgaacaaatcaaagtgtttcctagggataaggcagagttggcattcaggatttgtcactcttttctgtttgacaactaccaaattctgaattccattgttttgctgtataccaattatttctaatctttatattctgaaatgaataattacactcagaatttttatgcttattcttagccctactcttttattgtaatttagtgggtaacacgtagtaaatactcaataaatgttggtgaaattcacttaaattctcagtttatttgttttgtaatagtttttaacagtactgtccagatgaagctttaatgctaatgttcaacaccatttcttgtttatgtattttgagattttagtggtttgtgtttatcttcctcaaagtaagctcttcctccttaacccttgatttctcagccttttatctggtttctggtttccatctgggtttataggactctccactcaactcatgaactttccagatggaaaggggcctgccccatattcctgtaatcaccttagagtacaaacccctgcaaattaggcaagaaggatcacagcagaaaaacagcattaatacttttatttcccttagttctatctaagtaattacttatcctatcccaggttatcctcttcaaagttaacacatttgaaaatgcaaaaagcaaaagcaacaagcacccccaaaagacaacaaaatagaaatcaaacccttcaaaacaatgacattttaatgtcagaagttggacagtttcattgaaaaattcaccgctgcttatagcttaattaagctagttaatttattcagccagtatttgttgagcatctattaggctgcagacaaaactgaatatgatctggtctttgctttcaaggagctgaaatcagtgaggggaaataaatataaccataatggagtgtgtaagtgttctattagaggggcaaacaaaggcgataaggctgctggttctgcttgggggtactgaggacagtttcatggaggaggtgatatttgagatgaaactcggaaagaaacagagtgttcctgacaaaaaactaaaaacaatacttgaagagtgcttgactttgagaatgctagttgacgttcagaatggctgtttaccagtaggtcgtaccttgattctggaccactaaggataaataataaatgaaaaattaatatttcaggagtacgtatggatttagaagtatggatttcatctggggagtcaggtttactcatgtttatgtagaaataccagcgtaaacttggaaaccagagaagaaacaagggatttgaaggcaatccagttgtgatatctgccaccttgttggtcactgatattttgaccaatccagctggctgagcaccccctcttactcctccatgaacctgaatgcttgtttgaagagacagatccattctttggtaaaaagccatgggaatataattggaaggttaatttatgaattttctaattcattgattccacacacacgagcaactcctgtgtgccaggctttgtgctaggtactagaaattccgtggtgtaaagatagctgtggtccctgcactcatggacttcacatctagctgtcagttcttcactctggtatgcatactctgaagctatatactctgtaattcatgctcttaagcttgtacactgtttttaggatatatggcctagagaacagtgtgggtaatcagatgttcatcaccactagcatccttttaggcctagagcaatatctagctgtcatgatgctcagatccagggaactagatgcagcaagtctagtaaatacagactagatttgtataacaggacagtgaagtatttttttgctaaatgagtttttcagtggctgttctttgatgcgttcttctgtttcctaggttaataatccagttgcatgagaaggaacagcatgttcaagatatcattcctataaatagccacttcagatgtgttcaaggtactagctttaattccttagctagttttataatgttttttctcggtcattactgcattatgtaataccatacatatttaaatttgtcagtgcatgtaaaatgaaatgtattactctttgcataaaaagataacattgaggagatgatactttctctaagaatgctgaagggttatatcgaaatatatttgtatatgtgtgtctatagtctcacctgtttccttggcttgggttagagatgtatgtagattgttacctgtgtaggtagttttttatgctgactgacctatatgtggatttaaataacattcttgggcttaacggacacagtgctcataaggtaccaaggtcacttggattcacacacattcagcactttctccacatgctatttgaaattaagacatttggcaacatgccttgccagactgtaatatcttacactcaattgtgctgattctcaaaccttgacattggtgaatcataagaaaattgactctggggaggaaatatttggcctcctgccctcaaatttggggacggagcatagaaaatctgttgtttcatctgctacaatgaaacttaaaaattgggaggtttgtgtaggaggtgttgcttctgtcatctcacattgctctagaaaggaaattgatactagagaacaaatgcattctgttttcactaggaccagtggctttatctagcagaagcattctgtatcaattgtagcttcttggaaaacttgttttttcaagacaaggtcatttcccaggctcaagtgatcctcccacttcagcctcccaagtagctgggactgcaggtgcaccaccccccagctaattttttttgtaatttttgtagtgacggggtttcgccatgttgcccaggctggtctcaaactcctgagttcaagcaatctgcctgtctcggcctccaaaagtgctgggattacaggtgtgagccagcatgcctggcctttcttggaaaacttaaatcttaccttgcatggattatttcttaaactacattgaactttttttttaatcactaagtgacatgtacataatgtaatacatttggaaagaacagaaaagtgtaaagaaaataggtcacttaaattcccatcctttcagagataaacacctagcattttccttttttctacacatacattgcagggtgagtgatactcatcttatacaattttttgtctcttctacatgctattgtattatgagcacttttccatgccattaatggctatataccataccagtttatgaatggtccataatgtaattattcccctatgttgacatttgggttatttttcactagtatcaatagtaatatgatgaacatctctgcacctaaatatacctgcacatctcttatttcctcaggatgtattcctataagtgaaaatactaagctagtggatatgactttttaagaatgcatgtgttaagaattaaaaataacttcaatgaatagtgtccatatttgtatggaagaatgaagtgatagctatttagcctgccctatgtgagagagacatactaaacaaggtagccacgttccatagtaagttgctgtggccacctcacttttcaaggtgtaggccttcacagaggggaagagccaaagaacatgactttaaattaatatcctattagctttgtacctttttactctacctctaggatctcttttaccctgtttctcttagtatttttaataagaaatcaattgctgattgttagatcgtagtgctgcttcttagaacctgggaaaatatgtgcacacatgtaacgtagttccccatgactaaaggaagacttacttttgattttcatctcctttctatttcctgacccctgcatctattttgtaaactgtggccaggcgcgatggcttgcacctgtaatcccaacattttgggaagctgaggcaggaggattgcttgagcccaggggttcaagaccagcctgggcaacattgcgagaccccatctgtacaaaaataaaattaaaaaaacaacatttgccagacgtggtggcagatacatgtagtcccagctacttgggaggctgaagcaggagggttgcttgagcccagcagttcgaggctgcagtgagctgtgattgtgccactgcatgctaacctgggtgagagagtgaggccatctctaaagaaaaagaaaaccggctgggcgcggtggctcaggcctgtaatcccagcactttgggaggccaaggtgggcagatcacaaggtcaggagattgagaccatcctggctaacacgatgaaaccccgtctctactaaaaatacaaaaaattagccgggcatggtggcgggtgcctgtagtcccaactactcgggaggctgaggcaggagaatggtgtgaacctgggaggcggagcttgcagtgagccgagatcgtgccactgcactccagcctgggtgacagagcaagactccgtctcaaaaaaaaaaaaaaaaaaagaaaaagaaaaccatctgtaaacactcaggttttacagaactaaaagttaatgaagaacagtagtaagcatacaatatctatgtcttgatgccctaattccccttgtttaatcatcctaataataatatcgagactactttttagtgttaaaggagttagttccttgccagttgcttctgttgtacctgagtaatggagccaaataaacaattcagtcttgggagggaggtgaaaaaggtgagactactccatttgaccaaggtagatccaggctaatcccaaggagtcagtacccagagttcaattagccaggagggtctggcaggtgcacttggtcaaatccagagaaatcagaggggaagagataggttgggtctagacacttgttgtaaaggaagaagtccaggagaaccattgagagataagagaaatccaaacttgcagactgctttgcaccctgtttggtacggagggccttgggcccacaggtagtagttgtaacctgaaggtatactctgcccccatgtgtggggcaggggcagaggtgatgagatcactgggaaattttcagagaatagatctgagttaagaaagtaattcacctctgggctttcagggtcacttcctttgccttctgttatctaaagaagtatctaaaggacccagagttaaatcattatgttacagttaaggggaattaaacttgctttcgctgaattaacatgttgttatgttctgtactattaatttctcattcgttgatttgctttgaggagttccatttggttacttcttcagttcatttttattttagttgatttgctcatagtctttagaacccagtgctataaaaaatccctttaaaaaatattaaacgaaaagggatttaaaaaaatatgttctaagacctaggagtagtgactgagagaagcagttatttagttaggcatgtattcttttggttgtagtgagtggttttctcttccctaatcctactctcttttttttcccctctcagaagcagaagaaactcttttgattgacatagcttctaacagtgagtatctttctgaatgtgcttgatttttactcaacaaatatttacttgaacactcactacatttaagacaccttttggggcacattttttattttaccatcttttcctgtagtctcctgtagcagccatacaaattagcactgtttcccaaaaacatgtaggctaagcctaagaaaaagcaggtggctggtaagaatctttataaaaataaaaaataatgatctacctttctaatgctgaacttccgtgagctaccagtattgttgctgtcagttgaatcattgctgtagaattgataattgtaggaagggctgatgtttaaagcacataaggtttattggtggagtttttttggtcattttttaactgctattacattttaagttttttccctaccctctttttaaattttgtgtgttaagtcataatattttcctttatttgttgtatttttttggaaggctgaagagtcccttaaattgcttgtccaggcattcctttaaaaaaaaaagtttagtcttttatttaagccccatcccctcaaggcatctctttattagagggaacatgatcttcttttcaatgtttccattctctcatttttatctgtttgaagcaaatcatctttgactttctgtgcaaactgttctttgtttatcatctaattgtactattttatggagtggagaaaatgggcactcgatgctactgtgaggttgctatggaaaagagtatctgaccacatgaatctaaatcaaatgggttgccttatctcttggttgagtccttggatgagtgggaactggcactgagcttgggactaggggtttacataactttgtttagacagtccctgcccttggcactattaatttgtattgaacactttaagtaggctttttttctggcttgagtttttttttttttccctttggtcgtgaattttagaagtcttaaaggctgtgcctgaaaggccaggtaaaccccagctgcaagtatccaagagagaaaataacttaatgtctatttcttattgtgcttagaaaggagaaggcaaaaacaacacttaaaaaagcaaaactagaacaaaagcaattccataacaactgacactgctgctgaaataagagatggaaatgtcctgtatttgatgtggagaagtatttgattcaaagctgaaaagttaaactgagctgtgccttttctcttataagcacctaattttcggcattagttttgttgtggccgcttctacattagccatgtgttgctatgtccagagttctagttactggctcatagggggaaaataggtaagtgaccacttgaataaaatcctttgttatttctacccatttagtagtatttgcactgaaaccatattttatcttgatccttgggcttcatacataaacctttatggtacacggtgtgttgcaggaaggagatcttgggtttgttaggcaggcctgattttaatgtaaatatgcattttcccattgtctggatattggtgttaaatgctttgtaaataattttttctcacagaagtaatacatcttcattatatacaatttactaattcagaaaagcttaaagtatcaaattaagattattttcctgcaatctagagatcaccactgtggttaacatttttatgtatttccttccagtctttatatttttacataattggaatcctcatatgcagtttttatcctgcgtcttcatttaacattatattgtcccattttcttatgtcatttacaattactttataatatgctttttaaaaaccaaatatttcaccataggtctgtgccaaattttattaaattaacttctttataaaattaagtcattgtcaaggaacatgatatatctgtttttttcaggtcctcttttatatctttcaataaaattttatagtttcttaatatatatagtttttaggttaagtatttcgtggtggattttatttgctgctattgcgagtggaggttttttctatgtccttctaattgtttattactagtatacagaatagctgttgagttgtggatatttatcttttatccagttgcttcattgaaatttatttttaatcttttttgcttttcattttgttttttcattttggtagctaaccttaatatctataaataataattttgtctcttttctagtagctactatcgttgtacactataccagtgagaattttgggaccagtggtaaatgatgatgtttcttgtttggctcctgatttcagtgagaatgcctcaagtggtatttcactgttaatgacattattgcttgttgatttgacagggttttttttttttttaattaagaaactgcatttatttcaagtttgtgttttttaaaattatgaatgtatactgaattttagcaaatgtctttttggtatttatggagatgattttattcttccttatttgaccaattggtacactgtattgtactaatttcctaaaattaaactgtcccttgtttatccattattcaacaaatatttgttgagtgccttctatttctcaggcacttttgtaagtgcagaatcagtacagaacgacaaagataaagttgctgctcctactttggttcttgcttctgtgcaattcagtactagtgtcacacagatacctataattcaatcattcattctataaaaatatgactattttttatgtgccaggaactacactaggctctagggatatagcagaaagcagtacagtcatgatactttaaggattttaatataggaaacagactttaaactgataagatatagataattgtagttttttttgtttgtttttttgagatggagtcttgctctgtcatccaggctggagtgcagcggtgccatcttggctcactgcaagctccgccttccaggttcacaccattctcctgtctcagcctcccgagtagctgggactacaggcacctgccaccatgcctggctaattttttgtgtttttagtgaagacaggatttcaccatgttagccaggatggtctcaatctcttgacctcgtgatctgcccgccttggcctcccaaagtgctgggattacaggcgtgagccaccgtgcctggcccagataattgtagttttaataaatgctcttgaggaaaagtactaagagtttatgagaagagtaagtatattaggagggtggtcagggaagacctctttgaagaattgacatttaaattgagaccagaggggctaagtaagaggcaggttaagatgggagagagaagaatttaccaggtaaagggaatcacaaggctccaggctgggaagtagcttgacacttttctttgaagtgatagaagaccagggtgcctaaaacaggtcttgggcaccaaggtaagaaaaacaggctagggggcagatctggcaggatcttgtaagccttgtcttaaatctgaattttgagatttcaaaaatgagaatcgtatgaaggattttatgctggggtgtcatcatttgcatggaagcagagagaccagttaggaggctgtttccatagtgtaagctagagagtgtggtggcattagtaatgaagagaagcagtcagacttgatagatgtttttggaggtaaaatccataggaattgttttgggtgtaaggggtgagaggaagtgtcaaggatgaatctcgggtttctgacatgactgtggatgatggtaccatttgcagaaataagaacactgcacaaagaatgagttttcctcaagggggaagggtcattaatttagttttagtcatgtttagtttgagattttttttttgttttttgagatggagcctcggtcttatcgcccaggctggagggcagtggcgcgatctcagctcactgcaacctctgcctcccgggttgaagctattcccctgcctcagcctcctgagtagctgggattacaggcacccgccaccacgcccagctgatttttgtactttcagtagagatggggttttgccttattggccaggctggtctggaactcctgacctcaggtgatctgcccacctcggccttccaaagtgctgggattaacaggcatgagccacctcacccggctgagattttttttgagacacctgagtgtagatgataaattggcaagtgaatgtatgcatctgaatctcagaagaaagtcatctgggtcactagcacgtagatgatattcaaaatcataagagatgatgtgattgtgtgtggactgtgctatccaatacagtagccactggctacatgtgcctatttaaaataattagaaataaaatgagaaattcagtccctcagttgcagtagtcacatatcaaattgttagctaccatattggacagcacggtttagagcatgcccatagtcacagaaagtcccattggacaatactggtatagaatgagaaaaaagatttatgtttgaacttgaggaactccattttttaaatgttagatagaggaagagatacttcaaagggcactcaaaattagtgatgagagagaaactagatgagtatggtatcatagaagcttttggaagggattatatcaagccctgattaactgttgatttctgctaataggtctaataagatgactgaagaatatccatgggatggaggttattggtgaacttaaagcaatttcagataagtagtgggtgtggaagtcatattggaatggattcaagtgagaaatgggaagtctgtgactgtgtgtcttttaaagaaacgtgactggaggggaatatagagatggactggaattggagggaaatctgagatccaggaagatttttgtttttcagatgagaaggacttagaacacgattatatgctaatgtggaggagctagtgaaagggaaagcgttaaggatatgggggtgtgtctagggattagttgtaagattactgagagaatcagaggggttgtaattcaaagtgaaggaggtttgataggagtgatcttcttccttgtatcagtagggaaaggatgagatgagtacaaatacagataagtttccatgtgatagctttattttttctctgaagtatgagctgaagcattctgcttagaataagagggctcaagaagatgggggatccaaattttgaggataaatgagtaggtgtgaaacagttgtttcagatagtagtaggagactgattgactgtaggaccttaggttgcttcctatgatagaggacccggttgagattggcaatcaggaatgtataatgatagccatctggttgtgggtgtgcatatttaccccctctgcttgttcaggtataagtacagaaaggcaattagttggatttctgagggttggtatttagccaggtaggtgccacggaagaacagagaggcaaggcagttctgggtttttgcaagagtgtaatgatggcatctgtttgataaaaggggaagtgagagcaggaaggggctgacggatagtaagaaaacagagaaatcaatgggctggaggttcccatcagattaaaaaaaaaaaacagttacaatggggataatgagcaagtaagttggaaggaataacatgtcagggtgggatatttgaattagaggtttatgaagtggtggtgtttctatgatgacaaaatccagggtataactgagagggtcccagtagcaactgaggaagtggtggctgaggtggagggggaatgtcattggatgaggaagctgaaggtgttgactgggttttctgtgctaattttaaagggacccaaaattaatggcaggagatcgagtggagagaaagtcttatgagccaggtattgtatcttggattctgaagtttctgggaggatggtgcatgatcttgtagaggaaagggaggaaacggtagatcccaatggatgagcctcaaaggagaaaggattttgcctgagggagaaggagaaagagtagtctggtggtgttattaggacaaatacagacaccaactcaaaattacttcaggtgtgagagaatataaacagactccattaagagggttaggccaggcccggtggcttacgcctgtaatcccagcactttgggaggccgaggcgggcggatcacgaggccagtagtttgagactagcctggccaacatggtgaaaccgcgtctctactaaaaatacaaaaattagctgggtgtggtcgtgcgtgcctgtaatcccagctactcaggaagctgaggcaggagaatcacttgaacccgggaggtggaggttgcagtgagccgagatcgcggcattgcattccagcctgggcagtagagactccttctcaaaataaataaataaataaataaataaataaataaataaataaataaataaataaaaataagagggttgtaggagaagtgctcctcctagggaccagccagttttgcagttgactctgaattttaatgtgcacatatggtcagatcactcggaaactacgagtgcctgggcttcacctccagaggttctgttttaattgtcctggagtggggcctgggttcaatattgtttttaaagtgcctctggtggccaagcacagtggctcatgcctgtaatcccagcactttgggaggccaaggtgggcagatcacgaggtcaggagttcgagaccagcctgaccaacatggtgaaacccgatctctactaaatatacaaaaagtagccggacatggtggcgggcacctgtaatcccagctactcaggaggttgatgcaggagaattgcttgaacccaggggacgaggttgcagtgagccgagatcacgccactgtgttccagcctgggcaacagagcaagactccgtctcaaaaaataaataaaaacaaaaataaagtgcctctggtaattttaatgcatgcatagttgagaactactgagagatgcagagaatattcagatgaagttgaggatgtaggagtgtttgcagatcacagaggtccagaaggttttaggatggacaagaagagtagaaggttgagtcttgaggtaatttgttttctttctcaagcaacatggtgagggagcatccagtgttattttgtgagcaatttctggaatcttctggcccattaaataggtcagttatatatttgctaaaatatgtctttcaagaattgtgtgtttgtgtgtgtgtgagagataataagggtttttgttctaaatttatgtcagatagaaactactcttttaaaaccacatttagtataaataatctgagaaagaaaggacttgttaggccctgaaggagttttccctatatcttcatggctgctataattgacacttttttccttccctctcttttttcccctctacagtggcaccctcattaattttcttatccgtagtctatttgggtgccttctttcacatttttctccatttttatctattttcttctaattaattattttattttcctttttgtaactcattttacaaagacagaaagaagaagaaatgcagaggacaaaaagctaaaggttcagaagtggatttccaccataaaaactaggattttcatttcattttctcatgtatttgttatttacacgtggtaaagagtccagttcatcagtcattaaataccttctgtctgtgaagtctgatgttactgtcaccagtagagtgaccagcaagccttatttgcctgggactttcccagtcttagcattggaagtcctgagtcctaggaagcctctgagtaccatacagtgctgggacagttggtcaccctagactcctgaaagtgctgggttcgctgtatgtgcaccctgcatgcgtaccctgcctcttgcccttaaggagcttgtagtttccagaggcatgagaaaacaacgtatgtaataaatcagttacaataagaatagaaacaagtacataggtttcctggatcaccacatccaaacagttgatatagatgataactatagggcatcaaaaaaggggagacaatatgttatacacataataaattaaagccctagctaactttgcttctaattctcctagtttccaattggctgtacttgaaccaaaccacttctgagcataggtcattatattgtttttgtatgtttattcaagacatacattttaaacttgaggtaatgagttgtagatgcttcttttcagaatacttcaaaccagtatcactatttttaagttattttgtaaatttaatctgtgcttacggacaaaccatcctacttattttattcccttcatgcttcagatactctgacaatgtgatctggacttgaaatggtaggaatttccagctaaggaatgggagggagggtgattgaggaatttaccttttgctggaatttgaaggtccctgctttgatgtctgagagatagatcagaacgcaggaaagtataattttagtatgtgtcatatccttagatcgggctgctcatggacacggttcatcagccttaggagttctcacttcccttagggttccctctctgcatcaccccttccaccaccgtcatactgactctcttgatcttgtatgtgtgcttcctatattagagatctggaatatttgtgatctggaccttcttctgttaacctgataagttgagaatatgatcccagtaaaacattttatcccatagcagtatatgtatggatttcaattctttttaggtggctgcaaaattcgggttcagggggactggatcagagagcgccgctttgaaatccctgatgaggaacactgtttgaagttcctctcagctgtccttgctgctcagaaaggtaactaaagactcagcgattttctttcttctatttcaacgggagtggaattctgacatgctgatacagaggaaagtggccattggcaaaatacctcaccctttaagccctgatagctgatttttttttcttcaggagtgaacacagggataggttagggaaaaaatctgcccagctttaaggacactaggcaagttttcagaatattcagtgtcatggcaagcacagcttaccatagactataattctccttctgcccctagatgaccccagagctgccctcatttccttagtttcttccactgtatccaaaaatggtgctggcccctgcatataaggaatgttgaaagaatggcttttggctatagtaaattctactcagtgaaagacttcccagtttctgaccatgaaccttatctctctagctcagtcacagcttcttgttccagagcaaaaggactcatctagctggtaccagaaattagacactaaggacaaaccttctgttttttcaggtactaaaaagttcctggtttccttgttgctatggtcattgcagagtcagtagattttgtcaggccaaatatggtgatgtagattaaagctgatgtcagacacattctcctgcagagtagttttatcaagtccaggcccactgaccagtgttcactccttatccttcctgtagcatggtagctgttcaggagccagcttagcagggtggtagaaagtacaagctcgagagccagacagcctggatttgaatcccaagtcaagaacttactagttgtacaaccttcatcaagttactcaacaactctgaacttcccttttcctttctgtaatatgggaagatttttaatagtacttacttcttggagtttttgtgatgattaagtgagatcatgatatagtcccttactctcaaccaggcattgtgctcagtcttcaataaatgttagctattactagtctgttccaagttcttataaacttctattgttctagttagtatatcagtgcttcagggataggtatgcttcttcgaactccaatccaagtaatttctacccttatgatagttttctgtttagtaataccactgatcaaattgtgatcaaatcaaagccctgttaccctggatatgttggatgttagattttttccccgtttgactttggggtctgtgtctttcagggcttcttggatttgaagacaatttttcttctatgaatttggacaagaaaataaattcacaaaatcagcctactgggattcatcgggaacccccacctccacccttttcagtgaataaaatgtaagtcccatgtgaaaacatatttgccttgtaggagaattatagtttaaacaattttacttttgaatctctcatttatttgctaggcttccacgtgaaaaagaagcttctaacaaggagcagcccaaagtgaccaacaccatgcggaagctctttgtaccaaatacccaatctgggcagcgggagggtctcatcaaacatatcctggcaaagcgagagaaagaatatgtcaacattcagactttcaggttagtgtctcttttgcttcctgagtctaaaaagttagtatatataacagacagtggcctgttgatatttaagacattagcctaattaagaatcaaaatatgataaaaaggaatggttgcctgtttcaagctcctgtctctatgctggccaataacatgcatatcagaaataatgcagatgctacagtttcccttggattttctttttttgtgtgtgtgggtcagggtctctctttgtcacccaggctggagagcagatagatcatggcttactgtagcctcaacctctcagtcgtaagcaatcctcccacgccagccctgcaagtaggtggaactacaggtgcacaccaccacatccagctaatatttgtgttttttatagagactgggtttcaccaggttgcccaggctggtctcaaattcctgagctcaggcaatccacccgccttggcctcacaaagtgttaggattacaggcttgagccaccgtgcttggccttcccttggattttctaactactaataatgccatgtctactaatgtctctactgagtcctagagaaccaaatcaaggtcacatgtactagagaattttcccctagcacattccataagcaagcgtgtttatatatctggcctgttaagtttttttttttcagccaatattagaaaattaaagtccatcattaccactagctcttaacttacttactttggtaaataaagaaagtttcacccagtcctcttgattgggaggtctatcttgggttcttttatctgtattattttttatttcatcttttttctggacttgtgtgtgtatgctgcatgtgaggtaccatgtggcatgtatcgccaatgcatgaagcaacaccacatttctttgttattcatgagcagaatgtacccttctagtccaagattctagtcccatctgctatcctgtcatacctcatttattctaattcagtcataactatatccctatgctaaaacttgcagttcctcatatcccccactatgcttatatttgtgtgtaaacagttaagacagtcatgagttttcccttctgctttcccccttaatactatgtctgcctcatcagaatttcctacacagatgtccttgtaatccttcaggaagtgagttcctggagtcaactatagccccttatagaacatttatccatatttgactagcttacagcatgaagatacctctttcccatccataagctctcctatcaagtatgagtttggatggagcttaattgaaaggaaatgtggtatagcaattacctttgcattttttaaaaataaagacttggtttccttctgtagttttacttaatgtaaaatttagagaaaataagcccactgcctttgtgttctagatgcaaaagatctttcttacatatgtggcaaaacattttgaggaattatgttagcatattgtgaacatacctttgtatggaagcgaaaagaaagaacttctgttggtttatacttgatctttgttttcaaattatcttttcgtattatgtattagattttttgttggaacttggaatgtgaatggccagtctccagatagcgggttagaaccttggctgaactgtgatcccaatcctcctgatatctactgcattgggtaaagaacacttctggaatttccttttggctatatgtttggtgttcatttacatgatgttttgccttttttaaaaaagactgttggtaaaacctactgtagactatacacgagagttaacttgcgggtcaaatttgtgagaacagaaatgaacagatacctaaaatggtgtaaggaagcatctaattttcttgaaacccgtaggaatctatatattctgcatagaaactaagacttggggtcagttctaacagtgacagttcctaggatataagagcaaagctctgctgttatcctctgtgggaggtattttgatttattttttgcatagcttatgaatgtacttgtgggaattctttagaaaagaaagctacttgttcttactgataacctgggtgaacagagcagttctataaaatttatctctctcccatctttttttcatctaatgtttcaacatatgggacaggaggtagccagagataattatgggatatgtatagatctcatatcccttttttcctcagattccaagaactggacttgagcacagaagccttcttctactttgaatctgtgaaggaacaagaatggtccatggctgtagagagaggtttgcattccaaagccaagtataagaaagtaagccgcatttaattatctttttaagtgtatgactaaatagggctcaccgggagttattccattatctacaacttgttccaaaagaatagtttaattgaattcttctctgtgtgtaatactgggatagggcagattgatcattcatccttatttcctagaaaaaaaaatccctaagctttctgatactatattttcattgcttagatagcttttaggggaaaaaagaattttattatgcttatatcaatacttagtttgaaataattacatataagatttagattactcactgacatggtcagaattgaatgctttacagaaaagcaatatgaaacgtgggcgcatggtgcatgtgttgcaatcagagcaagaatagaagtggtgtggaatttgaacgagttctaaacttggttttaagttaagaggagagttgactttagcaagatgggccaatttgtttgtctttagaaggtatgtggtaaaggcatttagctaccagaagagttaattacagggctatcatactaaggtctctaaaagaagtaatgtgagtaatttttctctacatcttctaacagtttatataggtaataaaactcctggggatgttattcctctcatataggtccctgactaatgtatatctcagacatatttctagctgtagttcacaagttaaaaataagtaaaaaagattgctgtttggttgatttcaatttcttagaaaattagacatcagaaactaggaaggaaaggtggaaggaacaagctgggatagtggctttattatttgaacttttaatgctgcttactcctggtaggctaagaagtgattaaaagaatagatctagagctgaaagtactcattgtccctcccagcttttaactcttattggtcagtgccagattagagcctccccagagaatattagtttccacttgacggggtccactgagaaattagaggatatgaagtcagatttgggcactagtatatcatcttgatggaaaattagtcgtgggacattagaaatgtggcaaagattggtattaacattaaccttttgtaactccccggaactcataggttcaactggtgcgccttgttgggatgatgcttcttatatttgccagaaaggatcagtgtcgatacattcgtgatattgctacagaaacagttggaactggaatcatggggaaaatggtgagttactttggaaatgagcttgattattattcatgttcatgtaaagttcagttgcttgttctgtgtactaattgaataattactcttgctaacagggaaacaaaggtggggtagctgtgagatttgtatttcacaacaccaccttttgcattgtcaattcccatctggctgcacacgtggaggactttgagagaaggaatcaagattataaggacatttgtgcgagaatgagttttgtggtcccaaatcagaccctcccgcagttgaacatcatgaaacatgagtaagtggttaactcacctgtagcctttgagtagtggctacaggagtttggatagtgtagagattaaatgtgagatactgtagagctgtgaagagtgaaagattaccagtgagggattggggtcacaaaggagagggtttttgagtaataacagaatcattgaggcagagaaattagacttgatatcagaggaaaagatagttctattagtggggcacctagaataatgctggagggtctgtagttggagtcagtttttattgtttttatgataaaatagaaatattcattgcaaatgtaataaaagataaaattagaagttaaatttcctcatttcttattctctacctagccagtccctctctccaaaggaaaccattcttaacagttgggtgtgtagccttttagatctgtactgtccaatatgacaaccagtagccatatatggctgttaggtacctgaaagtgactggtccaaattaagatatgctgtatgcataagctatatattggattttaaagacttaggaagaagatgtacgatatcttgatttctaaaatattgatcacatgttgaaataatttggatatattgagtaaaatgaaatttattgatactcacttgttttttttctttttaaatgcagctactagaaaacttaaaattatattgtgaggtgcattataattctattaaatagcactattctagccttttgtctattcatatacaaacacacacataggtacttggtgtataagactgtattattctatttattgtggattcctttccaagccagtatatatagatctacattattctttttaatggctgtgcttattaaaaacaggggcagcagagagaggtcagtgaagaatgggatttaataagcatagaagcagagatgtgttgaggagtagatgtggtggtagaaaatgattagttttaaagaaattaatatacctaaaaccatgaaaaccctagaagaaaacctaggcattaccattcaggacataggcatgggcaaggacttcatgtctaaaacaccaaaagcaatggcaacaaaagccaaaattgacaaatgggatctaattcaactaaagagcttctgcacagcaaaagaaactaccatcagagtgaacaggcaacctacaaaatgggagaaaattttcgcaacctactcatctgacaaagggctaatatccagaatctacaatgaactcaaacaaatttacaagaaaaaaacaaccccatcaaaaagtgggcaaaggacatgaacagacacttctcaaaagaagacatttatgcagccaaaaaacacatgaaaaaatgctcaccatcactggccatcagagaaacgcaaatcaaaaccacaatgagataccatctcacaccagttagaatggcaatcattaaaaagtcaggagacaacaggtgctggagaggatgtggagaaataggaacacttttacactgttggtgggactgtaaactagttcaacccttgtggaagtcagtgtggcgattcctcagggatctagaactagaaataccatttgacccagccatcccattactgggtatatacccaaaggactataaatcatgctgctataaagacatatgcacacgtatgtttatcgcggcactattcacaatagcaaagacttggaaccaagccaaatgtccaacaatgatagactggattaagaaaatgtggcacatatacaccatggaatactatgcagccataaaaaatgatgagctcatgtcctttgtagggacatggatgaaattggaaatcatcattcacagtaaactatcgcaagaacaaaaaaccaaacactgcatgttctcactcataggtgggaattgaacaatgagaacacatggacacaggaaggggaacatcacactctggggactgttgtggggtggggggagcggggagggatagctttaggagatatacctaatgctaaatgacgagttaatgggtgcagcacaccagcatggcacatgtatacatatgtaactaacctgcacattgtgcacatgtaccctaaaacttataataataaaataaaatttaaaaaattaatatagagagtagagtcattggggaaagaggaggaaagagtagggatattcaactattttccataatgtctcaataattaggatcatgtagaattctatttcacagtggtaaagtgaaggccttaaaatgtatggtcatgaagttgccatgaaattccaaaaatttattttcccagattccataaatttcatgttgcatttgagattgtcagaatgacccattgggaacttgagctcactcaacaggagagtccattttgatgtgttaattgcattgtctccctttgtggggctctcagcacatctaagggcctgttgctgttattgggagctgaggatcccatggaatgccagtctccttcctgcctgtaacttgggcaatggtagaccaatcaggcttcactagagagccctggacctacttttcttagtgggtcctgcctcggagagctgtcactcagaccatgcagacttcagtggagaacctgcaggacttcaggactctgagaggcagaaaacgttcagattctcttcccctaaagacctggctagcagccaggcaaaattttgaagcttgtccagcaaataaactgcatgcttctcagtccattaactccttggcttctaaatcccatacgtaatatttcccagtttcattcttcatgtacagagtcctcttctcctacctattttgtaatccattgtctctctcaggtgttgatagtagttgccctcaaaggattagttacaactttaaaccccttgtgagatagtggtgagtgagcccttatcaataatctacccatttttcttctctccatccttctctgttttttttatgctaatcgctacttctgttcatacatttttttgatccttagggttgtcatttggttgggagatttgaattatagactttgcatgcctgatgccaatgaggtgaaaagtcttattaataagaaagaccttcagagactcttgaaattcgaccaggtaagtaaagtttcattttataggaactttcctagatgggagatgagattgttagagttatgggaggtatatcttactctagggagtgatggaaacgtcttactgtcttgtgaaaacagtgtgactagtgatgcattgactacatacaagatttgtagtacttttattaagtgcttggatgggaggagggaagataacattagtgataaaaagtaaatacaacatttattcaaaacgtctttatcattaagagatttcagagatttgtctaaatgagttggtgaatgggtggggttaattggggaacacttcctggaggaagtgggccttcagctatgttgatgtggtttggcagatggaacagtgaaaactgttctatgattacttggcaagctgaggaacagcttggaggtaaaagagggaggccctgtgaggggaactgggaagtacagaaaagaagtttgtctgggatcaacagcataggctatgggctcatgggaactagatgataagttgaagctagctggtatttaaaacctgcaggaaaagcattgagttggtaacatttacataaaacctgatattcaagaacctggtttccatatatttgaagcagtaaatttgcctcagaacctggcatgtgacttgaatttttacttcaacatatggatactggctgctaaaagtgaatgcttcttattgagggaggaaaatgttttgacttcattcgaataatctttaaatcgttatgagagccttttcaaccttcagacgtagccaacattcaggtgatttgcagcagaatggtttttgtagtgagccattcttgtctatgtctaccttcacgttgtggttggctgacaaatttctttgctttttctttattctgcctccaaaaggggtacatttaggataaattctgagtcttatataactctggtaaaatatttcagtgaggatctttcaaaacaatttgaaactattcgctgaatttggtttgcagaattattcattcaacatttgtgtgctttttctttaaattaaaattgtgctgggtggtttctgcccagctccaaggaacttacaattattcagatttcatttttccattttaccctctgccactattagcaataaaagaatagtgatgtgctaataacaagcatcctatctgagggtgagtttagatgctgtgggaatgctgagatttaattcataaggtatagaaatttcatttatgtactctcactacagttgtaaaggttgtggaactagatactttgaaataggaacagtggcttatcaacctgattatctcttatattaagatagtgttatcctgcttatttgatgcttctttctatctgtagctaaatattcagcgcacacagaaaaaagcttttgttgacttcaatgaaggggaaatcaagttcatccccacttataagtatgactctaaaacagaccggtgggattccaggtaaagtaataagaaccttctcacagagaaggttaaggcttgatcttatttctgaccctccatattggtaaggggctaggaattttttaggccatgccataagcagatatataaacctaatggctcagtgcctcagtgctattatagaacaataagagtgtttcatttatctatactcaaaggtgagcctatcttagggaagttattacttatatgtcaagattgttgaagttttatgggctacctacagtgccttatttctctcacctcagcaaacttgcttaaatttttgccttcctgattttgcctttgtttcttacctattacctgttctggctattttttttcccaaactacccagctatttaattcaggataccagaaggcaaaaacgaagccatgaagggttcttctagcaccagtagctctcaatccttaaaagactttagaatcccttagagaacttcaaaaaatactgatgcttggacctaatatctgccacagctggagaacactgagaaccactgtttagtagacccttttttttttttttttttttttgagacggagtctcgctctgtcgcccaggccggactgcggactgcagtggcgcaatctcggcgcactgcaagctccgcttcccgggttcacgccattctcctgcctcagcctcccgagtagctgggactacaggcgcccgccaccacgcccggctaattttttgtattttttttagtagagacggggtttcaccttgttagccaggatggtctcgatctcctgacctcatgatccacccgcctcggcctcccaaagtgctgggattacaggcgtgagccaccgcgcccggccagtagacccttttgatttcctaatcatcctagtaaagtgcccccagtaagttcttagtgagtatttgtcctctacctactatctctttcttttcttttcctttccttttttctttttcttttcttctttttctttctgtttctcctagctggctgagcacagaaacttgaaagagaaagaatccccacgcatgttcagctgttttgaactctgagagtactggcatgggtggggagtcgatattcctatgctcctaggtaactggccagcaaatgaagtgacactgttagatcttgtacactttgccatgtttgtttcactcacctgactttagagtcagctgcagagctactgatgagaaatatctgtgtcaccttctggatcagggtacaaggtgttgcttcttttaatagaatgatgaataggttctttttccctacccttggtattctgtggactgacatttgctcagacttgcatggtttgattttatttcgtctctattagaagaagctagacttgtccataaatgtctggtttaaaggagaaatcaatactgttattcctctccaaaaattaagcccagtctaggaagagaagattggagttttagacttgattagttatctatctgttgtgaagtgttgttgatgctcatagagtaaaggaaaaggaagtgttcaaaatataatccaaatcttctgaggatattttaagaacgtgctattttctcctgtggtgacattgttgaagatgtactcccaatcttaacagaaccattcattcattagataactattcgttgagcacctactttgcaccagataccatgctaggttctaggagttcagtggcaaacaagcaaatacagtcccttcacagagcttgcaaaatagtagggaggatgacaggggttgttagggaaggagaagtacacggttctttgggagcatgtaacaagagagcctaaccctgatctaaaccagtgtggtaggtattatgttcttgtgtgatatgttctctttataactcgtttctttacttacagtgggaaatgccgggttccagcctggtgtgaccgaattctttggagaggaacaaatgttaatcagcttaattatcggagtcacatggaactgaaaaccagcgaccacaagcctgttagcgccctcttccatattggggtaaacacttgtttgtacattcatttatttgtgtgttaagtatcaattactagaggattatttagactcagaacagatcagtaattcagcaagccataaatgttccataaccaaataaccatttgcagcattgagaggttagtgcccccaaccctcccaaatgctgtccgtatagctcttaatgctccaggccttttagtgacacagatgtttctcatgctacatagtggttaggtggtaacttgagcttcctaaagtaggtatgcataatgaagagttaaaagctaagttttatcagatagtaaagaagggaaacaccaggagggagattctgggtggaagggtagagacagcaggagcaaaggcacagactgatcagaatacagccaactctgtatattgtcttaagggatatagtgtcatccctacacttattttttctttttttttttttttttttttgagacggagtcttgccctatcctccgggctggagtgcagtggtgtgatcttggctcactgcaacctcctcttcccgggttcaagcgatgcccctgcctcagcctcccagagtgctgggattacaggcgtgagccaccgtgcccagcgaatttttttttaactctgttctatcctgggctgcattaatggccagttatttaattttctgtctgtattgtgagtaaagtttttttcccattgtatttttaaactgtgtgttattggtatgtaggtcatatcttgtaatcatgctgatttaatttgttacagccagtacatttaggttatttcttgtggatttttcagatctacagccctataatctgtcagaatgtatatagtgcagtgcttagtagaatggactttgtagtagacttctgggatttgcatccgagttcaaccactttctaactgtgtaaccatggacaatttatgtaacatatttatgcctcagtttcctcctctattaagcgtgggtaatattggtacatactcatgaagattaatgagttcggacatgtgaagagcataatgggataggtttctttcctctgtgtgtgtgttgatttagggggcttctgagatagatatcaccaacctgttttatcctgctcctgttttaaggaagaaagactttggggcttttcatttaagatcagaattatttattggtcttagaatagattttaaattttatcaagacaatcatgactttacttttgtccattttgaaattttaaaataataatcattaataatagtaactgttcctcagatagcagctagtggctgtgtggcagggactatgtgaggcaatttgcacacatctcatttactcctcacaacaacgctttgagttaaatacagttgatccttcaacaacatgggtttgaactacacagatccacttatatccagatattttcaaccaaatgcagatggaaaatacagtattcacaggatgtgaaacccacgtataaggagggccaactgtgggacttgagtatgcgtgaatttgattatacacaggccatgccagaatcaatcccccacagatctcaagggacaactgtatttcccatttaacagatgagcagatggagaacagcaagttgaaataacttatttaagagcattcaactaggaggagagctgagattccaatcttaagttggcttaactcccaactctgtgctctttctactaccccacaatacctctataattctatagaacttgatgaaatatacctttagataacttcttttagcccatctaatttctagtttgtacttgcaggctgcccctttttcttcatttgaattctcttaatccattttgagagggtatctttcctcaaacactaacctctttggttagatcaggtatgcctggcttttttgtttacatttcttttcaaaaccttcagatttttttgtttgtttttgttttttgttttttggtttttttttttttttttttgagacagagtctcgctctgtcacccaggttggagtgcagtggcacgatcttggctcactgcaagctccgcctcctgggttcacgccattctcttgcctcagcctcccgcccagctaattttttgtatttttagtagagacggggtttcaccatgttagccaggatgatctcgatctcctgaccttgtggtccacccgcctcagcctcccaaagtgctgagattacaggcatgagccaccgctcgcagccaaccttgggatgtttttaatactccatacacattaatgcagagcttctagtgggatatttacattttttttcaggcttcctgtgtatttatgtatatctttaataaagatatgccttttgagtttttaatgatttttaaattatacagcaatgacaagtgcttttaaaaaaattaaaaggaaatttaagcagaattgacagataaggcagaagttcttcaatccctgttctgtctcctactcccaactttgcctaaacccccattccccagccaggccactacccttaggagtttatatctttctagaccagtgctgtccaatagagctttctgtgatgatggaaatgtcctgtatctgtgctgtccagtccagtggcttctagcagcagggggctattgagtacttgaagtgtggctagtgcaactgagaactgaacttctaatttaatttaatttaaagtaatttaaattcaaattccctatgtggctagtcactattgtactggacagtgcagttctagacctttgtatatgcttttttgttcactcatagacaaaatactgatttgtgtgtgtctctatatcataaacggtcttatatgtatgtgttggtctgcaacttgatttttttttttaactcagcagtgtgtcttggagaacctcccatcttattacataaagacctagctcattgtactttttttcaaattcctaattttgtcagtaatttcctttactaaaatggatgtgtcaggttgtgaaattctttggggttccccccctcctcattatctttgatttgccattaagtgctgtgatcatgataacccgctgagaaaaagtttgattttattgagtaatcaccccatgttttggattcttgggcatgctatgattagaggctttaaaaaccacactatattttcaccaccattggcaccaatgactgttaacaaaggagccaagtgcaccgtggccaattaatttcagaagactttctgtgggctggctgagatagagctaggatagggttccaaccctgcacttggtactgtgatctgttgcattggttctcagacttcagtggatgtaagaattgcttagagagctttaaaaaaagtgtggatgcatgtgtcctcacccctagaggctgtgattagtagacccaggcagctgtgcttttaagacatactcaagttgattctgtcacatatctagtatattggaaagagtcttaaactagtccagatgtcacctttggtattcactgtagcagtgagcaagtttgttgattgttttgtatcttaatgttctcaactatcggaacaaaaatattccttgctttggtagccttccaggttgtgaaaataaaaagacatgtgcaa

SEQ ID NO: 919 - DNA, 32742 bp, Homo sapiens
  source 1..32742: mol_type = other DNA
aatgggaggctcggccgacaggggcgggggccgcgcagccggggactttcaggaactgcaggagcgtgcggcgcgggagtagccgagcgcccagcggctgggcctgagcgtcgagactcggggccgaggcggaggagcggccgccgcgccggggcccagccggagccgccgccctcgcccttgcctttgcctgcgcggctcagaatcaccatccgcggcgcgggagacgagccggccgtcccgggccgggggacccgcccgccatggccaccaaggtgaggggcgcgcggcgcaggccgggccggtcgctcaggcccggggcggcgcggagagggtcggggccggggccgcggggagggtcggggccaggggtggtcgaggggccactccgcttcctcggtggagtccccgggcgggtccgcggcccagccagtcccttctgggcatgggtgcggcgggcagtgcagacagaccaccaggatcgcaccgggggacggcgtcgggtctgggcgcgggttgggaccccgggcgcagcgaggtttgggaagtttgcacctgagcgtgggctgcggcgggctcgccgggaggggccgcgggacggaaacttcccgcagcccggggaggcccccgaggcgactggcgctctgtggcgtccggcgtccccgccgcccccacgtcccctcccgctgccgcctgggggaccctcgcccccgcggggcgggtgggggtcgagacctcggcggagaggacgcggcgcttcccgtcccggcctgcgggggctcgcggccggggagggaccgaggctgggacgccccgcgcccctttgccttcgctgctgttatttttttcttttgttttgctaccttttcattgtgaatggcattgccggcatgaataaaatatcaagagggaaatgactgtgctttcgattacgtgtttgcctgaaaaaaggcccaggcccgaattacgtggtggaactttgactcctgcttcgtcattggctaggagcggtggtttgcttgttttacgttattgtttatgaaattagcagtcactcttggctacctgaattttcaaaagccaccctcccccgctccttttccttgggcgttttcagtagttacttgatgtagaatagccactggggaagtcacggtcacggaagggaggacctgggggaggaggctctatacctgagccattaactgatctgtgatacactgtgaggagtgggtttacttttgcacttagtttttgtaatgtcactttgttagcatcagcacccctttgtctatttgtttttgagatctctgagctacttttgggttgctagaaacgttattttttatttttcgataggtgtttgctttttttgtggagtgttaaggtagaaaatggtaagaaatgtgaaatctctttgaaagatcagcattgcttgacttcggtctgctagatgttgtgctgtggtaaattttgtgctctgaatccatctaggtgcagcgtttgtagagaaatggggattctcctccagggaacctgttgctgctgttactgaaataattaccttcttgttaatatattattgcctgtgctgtgctttggttttattaatgcgatagaacttgccacctttttaacgtattaattttgtgttgacctttttaaaaataaaacttaggccaaggatttctaaggaaatttgattttgaggtttgttgccagacattccagaaattaccagttacacatcctagtacatgctcatcttgcaaccttaaaagcggtttataggccgggcgcggtggctcactcccacctgtaattccagcactttgggaggccgcggtgggtggttcacctgaggtcgggagctcgagacaagcctggccaatatggtgaaaccctgtctctactaaaaatacagaaattagctgggcgtggtggcgcgcgcctgtagccccagctgctctggaggctgaggcaggagaatcgcttgaacccgggaggcggaggttgcagtgatccgagatcgcgccactgcactccagcctgggcgacagagcgagactccgtttgaaaaaagaaaagacgagactccgtttgaaaaaagagaagacggtttatgacatagagatctgtctagtggtggtcagtgtgtttttacactctggtctactgaggcatgttatctgtactgtcctttaagtggaatgcagtttagcaactagtgcaggtatatatagtgaaatttttatttcatagttaatcctgaacttaatttttttccaaaaaatcgaaaagtggttcttgtatattaatctcgaattgcatgtgtctttgattaaacacgagccttaaagcatgcgtaaggacttcctacttcgttatctacaccactccaaaggcaaattccagtagttctgttagtttctttcggctgcctaatcactgttccacatggtgctcatttccatgtttacattgtgacaaaccatttccattttaagaaaaagaagagcaacgaagcagttattaaaagaagacccttcctttgttttctgacatgctggtgattcttgtgtcaaaccaaagtctcattttttaattgttcccagagagtcaagttggtgctttcctcccttcccccatatgcacactccttccccacacctgagtagttgtgttttttctttgtcttcttcaaggggtggggagaatgtgcttagtagtaatgactaacttttaataaaaatgtaggctccagtggcactcaggctgttgctataagtattaactgatgaaaagtaaattcagtatctggatattttaagggatgtcgatttccctttgaatttatcagagacttggctatagtatcttcagatacaattttcttgtttgttcttacgtattaaggatgtggttatcactgaactattgggatttttaaaaactccactactatattttacaataaaaaaggaaattatcttttagaagaagaactttagtttgacagtccttcactgctaaagaaagttaatcagggtcgggcgccgtctcacgcctgtaatcctagcactttgggaggccgaggcgggcggatcacgaggtcgggagatcgagaccatcctggctaacacggtgaaactccatctatactaaaaatacaaaaaaaattagctgggcgtggtggcgggcgcctgtagtcccagctactcgggaggctgaggcaggagaatagcgtgaacccgggaggcagaacttgcagtgagccgattttgcgccactgcactccagcctgggtgacagagtgagactccatctcaagaaaaaaaaaaaaaaaaggaaagttaatcagtaactgcacattttaaggggattatctattttctatttctactccttactcagtagagtgctgcattcagtttaagtgtatacactcactcagtgcaatcaagtcttgttttacaaatattaatacaaaagctgcagagcattttagtcttgacctttattggaagcctccaaaggttatatttcgacccagccaaaatataacctatttatattataggttttatatatatatgatatataaatatattatattatatatatatattatattttatatataaatatatattatattttatatatatattatattttatatataaatatatattatagtttatataatatataaatatatattatagtttatataatatataaaatatattatagtttatataatatataaaatatattatagtttatataatatatacatatatattatagtttatataatatatacatatatattatagtttatataatatatacatatatattatagtttatataatatataaacatatattatagtttatataatatataaacatatattatagtttatataatatatacatatatattatagtttatataatatatacatatatattatagtttatataatatataaacatatattatagtttatataatatataaacatatattatagtttatataatatataaacatatattatagtttatataatatataaacatatattatagtttatataatatataaacatatattatagtttatataatatataaacatatattatagtttatataatatataaacatatattatagtttatataatatataaacatatattatagtttatataatatataaacatatattatagtttatataatatataaacatatattatagtttatataatatataaacttatagtttatataatatataaacttatagtttatataatatataaacatatagtttatataatatataaacatatattatattatagtttatataatatataaatatatattatattatagtttatatatatatgagatatataaatatataatacattgtcagtcatcctgttttatttaaaagatcaagttctggaaaagaaatgaagaattttttttcagtgtctgtcaaaggggacatgaagaaaattgttagtggaggttaatccatatctatataatttagctgtaatttctacgtcaaagttaaccttcagtcactaatttggatccttttgtgcttacatagtcacctttaggctaactataacaagattctaggagttcctgatgctttttttttttttttaactcttcggttccaatacctaaagttatacacatgtgttacacagcttgtctggttaaattaagtgggtatggaatgttaaaaataatggtagggaataaatgaattacttaagacttgtttattccatgcatagattagtgagaacaattcagaaggcatactttgtagcccctccagagcagaaacttctttatttgacgactagaatagaaatatctttctaacaggtcttaaggattaaagttgatttttatggcttttaaaatgtttggaaaatgctaaccatttaactttgtataacagtagtattttctatgtgtcttaagtagagtgtgcagtatttgtatagtcaaagataagttctgtgacagtagaaagatgaacaagtctcattaaagaaggaatagattagaaagcataaaaatgttgcagtttttctactgtgccttgtttttatattgaccatctgaaaattaaattatagttttactttaattgtccacttaaaactttgtagctttgcagtactgctgtttcttttctggaatgctgttctcccttgtccttccctaggtactttgtttttagatgttaagtttttatgattatgattattattattttttttttggagacagggtctcactttgtcatccaggctggagtgcagtggcacgaacacagctcacggcagtctcgacttccctggctcaggtgatccttccacctcagtctcccaagtagctgggactacaggtgtgcaccaccatgcccagctactttttgtattttttgtagagatggggtttcaccatgtgtcctgaactgaggtgatccttcctcctcagccccgcaaagtattgggattacaggtttgagacactacgcctggccacatattaggtcttaatgcgtctaagcatcacttccccgggaaagcctttcctgatgtccccgcccctgtttcagggtcacattacacaccccgactgccattttatatttgtttctataactgatggctggctcctttgaatgctgtcagcctcaagaagctgagactgtttgtgatcacttttgtatcttcaatgacaagtttaaaagagcaaaaatatattctagtgagataagtgactcgattattgaagtagaaaactattaatccccagctgtaagcttttgttcttttaatcatgtgttttagtgtatttgttaaaagtgtatacaggtacaacacaaaatttacatctgcagcttaggtattggcaattatattttttaaaacataatcaattttactaatgattacatgagaaattgcctgatgttttaaggtagttggaacaagcttcatatttctgagactttaaagagttgtctttaacctacaagttgtcagaattgtctttaatttccaaatgtattgggtttttctctttcttgttggtgatttctaacttgattgcattgtgatcagggagcctaattaaaatcaatactgtacctggaaatttgttgaggctaactttattcccagcatacagtcagcttttatgtttcacctgtgcacaaaaagagtatacatattattgatgtgtgtgtctattctgtatgctctatgtccactagacttactgtgctgtttatatgtatatccttactaattgtgttcctctatttgatctgttgtatctaactgatcctctgtctacttgatggtgatgctaaaatggtgaatttaaaaattttctctacatttacaattagtattattttctaggtgaattgaagtttttatcattatgaagtgaacctctttacctctggtaatgcattttttcttaaagactatatttctaatgttaatgtgatttcactagcttttggtaaatatttcccagatatataaaagccaatagctgaattttacctttttatccagtctgatcttggtgcctgcctgtacagcattgtgtttactgatatatttggatttctgtctaccatcttatagattgtaggagcccactcccaactttgtggaaggtttgtgttataagtctcttttttccagtggttatcataaggatgttaacattaaagtctgaaattacttaatatcattagccttttcctgaattacaaaaagacataaggttatttaactccagtcatctcccccaatatgatcaattattgcccagtattttagttatatctttttcaccacaaattgaacattatttttatacagttaaatgttttagatctaatcatattgtactgtgtctttgcttactgtttcttcttacatttcagtcttttcttgagataatttcccttccatctaaaatgaattggaatttccattgagaaggtatgttgttggtaaatctcttatatgtctcttaggtatgaaaattaccctggtcttgaaagagttctaggttgacagcattttctcctagtacaatgaaggtattcttcctttgttttctactggctttgacatttgctgctgggaagccagttagctaattattgttcctttgtccgtggtgtgactcctcactggctgtttttaactttctcagttttagtattttgcagtttgactgtagtgtgtccatgtgtggattttagttgcacagcttgggtttcctgggtatcttggatctgaggacaggtgctacgttagttctagaacagtgctgttcagtgtactctttgtgatgatgttctacatctgtgccgtccatatggtaactgcctgcctcttgtggctaacaagaacttgaaatgtggttagtgtgactgaggaactgtgtttaaattttaatttcagtagccacatgtggctaatggctactttataggtgagtgcagctctagaaaattctcagcggttattcatgaaaattgccttttctccattctttctttctggaactctagtaacatgaaaaggaccgatggaaatctaacttcccatctgtcaacctgtcatgttttctttgtgctacattctggatgatttcatttgttcttaccttctgttcactattctttcctcagtcaggccaaatctgctcttttattcatccatttaattttcagtttcggttatcttctatttttagaaattgtatttggttctatttcaaatctgcttatcattcattatagtttctggttctttgctcatatttttaagcttctcttaagcatgtcaaaacattaatagttttccgtcctaatctcagaagtctgattcagccatccgtttctgcacattctcactcatggtgctttgttttcttgtgtgttttgtgatttgatttgatttttccttgagttgcttgttttccttggaacttcctctgtgggaatcctattacctagattgaggttgtatccttccagggaggatttgtgtgtgctgataccagtctcctggggacattacatccttggagtcactatatctttaattcctggcttaatgttttctcagccatactgggtagaataaatatggacctggcatctcaggagaaattttcctcatccccactactctgtatcaatgatgagacatttccttgcacacaggttttcctctttacccttatgctgaggtccttttggagtcccagcttgtagcttaatacaggacactttgtgtgttgcctcccctgcccccacacagtccccagagcacagagccaggctcccaggtttgtggagtctcccagcgggaaatcctgcctcagcacatgtgttctcccagggtttctgctttcacttcctttgtggcctctccggagcctttccttttgtgctaactcagcagtgtgtttcaaaaggtgtttagtttgtatcttttgcttttaatattttattcagcacttcagttgtttcagtctggcagtggctcaggtattagcttgctctagttgctggaacaaaatccaagtcagagcatctttatagcagactgtcaagtgaagggagtggaatatgtgcatgaaagtgttaatctgatctttgcagagggaaaggtcaaaaagttgttaagcattttggttgaaaccaaaccttcagtcaagctgtcaaactgtgggcatttcaaaactttccaattgatatttctttgtcatttttcttttgactattaaaagcacatgatagactacttactaatttctaggcattgtaaatgcagtgtttaaggatgctattcagtctgactgaatttttctaagttatttgtagtatctgaaaatcgagtcatatggtattattacccacagggacagtactcagaagtcacagatttgtgattgttcattaagtcagacacttaactttagggataaattaaagagggggaaatgcagcttcattctgttgcctatcacccgttgtcatccacaactcattcatttgaacttcagatgtgccaggtcctctgggatgtcagtatgaaaggcctgtccttgtactcaaagggcacaatgtcttgaaggagggcaggctgtctgcaggggcacagtgcaggctcctggcacagttcctcaagcccagaggctttcaaaggacccaagtcttgaaatgtctgtgtattagtctgttctcatgctgctatgaagaaatacccgaggctaggtaatttataaagaaaagagatttaaatgactcacagttccaaagggctggagaggcctcaggaagcttacaaatccatggtggaaggggaagcaaacatgtccttcttcacatggcagcaggaagaagtgccgagcaaaagggggaaaacccttataaaaccatcagatcttgtgagaattcatgagaacagcatgggggtaactgcccccatgattcaattacccccaccaggtgcctcccacaacatgtggggattatgggaactacaattcaagatgagatctggggagacacagccaaaccatatcagtctgttacttagtactttgagtgagttttaaaccttactctatcacttcagttgcttcaaaaatacttccatagtacagctccacagtctgcaagtccagactttgccttgtcagatcccagatattcagttcagcagacatttcagtagctattttgtgccacttggatgctgggaataaagatttggatcctccctaggacagttgacattcagatattaatgaattggtgtatttaaaatgtgcgagtttaaatgtatttcctaatttaaattcacagaaaaaggcttgaaaatttagacgtatgtataaatagttgcctattgcatagtggctgcacataagaagtttttttatgttttagtttgttttatagtctcaagattttaagtaatgaatatttgctgcttttgtaacaaggaaaaaaaagatttttttttaattaaaaacttactgtctttaggcctctaaagcagattcccaaacttatataccttctgttaatttgtttcaaattgtactaggttggaaaaattttttaatgcttacacatagtaagggcacttcaatagaagaatgctaatgcattcaggattacaaatattattttgtaattttcttaagtatggtacttaaggaaattttcttcttccaggggaaaaaaagagtatgttttaaaagtagctttaaaacataactgaaaacttactgaacaactagcactgaatctgaaggtgttacaaattgctgtttcataaatacattggtaattttacctgccaccatgtgccttctccctcaggagcttagaagaggcagggtggttaattctttgtggttaggcagggtttccagcactgcacttctcctcccgccttcctaaaccatgactcagattttagagtcaagagttgaataatatgattttacagttgttttgttgatgcatcagatttactttgtcccgtgactatctaccagtattgccgaactgaactgggtccatttgcccatgtagtggaaagccaaacactgaagcaccaggtttttgtagtgagagaggcttattgccagacagctgagcaaggagacaggagttggacttaagtctgtctctccacgctgggggctacgtcaggttttgtacttagaggtaatgaggcgtgatctgattggatcttgcagtggggtgatgctggaggcataatctgactggatcctgccatggggtgacaccagggcttgatctgatcggattttggatcctgccatgtggtgtccactgtggtttttttttttttttttttttttttttttttttttgagtcagggtctctcttctgttgcccaggctgaagtgcagtggtgcaacctccactgactgcagctcaacctcctgggctccagcgatcctctcacctcaacatcctgagtaagctgacaccacaaagtgcgtgccagcacacctggctaatttaaaagaatttttttttttttttgtagagacggggtctcagtctgttcctcaggctggagtgcagtggcatgataataactcactgcagccttgaactcctgggcttaagtgattctcccacctcagcctcacaagtagcttggactacagctgtgtgccacccccccggccaattttttaaatttttttttctttagtagaattgaggtctcgccatgttccccaggttggtctcaaactcctaggctcaaacgatcctcctgtgtcagcctcccaaagaattgtgattacagcctcccaaactgttagtgtccacttcttaattcagtgctcattcctcatgcccattccattccaagtgcccatctgagcacgtgggttctatccatggctgcacacttagttttgggcatgctctggtgatgtgacgttcaacctggaggtccatgccaactgaaaagcagctcataactttgttacataaaagttgaaccagattagtctgatgcaattccaacagtatgtaaagcgtattcaatgtccttgcaacccctaaaagctccaaaaccctaggaaatcaatacccgttaggttactgagatctgtggttacaataggttgagctgtctgaatcatctaaagccaagatgataccaaaaagtatagacattttaaatttaattttatttttgagacagagtcttactttgtcacccaggctggagtgcagtggcatgatctcagctcactgcaacctccacctcctgggttcaagcagttctcctgcctcagcctcccaggcaactgggattacagatgtgtgccaccacgctcagctaatttctgtatttttagtggagatggggtttcaccatattggccagcccagtttcaaactcctgacaccaagtgatccacctgcctcggcccctcaaagtgctgggattacaggcgtgagtcaccatgcccagccaagatttttaaaatattctaatatttacttctattagagttcaattactatataatgaccaaaagcaaagttttcagcctttaaaaacccattccccttctttttttttttttttttttaaatagagtcttgctctgttgcccaggctggagtccagtggtgcaaacatggctcattgaagccttgaactcccacactgaagcaatcctcctgcctcatcctcttgagtatctgtgatatggttaggcttcgtgtccccacccaaatctcatcttgaattgtaatcgctgtaatctccaagtgtcacaggagggaccaggtggaggtaattgaatcacggggtcgatttcccccatgctgactgagctgatggttttataaggggttcttccaccttcactcagtacttctccttcctgccaccttgtgaagaaggtgccttgcttccccttcactttccatcgtggttcatgaggcctccctagccatgctgaactgtgagtcaattaaacctctttcctgtataaattacccagtcttgggcagttctttatagccgtgtgaaaacagactaatacagtctgggaccacaggcatacaccaccatgcctagccatttattttttattttggttgagaagggtctcactctgttgctcagggtggagtgccgtggcgtgatctgggctcacagcagcagcctcgacctcccaggcacaagcaatccttctgcctcagcctcccaagtagctgggactacaggcacatgccaccagagccagctaatatttaattttttgtttgtttgtttgtttgtttgtagagacagggtctctctatgtgcccaggctgatcttgaacttctgggctcaaacattcctcctgcctcagcctcccaaagtgctgggattatagccattaccctttttgataagtggaaacatcttgtgcacgttctggagttttcattatgaaagtgatagatagtgattctctaaaatgctacaagtattaaatttttttctcaaactcccctcttctctgattcattaggactctcttctatacagaaagatatggcaatggtaataagcttccatctgagagagaaattgaactcttgctaaagtgatgatatttcctaaggattaggaattaatggtagagctgtggtactctaactagctgtatcacagtcaccaacccggggagcttgttaaatcacacagagtttctgattcaggaggtctggggtggggctgagaacacacatttcttttctttctttttttttttttgatacagagtcttactctcgcccaggctggagtgcagtggcgcgatctcagctcactgcaaactccgcctcccaggttcacgccattttcctgcctcagcctcccaagtagctgggactacaggcacccactaccatgcctggctaatttttttgtatttttagtagagacggggtttcaccatgttagcccggatggtctcgatctcctgacctcgtgatccgcccaccttgtcctcccaaagtgctgggattacaggcgtgagccaccgcgcccggccgagaacacacatttctaccagttcccaggtgatgctgatgctgctggtctagggacctaacttccagaaccactattgtgagggatggaaaaataaaagaaagaacttgggttctgtccttggttggtccctaagatctgtgaggccgtaaattgggtggctgcactagcatgccgtgtgcagtgaacacttgtgtcttgcttaaaggattattttatctaactgggttcatatgatgcagaaaatcacagatccgtaaaatattctcagaagctatttagtttctcgccaacttgtagtgttgtcagtaacttttcagttcttttgattgatcgttggtattatatgcaaaatgtctcaacactgttacaatctcacattaccatggaggctggttactactcttcctattgccttttaagttagccagaaaacatgcgatacagttttgtgtgttattaaaacagtaatcagtccagatttatttgcattgtataatatgttcctaccgtgattatataatgaaaataacttttaattcactaggagagaagaatcctgttcttaaattacttataagtcagataatacatgcctttgtgtaaatccagtttttaatgttatttgtgtggtaagtacccatacctaattttgatgaatttgaatttcagcggcttcatttttcctgtttgcccacttagaagctttaaggaagtaaagaaacaaatgtttgtcaaagctagaaaaaagaatgtagtccccaaactaggtaaatctacctctgaataatcaaatccacccatgtattattataggacccatatgcatgaaggcatgggcatgctgtctgtgttcatatgacctgtctctgcagtcagtaagaagtaacgggtgtctaaataagagaagggcagcagatcgtgaagccgtcgttggcatttaaacaaggtggcaactgaactgcactgttcagtttcttgtgggttccgtgaacagcatatgctgtaccattaattatggaaggaatacatgtaattgttggctgtggttaacattagaatattattatgcatgaacatcaagggatattgacagaaatattcagtatgctacattgcttccaaaaatcaaattttgtttgtttttttgagacagaacctcaccctgttgcccaggctggagtacagtagcagctcactgcagccccaatttcccgggctcgaacaatctttccacctcagcctcccaagtagctgggactacaggcatgcatcaccatgcctggctaatttttgtattttttatagagatggtgttttgccatgttgcccaggctggtcttgaactcctgggctcaagcagtctgcccacctcagcctcccaaagtgctagggttacaggcatgaaccactgtgctcgaccaataattttttttttttttattcaacagtctctctctagaatttatactgtaagtgaaaatgcatgtatatttttctatccagagaatttacagtctaatggagaacacagacacttagatatcttccattaggtgtacggttgctgtggtaaaagtatgtatacatagtgtacagtgagatagctcagtatttggagtcagaaatgagaccctctgacctgtttccctccatttagccattggaaacttaagagtaaaaataaatgtatatcaataaagagccatagtgtgaaaattttatgtagaagtgctaaatattctgacattatgttactcatgatgtagaagaggatcatttctctagtttagggaatggtgttaaatacttgaaggcatgtttagtttgaggtctcatttaaagagctcctattttagtgactgaccttgcaggacagaaagtacattttagagaagtgtaaatgtccactttccctggttgtactctaaaattttatctggcactggttaaactaagccactcttaggaaccagtgaacattcgaggcaagtagtctgtgcccaggcttgttctaaatcctttgtggccgaggacatagcgtcttggaatggttaaaatggatctgctccttttgatttccaggtaagctgttgtttgatgtgttttgtttacctggtttgcaatacccagagcttattctagagaagggattcccagctggtgaattgtcaggggatctttaactctttaaaatgtatatagattcggttaataaaatacaggtttacttaaaaacgctggacttcatagtacctttttggtgttaggtatcaatgaattgtccttgtgtataattactgttatatgtgtgtggggatgtatatatgtaatgaattaatgttgaggtcattggcattcctctgtgattcattatagctgttacataaaagcctatttcccctattagtgttttgtttctcttgaattttatatttagaataaaagagaaattatgtcttttattagagatgcaatgaatgaataaaattagttctacctgattatgaagcatatgtattttcatgtaatggtgatatagcatagagattaggagcctgggttcaaatcccagtccagttattaatacattactttgaaaagttacttactgcttcactttccttatctgtaaaatacaaataattgaatggattcaggtgtgaattccattgcacagtccaagtgggggaaaaattataattttgcttttctgtaataatttacaacaaattacatccccgtcctgctggggaagcagacctataatattttagttcccaggccaccgcctcttgcccagggtgaagcataatttgagggtggggatggtaacctagtgccatggccttgaaggtgtgaccccatcttgccctccagtctcctctttaggcctttcctcctgcccctcagtttagtaactctctccaccacttccttgctgtgctgcttgaggacatggtaaccaccttgctggttgtgcgcagtattggggcgtgaatctctgcaaagctcagacctttctgtcttaatgtgatacatagctgtttggattctcctatcctctccggttgtttcatggtttcactagggttctgaaagcaggtgaaaaaaaacaagaaagcctcactgggaaggtgacactcaggtagagatctgagggaaggtgggggtgtctttggatctcgggaaagagcagaccctcaggctggtgcttggggtgtctttggatctcgggaaagagcagaccctcaggctggtgcttggggtgtctttggatctcgggaaagagcagaccctcaggctggtgcttggggtgtctttggatctcgggaaagagcagaccctcaggctggtgcttgcacagtgaggccagagctgagggagctcagggaagaggggctgctccccaggctgaggaggcccaggcgaccacgggggctttgacatttatttggcaataaaaccattggagggttttcaccacacccaaaatgactgacttttacaaaaaatactttctttctttcttttctttcttttctttcctttctttcctttccttccttccttccttctcccttctctctctctctctctttctttctctttctttcttctttcttttttaaagagttgagcttgcctttattacccaaagctaactgcaggagttaacagtcagtttgctttgatactggatttaagccttattttatcccttcttaaaacttaattgattgtatcttattaaagccacactaggaaaatcctgtgctccatttaagtcaatcagtaagagagcttcagaaggattgacacagtatccttctctatatgaggaataccccagtcaaatcagctgggagaaaaaactttgtaaagaaatttttaaaaacctctattattttgcattcgagattttgtctgatagaaaatttcagattatgtttcctggatatactgaaagtgaatacaaacggctcatcagaccatttggctgttaccgttatgctgttcactcgactggtggccacatagacataagcaaagtacttgcagactgctggatttctgactgatgaaaccatttctgatcagcgactcactgcatttctcttccgatgagggtcactgtttgcagggtgtctggtataaacttcctgaagccccagcagtcttgagagcagcagtagaagaaagcagctggaaccctgagaactggggcagaatgctgttatgggctaagaagaaatggcatcatcttggcttagaatttggagattcaatgaatctttattctttcatggttccattaagtgattatttttaatatgaattagatcactggaatttcatattagtcatgctgaaaaattccacatctgtgtgttttaatttagggtcttcaagatgaagggcatcccccaatgattaggagaggcacaagatagaaatacagattttattacctacaggccctgggagtacacagcaatcctggaggtcacacacaggatggtcagggagcttgaaggtcaggaattgtgaagggagagagagagattgagacctacctagagacccatgggccttcatggggtccaaacaggtttcccccagggaggtttaattggttccaggaggtcacactgtgactgcacagcccatgtggggtgtggggatcggggccagtgaagtaggctgtgtgtagctttcccatggggaggtggttgccaggaggaagttgtctaaggcaggtatctgtattagtcatgttgaggaactgggaggaggtgtagaactgcaccctctgccatgtccagggtgacagagccctgcttctgctacgacaaggtcccacttatcttcaaagtgcatgctgaggcaacataaaatgataagaatttactacactgtgacttttaaactatcatctcaatggtttggcatgattcaatattttctattttaactttttatttataaaaattttaaacatggacaaaagtagaacagcacagtgacactcccctgtgtactcatcacccacctccacagtgatcctggcccgttttgtttcctctagcctcccctcccctattttcccctttcctcattattttgaagcaaattccagacatcgtttcatgataagtattttaatatatatctccaaaactgtagacttaaataactgtaattcctgttatacttaaaaattcagaatacattcttaatatcttcaaatatccagtctgttggtaggcagtgtaaacatattcataaattaagtttgctgtatctattaagttgcttgatagtattaaggtgagaacagtgccatctcttactggttgacatttgtatgagtctgcccatgttaatgtaaaacagatttgccacaggtaatgtgaccatacaggtaacataatctaacagttaaaaaatatatgcatgtcttgcttttatcttgttgactccagtgctcttatcaaaatcctcatgatgcaactgcccaatgggttcaccatcaccactgcctagacagaatcgatttatcaagacagggggattgcaatggagtaagagtaattcacgtagagctggctgtgcgggagacctgagtttgttagtcagtctccccgagcatttggggattggagtttttaaagataatttggtgtttttaaagataatttggtgggtaggggcttgggaagtggggagtgctgattggtcaggttgcagatggaatcttaaggggttgaagttaggttttcttaatgtcttctgttcctgggttggatggcagaactggttgggccaggttactggtctgagtccatcaagtgcagggtctgcaaatatcttaatcactgatcttaggttttacaatagtgatgttatccccaggagcaatttggggaggttcagactcttggagccagaggctacatgaccccgaaattgtaatttcttgtagttattttgttagtcctgcaaaggcagactggaccccagacaagaagggggtcttttcaggaaagggctgttaccaattttgtttcagagtcaaaccatggatcaaattctttcccaaagttagttctggcctgtgctcaggaatgaacaaggacagcttaaaggttacaagcaagatagagttggttaggtctgatttctttcagtgtcataatttcctcaattataattttgcaaaggtggtttcaaggagatgaagccttctaagcctttctgtacagcttaggtggtgccagcaatgggaggatgcttaggacaagggttgaagaattgacgaaaatgaaaattgaaaaagaaatatagctgacccttgaacaatgtgggggttaggagcaccgaccgcctgcccagttgaaaattaaagtataactttcgactcccccaaaacttaactactaatagcctgctgttgactggaagccttataacgcaaacagttaacacatattttgtatgttatatgtattacatacggtattcttacagtaaattaagctaaagaaaatgttattgagaaaatcataaggaagagaaaatatatttactactaagtggaagtagagcattaggccttcatcctcattgtcttcacattgagtaggtggaggaaaaggagggtggagtggcagaaatagaagaaacggtgcatgtaaagtggaccagacctgtgttgttcaaaggttaactgtactgattatcttattttaacttaaaatgtataatgtgcatttactcaccaatcctttgatagacagacagctatggtctttgtgtacttctgattgcagtgctaagtgatccattttgcataatccatactcaattcattgcaattctaattttttgtttcttttagaagagcttaaatagtttgaagacaatttcaaagcatcgtgagtacagaattctagattttaaaaaattatttcccatttgtcttttttttttttttttttttgagatggagtctcactctaccacccaggccagagtgcagtggcatgatcttggctcactgtaacctccaccacccaggttcaagcaattttcctgccttagcctcctgcatagctgggattacaggcccatacctcctcacctgcctaatttttgtatttttagtagagacagggtttcaccactttggcctggctggtctcgaactcctggccccaagctgtctgcccacctcagcctcccagaatgctgggattgtaaccgcccaatgggttcactttgcctgccaatttcttagagccgatttctcaggacaagcggaattgcaatagagaaagagtaattcatgcagtgcaggagaccggagttttattattactcaaatcagtctacccatagagtttttaaggacaatttggtgggtgggggaagccagtgagccaggagtgctgattggtcaggggtgaaatcacagggagtcaaagctgtcttgcactgagtcagttcctgggtgggggccacaagatcagatgcccagtttattgatcggggtggtgccagctgatccatcaagtgcagagtctgcaaagtatctcaagcactgatcttaggagcagtttagagaggatcagaatcttgtagcctccagctacatgactcctaaatcataatttttaatcttgtggctaatccttgttttttttttttgtttttttttttgagacagagtctcactctgttgcccaggctggagtgcagtggtgcaatctcggctcactgcagcctgcacctcccaaggtcaaggggttctcctgcctcagcctcctgagtagctgggactataggcacccgccaccacgcccggctaattttttgtgtttttagtagagacagcatttcaccgtgttggtcaggctggtcttgaactcctgacctcaaatgatttacccaccttggtctcccaaagtgctgggattacaggcatgagccactgcgcctggccgtcgtccttgttttaaacatctttgtttcaaactataaattcccaaagttcgttcagcctgcgtccaggagtgaacaaggacagcttggaagttagaagcaagatggagtcaattaagttagatctccttcattgtctcagtcataattttgcaaaggcaatttcaggattacaggcttcagccaccgcacctggccctttcccatttgtcttttttttttttttttttttaagacggagttccgctcttgtcgcccaggctggagtgcaatggtatgacctcagctcactgcaacctccacctcctgggtagaagcgattctcctgcctcagctttccgaatagctgggcttacaggcacccgctaccatgcccagctaattttttttgtattttagtagagacggcgtttcaccatgttggccatgctgttctcaaactcctgacctcaggtggtctgcctgccttggcctcccaaagtgctgggattacaggtgcgagccaccgtgcccggccccatttgtcttaactgttgtctcacttacacttattttgacagtaaactttttagccatctacttacatttcttggaaacaattactcttttttgaactcatgtttcattagctatgtaataattcagttgcatagctatagtaacttactgtaatcacaactggttcatggtaagtatatgattcagatggtggggtcagaatttcctgtgtatactagagagtatcctgcaaaatgcaggagttcaacatgccacatattttatacaaagcatagacggcattggtgaatctggtaaattgattgtgtagcatacaggctgtgtgatactctcccattagtcatagttttgagatttatggctggttcctgtggttgcttaggttggagtatggttcttgtgaactgaatattggactttgaaaagaattgatagtagatgctgaatttggtattgttttgttctttactcttataacttgattgactcccttaataaatcagtatcctagtgccatatcataatttacaaaatgatcagaggtgcttttgtaacactttcagtgttattgatttgcaagaaggatcagctggaaggcacaaaggatcctggcaaaattctggtgagaggcgcccgtcctgctgtgcaggtgtctcttacggccctcctgatgagattgtcttcggcttctctgccttcgcatctgatgcatccctcacttggtcaccttttcccctctgtcagctgctgttaggcaaaatctcttcctttgtccaagtatgattcattcttccatttttatgtaataaactttaagttagctcttcaaattttattttatttttccaacttaactctctttggcagtcttattttaccatatccttaagcctacatttgtgctgcattaaaagccagctgtagttctgtggtgaggtttatgttagctctgtgaatctagaaaagaaattgccctgaagaggaactgctgataaaaataaatcgtagttaagaatactggcctcaggccaagtatggcttaaagcagagacccatattcctcatgtaacctagttgtatatgtatttatgtcgatgaccttaaggggaagtatcattttgagtagcttaaagatcagtatgtttcactttagtaatgttctttacatactttgatataaagtatttaaattctttaaaaaggcccagagacttgcagatcatctaggctgaccctgtcatttttcatgtgtgaaagctgagagctgggaaataagtattcagtgtctttcaccttacacaataattcatggttatgatggtgaccttgagtcataagaaaaggttcttcttggcggagtgtggtggctcacacctgtaatcccagcactttgggaggccaaggcaggcggatcacttgaggccaggagtttgagaccagcctagccaacgtggcgaaacctcatctcaactaaaaatacaaaaatttgctgggcatggtgacgtgtgcctgcagtcccagctacttgggaggctgagggatgagaatcacttgaacctgggaagtggagaagtgagcccaggtagcactactacacaccagcctgggcaacagagcaaggctccatctcaaaaaaaagattattcttaattatactttcagagtaagctttttatgaaactaggagagtctgcaggtttttgtttttgagacagggtctggctctgtctcccaagctagaatgcagtagcatgataccagctcactgcagcttccacctcttgggctcaggtgatcctcctacctcagcctccaagttagctgagaccacaggtgtgcaccacactgcttggctaatttttgtatttttggtagagatggggttttgccatgttgcccagactggtcttgaactcctgagctcaagcgatctgcccacctccacctcccaaaatgctagaatcacagttgtgagccactgcgcccagccttgtagtacttattttaaaaagaccaagaaaaatgatgaggctaaagttttcctgatggtgtagatctttggaaaagctgaataacccaaatgctatatattctataggagttttctttctgaaaaatatatatttttaaatttcatccatttcgattgttgagtttttgggactaaagtggcaagcaggaatgtggggaggccttgctgggaaggagccaggctatgtatatctgtgctgatggattaataatttccacgtgggcccaggaaggagggaggaagcttcatcataggttacacgtcgtctattctggttttagtagtgctaaaatcctgtaacatatttttcagtatattttacttgtcggttgtgtaaatactccttttcatctctgaatgctaatttatttgcacaaaaacagcagcagggaagccctgttgaaaataaggtattaatttttataactctcttggtaaatgtacctttgcattatttggcctctggcattgttttgacctggctttacacagtcctttatctgggcctcctgccacctccccaccccacattctccctagcccctgttcctcactggcaagacccctcctcacctgcctgctgtaaagcccttactctgtcgcatcacctgattaacttctgtaattgcactcaccaccacctggaattgctttgcgtgttgatggctgtgtctcctcctaaaacaatgcttctgagagaaggagaacatcttgttcctggcttttcaccactatgtccccctagaacagcattcatggtactaactgcctattcaatatgtgttgataaaatataaacataccggctacctagcttcaatctggtagctagtcattggctttacccacccagagaatgcagaattttagaattggctctgatggctttaagcagaaaaaactgggcaggctattaggggaaaattcttcccccaaaccgtggtagagatttagaaaaagtgtaattaagacatgaaaaggataagcgttggcattttgcaaaataaagtttaatttgtaaatttaaaagtttaatgattgcctgttaaagtattggcttttggttcttttagctggggcagtaaacctagatgaagtgaagttttttatttaaaagaaactgtactttctgtactttgaaaactgaactagtaagattgaatttatttggaaatggcagtgaaacttgaactctgtaagcacctcttaggtggcagatgccgtgctacctggtaaatggctgtgtcaggtactgtgctgagcaggactgacagggagcttacagtttagagaatgcagacatgtccacaagcaacgatagtacagcagccgtaaaatgataggggaagggtagtgttataaggccgtccatgggagggatagatacgtaaccgattttgcacgtcataaaatgcttcccactggtgacatctaagctgagacctgaaaggtgagtaggatttggtcaggtgaagaaagagggaaggttgtgacatgtttatggaattgaaaatagttcaggccgggtgtggtagctcatgcctgtaatcccagtactttgagagaccgcagcagtaggatcacttgagcccagaagtttgaggctgcagtaagctgtgatgcaccactgcacttcagcctgggtgacagtgagaccttgtctcaagaaaagaaaagaaaatagttcaataagtctggaatttatcattgaaggtaagaattgtaagtgataaggccacggaggtgttcagggtcaggtgatcatataattttttagtccaaactggaatactttcaagaaaaaagagggtacagttaattacactgagataacaggcataaactggggctggcctggatagatgaggatacatggtcagcctctttataagccatgcttattaacattggggtttatttagtgaacagatagatgttgagcacctactgtgttccaggcattgtgcttgggctttcttgtaagagctgtgggaagcactggaaggtttgagtcaagagcggcaatgcttagtgtgcatgttcaaaaggtccttggcgctgcaggcggaagatgaattggagcaaggcgcagcaggtgtgcagaggctggaggaggcttttgaagtgaatgaaaataattaaagatgacttggactgtggaactcacacatgggatggagagaagtgagtagattgtagcagtatttagaaagtagatttgccaggcctttcttagaggtggaaaggaatgagaggaggagtcaagagtacctttcagtttctttttgggtgagtggataggagaagttccatctagaaggctggggaatgctggagagaaggcagggtctgtgctggaatgctgatgaggccttgcttggtgtgttgtgtgctcttggaactgcatgcaggaatctgataggtgacagattttcaagtctgaacctcaggaggaaagatctaagaaatggacttgggattcatcagtataaagatggcaggtgacgttgtcagagtggatgttacccagggagaatgtctagagtaagaagagtgtaggaccctggaaaacacagacatttacagtgtggcctggctaatgcctgggcaaggagagaaggtggaaaggaaggaagaaaaccagaggagggcaggtgtggaggggcgaggggaggagagtgtttcaagaaggaagagtggacagcaatgtcagacgcagtcaggcagtcaggtgggttgagggcctagcatggtgattggatttagcagtaagaaagctgccggtatccttggccagagctgtttcagtggtgtcagtgtgggcaaggcttgactagtgcagggtgaagagtgagtagcagatgaagtagacccggggcatgtggaaaacttctctgaaatttgaatttcttgatgttaagagaaggtattattcaaaggaatatgtggggttgagggatggtttcttcttcctttttaaggatgtgacagacaggtgggttaaacactaatgggaaggagagcgtggcgaagttgtaatcagtgcgtggatgggaggagtaaccaacagtcccagtgcaactgggtgggctcacatgcacattatctttcgagtttgctgggggagtctcttcccttggcttctcttttttttccactttctgaagttggggtaaaggtcatgggcctgttatgtaacccccaagagctcccttaaacaaaaatttgatagtggtgtttcattgtcaagctccatacatctgataatgcttggtgactgtatttaaaatattttatttttcctgaaggctcctggcaggtcacttttaagagcatatatcttctttgccttttcagctcatggcactgctggctgccaggggctgggcctgtgctggggtgcaccagctgtcagctgaataaggctaacgccatagaaggaaggagcatgcagttaggataccattctggtttattccacaattgtacatttttacttatttctatggtcttttgaaaatagtgataaggctgggcgtggtggctcatgcctgtaatcccagcactttgggagactgaagtgagtgaatcacttgaggccaggagttcaagaccaacctggcccacatggtgaaaccctatttctactaaaaatacaaaaaaattagtggggcatggtggcacatgcctgtaatcccagctgctcagaaggctgaggcaggagaattgcctgaacctgggaggtggaggctacagtgagccgagatcaagcctctgcactccagcttgggtgacagagcaagatggtctcaaaaaaaaaaaaaaccctaaaataaataaatataaataaacctctacaaagtatacaaaatcttagttaaaaaagaataaaaatagtggtaaaaatacataacataaaatttaccattttaagtatatgattcagtgacattagatacattcacaatgatgtgtaaccattgccactatttctagaacttttttcaccatcccaaatagaaactctgtattgcattaaacaataactccccatttcccactccctgtagcccctggtaacccccattctactttctggcttcatttgcctattctaggtatctcacatagtggaatcatatattcgttgtttttttctttttgaaacggagcctcactctgtcacccaggctggagtgcagtggtgccatcttggctcactgcaccctccacctccagggttcaagcgattttcctgcctcagcctcccgagtagctgggattacaggcgttcgctaccacacccagctaattttttgtatttttagtagagacgggttcaccatgttggccaagctggtcttgaacttctgacctcaagtgagtgacctgcctctgcctcccaaagtgctgggattacaggtctgagccaccgtgcccggcctgtttgtccttttgtgtctggcttatttcaattagcgtaatgttttcaaggttcgtctgtaatgtagcatgtatccgaacttcatttctttttatggctgaataatattcctttgtattttgtttattcatccgttgatggacatttgagttgctgccaccttttggctattgtgaatggtgttgctgtgaactttggcttacaagtatctgagtccctgctttcagttcttttgagtggaatttgctggatcatatggtaattccgtgtttaacttttggaggaactgccaaactgttttctaccgtggctgtaccattttatattcccaccaaccattgatttagtttgacttctgttgtttaaagaagtatatctgaattttacacatactccaaaactgtaattatttgaattaattggagtagaaattaatttgaaataatgaaatgtctgattactggacatcaaaagctgctttgcattaggccatggttctcagaattcacaatcctcctttccattttttcctccctccctcccttcctcctctcgctaccatggtcactctcagcttcacaataagcacgtgtatcttagggcatttgaacttcaaatactacagcacctcacacgtaagaactctgtaacagtagacctctatttccctttcctgtcctatgtgctacttttttgttttgtttttttgagacagggtcttgctttgttgcccaggcaggagggcagtggcgtaatcacagctcactgcagcctcaacctcctgtttaagcgatcctcccacttctacctgccaagtagctaggactacagatgcagaccaccatgcccggctaatttttgtatttgtagagacagggtctctccacggtgccctggctggtcttaaattcctgagtttgtgcgatctgtccacctcggcctccaaaatgctggggttacaggcatgagccactgtgcctggcctttgtatttttgtcatacattttatttcccagtattatagactccagaatatgttgttgttattgttttaaaagtcagttatcttcttagttttctttcagaaaaattaaatggtgagtttttttgtttgtttgtttgtttgttttgcatggcccatgtatttaccattcctggtgctcttccttcttttgtgtggattcagttttccatctagtatcattttcgttctggtaaaagcatgtttgacatttcctgtagtattgctttgctggtgacacattcttcctcagcttttgtctgaaatgcctttatttcaccatcatttttgaaggatgtttttgctgggtatagaattctaggttggtagtttttgttatttttcagcatttttaaggtgacatttggcttgtacatgttgttcttgagaattctgcagttattctttgttccactgtatgtaataatatatgtttttctcctttctctgattttaaggtttttctctttgttgctgatattctgaaacttgactatgatgtgtctttgtgtggttttctttgtggtttttttcctgtggaatttattcaacttctgggatctgtaggttatagttttcacaaattggaaatttttgacattacttcttcagacactttttctgtcttcccctccatcattctgggatttgaattacatgtatacagtaactgttgttgtttcataggtgactaactgggtaggggaatgtctggttcccttactatccggtgaagtagcagaaccaccttttgtaggaatcagttatcaggccctttactttcccttgaactctaggctagttccagaacctttggtggactggaaagaggaaatagttatgccacaatttttagtacatgcaaatgtacatgtaatgtttaaaaaaaaaaaacaacaaaggtggtgatagcctgcatttactgggccatatgtgccggtccctattctatgggctttatttttattacttcatttctcctttgtgtcacaaggcacaggcagtttgagaccaagactttaaggaattggtccaagttttcaagactggtgaaacagtggtgtgaggatttgaacctatgtgcctggcttcaaagccagcttatcattggtatgttgccagtaattccatttcctccccctttggggaagaagtgagaccttgtaaatacacacactggtgagggtgtgggagatgggtactctcaactgggagtaagtttctgccagttgtctctggggtttggtatttgctactgtttgattttaaactttactatatttgtattcctgtctccccacccccagtgagcatgcagttttacaattgggaaaagcaataaagctattttaatttgggggctggtggtgaagttattttcttagccacagcaaagtaagttttaatgtgccttgccctaggcgttaaatagtgggttagtaaccttgcagctgtgataaagaacaaagtagctatgctgatgtgaagagtcctaagagaaaatatgaataaataaaagtcctaaataaatgaaatgtagaagagcacataagaaatgttaagagtatgtaagcatatactgtgattctaattgcttctgtgcatgtgtgtgctttgactagttgtgtacatgcaaacacgtatggcaaatttataacattttgagggatattttaaaaatcagcactaatgccctttggcacttttagaaactgttcctttttaacttcattgtgttgcttttgttgttgtattaataaaagtgtaggtatgtatttatatacactgaaattattggttctcagaatgaaaagtctaggaatatggtttacccccttttatgtggcctttaatgcagattctgtttgccatctaatctgctttttagttacactttggagtgttttgtgctttgttataatcagggaagcattctttcataaattttgatgtttgcaacatgactctgagcatcctaggtagagacaatccaagacagtgctttaaatttttaatttttttgacgggataataggttcatgttaaaaaaaaaaaaaaaaccccacaacactacaaaagggcaaaaaaaccccactgaaaattcctttcctatctctcctctcctttagccatcttctttcctcaggggcagtgttacccatttcttttacattgttaccgagatttcctgtgcatacacaagcaaatgcatgtactgcatcgctgggccctctttcttacacaagtggtgtgcctgatttgttttctcacttaatacatatatattagagatcattccacaccagaaaagtaagcaaatcttgttcttttggctgcggtatagtactccgtttcgcagagatcccatacttgatgaactagtcctgccttttaggttgtgtttggtcttttgctattctgggtggcattgcagtaaatatgaataaccatgtatatatgtcagtttgcaaaagtctatttctagaggataagttcctagactttctcgttaagatacatgtgtgtttgtaatcctgataggcattaccaaattgcctcttctgttagcgcgatgtaaggatacctgtttccctaaaccttatgcccttaccagcatggtgttagcagagttttgctttcgttttttggtagactgataggtgaaaaataaactgtttcattttatattcttttctgagtacagttttacattttaaaaaccattcttttcttactgactcgtactctttatatagagtagcaggagcaatctttagtctgtgttatgaattgcagacattttccccagattgtcattgatttttgttgttgttgttttgagatggagtttcgctcttgttgcccaggctggagtggagtgcagtggcacagtctcggctcactgcaacctccacctcctgagttcaagtgattctcctgcctcagcctcccaagtagttgggattacaggcagccaccaccacgccaagctaatatttttttg

SEQ ID NO: 920 - DNA, 32744 bp, Homo sapiens
  source 1..32744: mol_type = other DNA
ggccttgctattttggaagctacaagaaaaaaatagaggaaggaaggtttggtctttttagtggacatggctcagatatctagcaacagcggatttaaagaatgtccatcttcacatccggaaccaacaagagcaaaagatgtggacaaagaagaagcattacagatggaagcagaggctttagcaaaactgcaaaaggatagacaagtgactgacaatcagagaggctttgagttgtcaagcagcaccagaaaaaaagcacaggtttataacaagcaggattatgatctcatggtgtttcctgaatcagattcccaaaaaagagcattagatattgatgtagaaaagctcacccaagctgaacttgagaaactattgctggatgacagtttcgagactaaaaaaacacctgtattaccagttactcctattctgagcccttccttttcagcacagctctattttagacctactattcagagaggacagtggccacctggattacctgggccttccacttatgctttaccttctatttatccttctacttacagtaaacaggctgcattccaaaatggcttcaatccaagaatgcccacttttccatctacagaacctatatatttaagtcttccgggacaatctccatatttctcatatcctttgacacctgccacaccctttcatccacaaggaagcttacctatctatcgtccagtagtcagtactgacatggcaaaactatttgacaaaatagctagtacatcagaatttttaaaaaatgggaaagcaaggactgatttggagataacagattcaaaagtcagcaatctacaggtatctccaaagtctgaggatatcagtaaatttgactggttagacttggatcctctaagtaagcctaaggtggataatgtggaggtattagaccatgaggaagagaaaaatgtttcaagtttgctagcaaaggatccttgggatgctgttcttcttgaagagagatcgacagcaaattgtcatcttgaaagaaaggtgaatggaaaatccctttctgtggcaactgttacaagaagccagtctttaaatattcgaacaactcagcttgcaaaagcccagggccatatatctcaggtatagtcttttcttactaacttctcaaacttagtataacacagagttcatatttgtgtacataatttgtgtttttttgtttttgtttttgtttttaagaaggagtctcgctctgtcgcccaggctggagtgcagtggcgtgatttcggctcactgcaagctccgcctcccaggttcacacccttctcctgcctcagcctcccgagtggctgggactacaggcacccgccaccacacccggctaattttgtgtatttttaatagagacggggtttcactgtgttagcaagaatggtctcgatctcctgacctcgtgatccacccgtctcagcctcccaaagtgctgagattacaggcgtgagccactgcgcccagcccataatttgttaagaaaaaaaaatatttttcactttgaattttgtttttctttgctctcaagtgtgctttgattctttgcttgtgtggcaaaggatgaaatgtgattaggccaattgaaaaattgcttgctattaatatttttctaggattgtaaataaaaagcctctaatgaaggaactggctgtcactgagaggcatttaagatattttaaatttgtctgtccatgtctcctcattacatatgctcccttctttctcttccttattcctgtttttttttaaatgcaaataagaaattttggtttttagccccattatagaaattctcacgcattttgttttgttgtttttaaccatgaatcaatgaataaataaccccagagagaagagcaatttaaaggactctccctttaaacacttttgtcgataaaagtgaagaatgaaatattaccattgcagatttgtgttttgcttttatatctgtgtatcctgggaatgtttaagcctcattctcactttaacgtgaattaatattcagctaattagatcagcacttacctactattttatcattgggagttaactagcatttagatggggaagggagggatggattttgcatgatttggatcggtttatgttgaattgttgactttatttattactattattattttgagatgaagttttgctcttgttgcccagggtggagtgcagtggtgcagtcttggctcactgcaacctccacctcccaggttcaagcgattctcctgcctcagcttcctaagtagctgggattacaggcatgtgccactacactggctggttttgtatttttagtagaaaccgggtttctccatgttagtcaggctggtctcgaactcccgacctcaggtgatcagcccaccttggcctcccagtatgctgggattacaggcgtgagccaccatgcccggccaaattgttgacttaaaaaaaaaacattttggatgtctggaaggaagagaaatcggtgttaagaaggtttagacagcatgatggctcatgtttataatcccagcactttggaagactacggtgggagaatcacttgagcccaggagtttgagaccagcctgggcaacataatgagaacctgtctctaacacaattacaaaaaaattagctgggcgtgatggcatactcctgtggtcccagctacttgggaggctgaggtgggaggatcgtgtgagaccaggaggttgagactgctgtgacccatgattgtaccactgtactccagcctgggcgacagagcaagactctatctcaaaaaaaaaggggcagttggggggaaggcactggtccccctaattttcccatcctgcagggcccaggtcactgctggattcatattcgggtcaatttctaataggcagatgactccccagctgtgggtctctattttataggtttctcatgagagaaatgaattctgtgtttagtgcctggagtcaggatttgagatgtagtctggatttaagatgtcagctgtttatagttgtttgggaagggcaactgccttgaacctggagacagacattggggctctgataagttagtcttgctatcaaagaaaaggaagccccttgtcttgtagggagctgcgcttaggctcaagccttgcactggtagaaggcagagccccacaatgaatgcattgtagctacaatagattgtcttgaagttaatacagatgtttataaattaccttgattaatttaattatatcttaaattctgaacttcccattattgaaaagtcatttacctactgagagaaatagattatcccagctaagctgatattaccattccagatgcaatgtagtcatcatcttaagcaagttgaggtttctgggtaggtgggttatttactgtccaaagctccaagactgggattcggaacccaagaacttacatgctttttatctatgttgtacatactcaaaccgaactctttatttattattatttttaccaatatgttgccaaagccaaaggactcttctgcattttttttttaatcactgagacagaaagctcacaagaatcctatgaggccagagtatgacccatccctattttacagttgaggaaactgagatgtaaagaagttaaaaggaattactgttaatattttggtgtaataatggtattgcaattaattaaatgaatcttatatttagagatgtatactgtagaatttaaaatgtagtaaaatcaagtgaggtattggggtttggagggcttatagatgaaacaagattggctatatgttgataattgttgaagccgatgatggatacctgggtgtttattctattatttactttgtgtatatttgaaaattttcatgataacaagttggaggtcaaggagagggctgcagaactctttgcaagcagcaaagttctgacattcaaacccatctgactctaaaagccctcccttttttttttttttttttttttttttcacttttttgagacagtttctctcttgttgcccaggctggagtgcaattgcgtgatctcagctcaccgcaacctctgcctgctgggttcaagcgattctattgcctcagcctcccgagtagctgggattacagtcatgcaccaccacgaccggctaattttgtatttttagtagagacgcggtttctccatgttggtcagattggtctcaaactcccgacctcaggtgatctgcctgcctcagccttccaacgtgctgggattacaggcgtgagccaccaaggtctgccagccctccctttttcaaactccagtgatacaacatgctattttggaaggagtaagttccctgtcataggagatattcaaatatggttcaaatggcttcccaaatttagttatatgtcacagtatcctagagagtttaggcctactcagtcctgatttggaggaaggggtgtcaaaggacagtatggaatttcagggggaagataaccagttttttcaaaactttcccccttggacctccatttgggacctcttgactaggttattttaaagtttattcatactcaggagcctataaagttgggaaaatgacaagacaaatagcaaatgtgaaaatagagtaccctgggaacagtttcttttcagctcaaaacccaaagcacaggttgttaatgctttcattgcgaaactcaacttcctgcccctgcttgacctttttagtttagattggtcactcctagttcaacacatgtgttctccaccctttcctttggtggggcaggggtgtgacacccatgtaagtctccctacatttattttttcttatgtatttaaaatatttgtcacagtaccatcttgatattttccttatttggggtgctttcagaaagtatcttggaggaataatgaggatgggtggtttcctaaagataggaagaagtttgcctagcaagatctgggtaatcaagtcacataggtgttacagagagctgctagttgctcaaactctaggaattaattaactaggctgccaaacaggattagttttagcagaaacaagttcctagatcttagttaaaaaatataggggaaggattaaagtagtaagcaaatggattatgagagatatgagtcagaaactgggtaagcaataatatgacttgatcaggggatcaatcagagagtggagctagattactacagtgtagcatatcaacagctttactgatagcatgctatctgaactgacatggcttaggctacttgccagtcttaaggcagtctaactgcagcatggctgaggaagtgttcatcattccattatactctaatcaaaccccatctaataattttgtttgagtatatcctaagaggggccaccagtaaggaaactgaagtttgtcttttttttttttttttttaagacagggtctcacactgttttacctagggtggagtgcagcagtgcgatcacggctcactgtagcctctacctcccatactcaagtgattcttctaatgcagcctcctgagtggctgggactataggtacacgccaccacacccagctaatttttttgggttttgtgaagatgaggtctccctgtggtgtaagccattgtgcccagcctagagtatgtcttgaaaagagaagactgtagttttcaggatctagaacgtatgccatttgaggaactgttggaggcattttgtctgaagaagagaatattaattggagttaaatcactgaatctgagtttctttatctatgaaataaagttggctagactagatcctttcataaataatagttaaaatttgggaagttgccatgtggaagaggaagtggactttttttttttttttaaggttttgtattttggacatacattttcaaaccaattcaggaagtagaatacctgaaagtcatggtgctcttataaaacaggatgaaatgttgatatactaattttttcagtacgttaaatatattaagtatactactttgtgttacattagatgacaatctgtgctagattataatagaaacaactggtagaatggtgggtttggtggctcatgcctgtaaacccagtgctttgggaggccgaggtgggaggattgcttgaggccaagaattcgagaccaatctggggaatgtagggagacccgtgtctatagaaaaaaaaaatagctgtgtgtggtgatgcacgctgggactacagctattctgtagtcccagctactcaagaagctgcagtaggaggatctcaagcccaggagtttgaggctgcaatgagctatgatgataaggcccttgtactccagccaaggctacagaatgagaccctgtgtctaaaaaacaaaggaataactgatagtaagggctgaaagttaaaatacattgcatagaaaaacttaaaattaaacaagtcctatttgtttgtttgtttttgtttgtttttttgaaacagggtctcgctctgtcacccaggctctggagtgcagtggcgtgatctcggcacactgcaacctccacctcccaggttcaagtgattctcctggctcagcttcccgagtagctgggactacaggtgcatgccaccatgccctgctaatttttgtatttttagtagagttggggttacaccatgttgactaggctggtctcgagctcctgacctcaagtgatccacccgcctcagtccccccaagtgctgggattataggcgtggccaccgtgcctggccaaacaagtcctatttgtttatatatttttttctgtgaattgagaattcagtttagtagcttaattttaaaatctgttgtcctaaaaagtagaacaagaaccaatggggaagaaagtcagggagacaggtttcatggttaaatatctataaaggaacttagaaagagacatttcatgatggttgctctcaggttgtgttaagagaaaaactttagacatatttaacatagtttaattcagcaaagaagagatcacaaatcaggcagcccctgaagcagaatgggttcagggagactccagtgcagccatgtggtggaagatttatggtcagaaaaggaaagtgatgtacagaaaatggaaacgaggtacagaagcagctgaattggttatggcttgatgtttgccttatttgaacaggttttgaacagttggccacccttgattggccgaaacttggtgattggcacaagagtaggttacagtttgttgtacacatccagttaggttacagttcactatgcatggagaaattgttaggctgaacttaaaatgtgttaggaggcaggtttaggctaaatttaacagttgtaaacacaattatttgagacattgacttagaggcttggcatgcacctgttataaatgctatagataggattttgtttttgtttttgttttttttttttagatggagtctcactctgtcgcccaggctggagtgcagtgatgcaatcttggctcactgcaacctccacgtctcgggttcaagcaattctcctctctcagcctccctcctgagtagctgggattacaggcacctgccaccacacccggcaaatttttctatttttagtagagatggggtttcaccattattggtcaggctggtcttgaactcgtgacctcaggtgatccacccacctcagcctcccaaagtgctgggatgacagatgtgagccactgcgcccggcccagaatggatttttgtatgaaaaagttctaagccttcttgttagtgctaagatttcattttgtttgtgtacaggaagataaagtttggttttatgtagaccaaaatagggagataaactgaacactggtaataggctgactttggaaatccatggcacaattcattggcacggagcttttaatttttcacacaccattcatctctacttacaaacttttccctgatattttttattggaaaataatattgcaatgcctattctttataattacttcacatgcttaagtgttcatttcctgtaagaattttgtgctttgtggtaaaaactcaacacagagggtatttttcttctcactcagcaagcttacttcctgtttccatctagtgtcctttgttttattaataataacctaaatacattagttccaattttttgtgaccaaaaccagtaaaagacataatacttaaaactgtcttctggaaatttaagtttaaatcaggcttttagttaatagctgtgaatttaactactttgagcagatttcaaagaattttataatagatcaaattattgtcatagaggtggctttgcaaagttctttggttgtaaactctttctaaaagttaattgtattaacattttaaacatatccccattggcaaaatgtctattattaattttaaagaagagcaaaagttaaacaaaatgtgattttcatagtctgactgagtatatttgaacagtaaatataagtttctttgggaaaaagtccaattaaggatgtaaccaactttcttctgaaaagtaatatgtatttaatgtttaaagtgcatttattgaaaacttggtgttgtgttccatataatttctgggtaatgtggcatgaaccttgaacttgtataggtataaatcttccccatattcttgtaactactttacagagtattaatgataaatttttgtgaattattttaaaccttcaccactttccttaaacctccaaactcacctctgccaactctctaccattttttttcttttaaattgaggtcaaggccatccatgtgtgaactgctcacctcacatttccctcatctttctggtttgaaaggaagagatgttccttcccttttccaaaacttaactgttttttttgttcctgtttgttcctgtcttccccaaagttattactgtttgtttgtttgttttgttttggtttggttttgttaaggcagggtcttgctctgtcatccaggctagagtgtaatggtgcaacctcggctaactgcaacctctgtctcctgggttcgagccatcctcctgcctcaacctcctgagtagctgggactacaggggcatgccatcatacctagctaagttttgtatattgtgtagagatggggtttcactatgttgcctaggctggtctccatctcctggactagagctatccacctgcctcccaaagtgctaggattacagatatgagctaccacacctgtccttaaagttattactctttaaaaaggaatttgtactcactgcctttccagtctcttgctctccttctgttattcccattatgttatagaattgccaatccctcgaccatattcaccatttagcccttttgcttattttttaaaaattgactacatccttttcttgaaacttctgttgccctgggtaaatctacttcctatttttcttcctgtgatttttgactcctttttctttgtctagcctttaaacataggcattcctccaaaggttttgttcttggttgtttttaataatgctttacttgttttcccttggccagtgctttattcttgaggctccaatttacttaaattgaaagctactgatctagacccttgtagtaatgtgactccttggctgtctatgctcgagatgctgtgatggttaattttatgtttcagcttgactaggccatgaggtgtccagatatctgatcagacattattctgggtatttctatgagcgtgtttttgggtcagattaatgtttgaattggtcagctggataaagcaaattccctgcttaatgtgagtgagcctcatccaattagttgaaggcctgcagaatgaccctcccaaaagtaagggggaaactcctcctgcttgactgctttgaagctggaacatcaatttttttcctacctttggactaaaacagaagcattggcccttcctgcgttctgcaactgcaccattgctctcctttgtctccagcttgccagctgcagatctggagacttgtcagctcataattgcataagccattccatatatacgaaaataaagagatgtcccagttctgtgcctcacagatacaggcccttatgtctcctttagcttcccaaagagactgtttcctcttaatggagcttgacccaaagactactgactgagaatttgctgtctcagtgatcctgatggatgctgacagcagttaacagagagagtgagttccctgtaaaaaattacagaaattggatgatcactaaatctttgtttctagctctggaatagaatatttctggagtagaacatttctagacgatgacctaaacatctacatggattttcaaacacaacatatttactagagaactttgtatcttcccctgcaaacttctttctttgttccaggtattggctaatgcattggcagtgttttcttattgattatcatatatctctttcatttgttaaaaaatgtgtgtggttatacagtgtgaggattgcacatactaatcatttgtggacttcaccattaaagaacttgggctagaaaggggagacaagatgtgaatgtgtataaatgcagtacaaaatagaaagtcttgagtgccacagaagaaaagtctgtgcaagatccatggagaaaagagatgatttgatgctttggtttgtttgtgtggagtttggaagtggggtgggagtatgggtgaagggaataggtgtaaaatatatgtattttttattccagaaagagcagagggaaaaacccaaaactgttaatgtttgaggtgaaatattggcagcctagctattttttaccctttacagactttaacatttgagttaactttccagattctattattaccttgatgtgtgactagataattattatattcagtttttgttaattcaaactcgtaacttgaataaaaggaaagacctaattcacgagagacacagcaaaaaatacaactattattattttttttaaatcctaaaatgccacctaaggagattcagaatctgtttttaaaataagtaaaacatgaagaacagttcttcagggaaagatgattcttgggtcaagcaaagctttaggttttcccagcactgctcccacaaaggtcacaacgttgtttttcacattgtgtttttaaggatttttaaggatattcttttgagagacagattagcatggtgattaagcatgtgacattgaagccagactgcctgggttgaaattcacactctgcctatattagctgtatgaccttgtgagttaattaactcatctgtgcctcattttttccataaaatgggagtaataatagttcccacctattagagcttttttgataaataagtatataaatgaatgcctgtagatatataattatatatatatatatttattattattattatttttttttgagacggagttttgctcttattgcccaggctggagtacaatggcacgatctcggctcactgcaacctccgcctcccgggttcaagtgattctcctgcctcagcctcccgagtagctgggattacaggcatgcaccaccacgcccggctaattttgtatttttagtagagatggggtttctccagttggtcaggctggtcttgaactcccgacctcaggtgatttgcctgcctcggcgtcccaaagtgctgggattacaggcatgagccaccgtgcccagccaaaaattaatagatttttgacacatgtggtgaaggaagtttaagaggaaggtgaagggaaaagtccagaggcaggatagcttgatttgtgttttataggaacaggatatgattcaagctaactggaacatagaaatctttagggagattctgggaaataagattggattagattgtggcagatttggagtgtgaaaccagaggatttgctaggaaatataaaatcccattctttagagtaatatagtctatttgtcatagtggttgcttctgtaatacaaattgattgatatgtgattggtaactatgagactgaggtcaatacaatggggaagtagcattagttcagacgtaatctttcccggcatattaactttttgaaataatcagaaacaaacttctcacaacctaagggaaagctttagcactatatgaagatattaggaaaacactgagaatcctgcagaagtgtcctcttattaatgaaaatgagtggcttcaagaacagtttcacattccacagtattaatctgtcagctataacgatgtttgcagaccaagaggctgcaaaaacatttctctttgaattttttttttttttttttttttgagacagagtctcactttgttgcccaggctggagtgcagtggcacgatctcagctcactgcaacctctgcctcccaggttcaagcaattttcccgcctcagcctcctgagtagcttgaattacaagcacttgccaccacgcctggctaatttttgtatttttagtagagacaaggtttcaccatgttggccaggctggtcttgaactcctgacctcaggtgatccgcctgccttggcctcccacagtggtactgtacttttaacttcattgcaattggtgttgactagaagcatatgtcctgaagaattcatatctcaaatgaggaaacaagagccccagggttttaggcttcaaaggatgaaatgctaggtgcaaatgggagcagacatttaactgtgctagtatttttataaggtcctattatcgttttagttagggctttgattacagagttatattgatataaaaaattatttttatttttagagatggggcttcactgtgttgcttgggctggcctcgaacttctgggctcaagtgaccctcttaatttagcctcctgggtacctgggactacaagtgtgcaatgccacacctggctacattgatattcagtagtctaccttaactctcttttccccaggagacttgttacttttaattgtggttttgtagcactcgaagtatttatttttttctccaaatgtgtatatcacattctagcagaaagggctctgacatgttttaaaggaaggaaactcataaaggaattgttgacctaaattttcagtttaattttctcacacagaatcatcttgtgtgctgaggcaggcagattgcttgagcccaggagattgagatcatcctgggcaacatggtaaaaccccgactctacaaaaaatacaaaaattagccaggtggggtggcccatgcctgtagtcccagctacttgggaggctgaggtggatcacctgacctcaggaggtcaaagctgcagtgagccattgttgagtgactgtgctctaacctaggtgacagaatgagtccttgtctcaaaaaacaaagaaaaaaaagtctttttgtgtgccatagtcattgaaatctgttatagctcttgaaatatacgcactttgttctcactgaattttgaattgagaatgttccaattctaattttaaagggaatttatatttgaaatttgcaccaaatcaagttatttttatgtagtgtcaaaacactctcaatggactctgctgtttggctatgcttgggtggtgaattgatctccctgaaagctgtaaacagtttttgaccagacgtaaacttagctttttagggattgtgaggatgttagtataagtttattaacctagaaaatgcccattctcttacataaaaaaccatctttcttgggatttgggtcctagttgaatatatagaatttctggctgattagaagagtcccaaatgggcttgatctcttcatattcttaaaacagagagtcctttaatttcatttagttgtaaaatttctaaagtgtctattttaggaatattttgaatggaaaggtctttagcattccattcttactgaccggtatagcctgtttctactattgagcaagtaaaaccaaggaacgaaaataaggcttagttgacattacttttacaaagatagaaatatataatttaaaaatttgttattgatatgatttattttacctccattgctttgtacatattttcataaaaatgtgtttgtgctgtgctgctatgtagcattttgtggatcttccacttttaaaataaaaacacttttttaattacagaaagacccaaatgggaccagtagtttgccaactggaagttctcttcttcaagaagttgaagtacagaatgaggagatggcagctttttgtcgatccattacaaagtaaggaatttttctttataaatgttcatttgaaaaattcacttgaaaaccagtttagtgctaataattctaaaattttaaaaattttaattattttcttcttgtggctaacatttcaagtcaaagagttaattggcacgttatcacaaaccacagttgaacttgtatcttcacctgttagatttcttaatatttggaagaaaaaattgaggtcagacagtagacttctgatactgtaataaccagtgaaaaatatgacttacctgtaagcttcagtacacttaaaaaatacctacttttgttttagagagacttaattttgctgtaaactttctagcattcaaaatactgttcaacatatttaagagatgatattataataggcaagtttagaagagcaaatatattttctgaagtttagaaaaacacatttatagaatgttctctcaatcttaaatgtgtctaacattcattataggtgaggaaactgagactcagagaagtaacctaacaaactttacttggctagtcagtaatatcagtagtagaaccaactctcttttgcttctggttaagcatgttttcttcccattatatcactatattagttgtgacttctgttacgagtgctagaaacccatcttgaacttaaaaagggtcatgtattggttcacaacccaaatagcagatagaggaaggatgggatagagttcattaacagcaagattcaggaattcattactataaatcatccccccttccttcaattctccttgtccactccatttcctttccttcaccttcctcacttttcttcctctgcctttcctccatgcaatttaatggtctcagtagcagagaagaaaaaggagtccccttagctagccagataggaaacacccataggaggaaagagtggaacaacagtccttgtggccaagaggatgagagatctgttatctaaaaaagggaagtagatcaccactgggagatttttttctgaatccagcattgtcttcagtgtggtctgctttaagcatagcaggatttggggttcccagaacatttttgagtatgtacattattttaatgttaaagaacttaatatttaatgagattttctggaccattggtgatattttattaaaactctgtcttcctttatgttaccttttaaccagcatttcttttcttcagaataccttaggaaaaaaatattatcagtagagtcactttttcttggcaaaggttactctccccagacaggccttgtattttcctgttaggccatgttaagtaactactacatttaagctttgcaagttgagaagttaggctctctgagacctaccttttttctcccatttgaatcttagagctatttatacaaactctgccactaattgaaaatgattgtttttgtttacacacacacacacacgcacacacttaaatgtgatacgaaactgcaaatggactaaagagagaatgagttctctttgtaattttattttcattagtagactatgactgcaacaaatactagagcagtaagaagtactggtgtttttgaaggcatgttctaggaacttcccctgtggtgaccatggagattgagatgaggagatgtactttgaaattagtggctctgttttttccattgtgctcattttgcagtggatttttaaaacaagtatgtaggcttttaattagagagccagttctttgctttttgagatctcctaaaattattcatttattcatttaaattcagctgtgaaattagtgtcaggctgtcagaatgatatttgtttatagttaagataaaatacaaaacagacttggaatttattaccagttctaggtattggtttttgttgttgtttctcatctgtgaaattaaagagttggactagtgatttcaaagatctctttcagtttaagattctgtaatacattgattcaggactacttttcattattactgagttttttgtcctatttctttccttttacacctatcataattgacaaagcttgctatatctactagttacaggtgctgaaaaggttctttttttttttttttgaaatggagttttcactcttgttgcccagggtggaatgcagtggtgcgatctcagttcactgcaacctttgccttccaggttcaagcgattctcctgcctcagcctccttagtagctaggactgtaggcatgtgccaccatgctcagctaattttttttgtatttttagtagaaacgaggtttcactacattggccaagctggtcttgaactcctgacctcaggtgatctgcccacctcggcctcccaaagtgctggcattacaggtgtgagccaccacacccggtcgagaaagttcatctaatagtgttaaataccagtagaagttattgccactttatttgtggtcctttaggataagatgagaaaccacattctacacctgtctttctgaatagctttatggtcatatagtattcatatattcatatatatactatttatatcctatactagtatcttgaccccaaaaacttcctgtatgttttcaaggacttcaactctgcatttggttaattttattctaaacagtgctgactgtactttcctatagaataatattaatttatttgaaatttttcaaaaccctcatttttatctcttttcttctttttatgttctgattttgcatgatttggttatctgtgcagaattttagtctgattgagcacacaaaagtagaaaaataaaccataaaggattttcatttctgcatagagatactgaatttcctgaactgtagagccacactaaatagacaaagccttttatttgggtgatagggaagtagaaattttagagaaaataaaaaattagagttaaatactctttatagatagttacttaagaacatcaaactgtaatgtgtggcttagagtatccataaaaataccttatctggtctatattgaaagtgaataatttactcagtcagcagttattcatttaataatttaatttgattttgtatgtttaaatgcttaaagatttcgctacaaaaaaaccccacaaaaaaacctcaattgtaaggaatcttaaatcttaggtgttttatggtttttggcaatttttataaagcaaacaaaccatggattagaagaaatcaattttacagaaaaaggtaattagtgtattttctggatctggtatcttccatggtaccaagtaaatacaaaaaagactcattataaaaacatttcttaaattgtgataaaatatacgtaacaaaaattaccattttaactgtttataagtgtacggttcagtgacataattacattcacattgttgtgtaaaagaaaggacttattttaagaaagggaaatgcaggtttcctcctctcaaaccaagctaagttttatcactggaatttttgtctaataaattcttgtcttagctatcaagaatttctgcttttacttttgtcatccttaacggtttctgaaaattgaaagcttgcttagatgtagaaaaaattctctaacattttatacattaatttcgtgatttgatgtgagcctctgtcttagtgtttgtattactataaaggaatgcttgagactgagtaatttataaagaaaaggtgtattatatttttaatattgttgcttaggatttcagtgcaaaaaccagatttattccttcactaactcagttatttgacaagaaggttaaagcacttactgtgtactaggcactgttctaaacgctttataaactaaattcacataattctcacaacaaccctatcaggtaagtagtagtattacccccagtttatagaagaaaaaacagaagcaacaaggaaatttaataacttgaataagttcacacagctaataagtagtataatcaggattcaatctaaggtaacctggctctagaggctatgcactaatggttacatgtgctacctctccagaacctttttctgtcatctcaagctgttttattctacttatgtgacctgattattttaatctctacagaagcaagtatacaatacttctagcattcattccattcatagccctatgaaaagcaggaaggaggactggtacctgtcttctaaaaagtcagtttaaaagagctcacaagtgtaaagaagttatcaaatctttgtcttacgataacagcagtgctggctggagatgagccatacaccacattcatgtatttaattttgaactgtgttgctcctatgaataccttcacaggcagttctttcaattccctaagttttagaaatcactttgagggaagaaaggccttgtagcactgtaaaaaaccattgtctatattttgttcattatctagcagccaaaaacaatgtttgtacgaaaaaggtccttagaagaaaaatattttttaagacaaccaacttgttatccttttggccattatagttttaggactacattgcctatagaataatttaaaaggtaccattttgtgtaattgtactgtgtggcaaaagatttttaagcagaggacctcatttaaaatgccatttatccaagcatgtgcttgggtagtgttgataatgttaccaaagatatcctggcagtagttcatctcttccttttccttgggtttcttttatttaaaaggaaaatgctggtatttggagtttcaacaggagctcattcattgcagtttcatgagctgcttgagttggacaaagacacagaactgagtggctgtaaacatgtaaagccttgttcagagccctcaaatgaagtttttttaaaaaagaatttaatttcttctttcttgtgaacagattgaagaccaaatttccatataccaatcaccgcacaaacccaggctatttgttaagtccagtcacagcacaaagaaacatatgcggagaaaatgctagtgtgaaggtctccattgacattgaaggatttcagctaccagttacttttacgtgtgatggtaggtttatggttcctcaagcctctcgttttgctctgttagggggaaatgtttaaaatatcaatattatcattcttttaataaaccaattttgttatgtgtctttttggcattcatatggatagttttctcgttagaactagtggggaatcaggttacctttataaatagataattatctgaaaagtgctaagtaacttttgttaatcagtggctcttggccaaggctgaaaagcattagatagaaaagctaattataatttaattctttatttttctccttcattttatgacaggaagcatgcttgcttataaagagctgtcagtgaaattgaaattccagatatcttgctaagttcttctgtggagaagataattctcttttattttaatcctttcttccaaacttggtatgggtgtcctctctagagatgtattcccaaagtctgtaggaaattttttttatagttttaaaaactaattttatttccttgcagagtttattgcatttcataatatatattatcttaacgggattccaaccaaggaatgagatcctgtatttctacagtactttggcctaagaattatgctgtttttattctttaatggttatgactaggaatgtgtctaatattcagatacattctttctagctttgtacttttgaaggccctttgaaaaaatataaatctgaaacagaaaaccattagctactgtaacaattattcttttagttgttaaaggaaaagttttgtgtttttttgttgttgttgttgttttttgagagagagtctcactctgccacccaggcaggagtgcagtggcatgatcttggctcactgcagtgagggtgacagagttagaccccatctcaaaaatacagcctacctgctgtatttttatttttcattggaaaatataccaggcaaatgtcaaacatttaaaatggtgaatctttttcttataattcattttaaatcattgtttgctagatactgctaaatatcatctgtgggggattgtttccaggacccccttcagataccaaaatcccaggatgctcaaatccctgatataaaagacatagtattatcatacaactgatgcacatcctcctgtataccttatttatttttagtttaatttttaaatttttaacttgtatgggtacatagtaggtatatatatatttatggggtacatgtgattttttttaaagtatcaaagggaaagggtaacgtgatgttttgatacaggcatacaatgtgtaatactcctgtatattttaaatcatctctagattagttataatacctaatacaatgtaaatgctatgtaaatatatgctgtactgtattgtttaaggaataatgacaagaaaaaaagtgtgtacatattcagtacagatgcagtttttttcttttcaagtatttttgttccaagattggtgaatccacagatgcagaaccaacatatatagagggccaactgtattaggttaaataaaacatattattaaaattagcttcacctctttccatttacttttttcaatgtggcaactagaaaatttaaaattatatatgtggcctacatttgtggactacattatatttctattgtatactgctgtcttaaattataagtaatacagtcttgaataaatataaatgagcaaagtgaaaataatgactaactcttttacagtgagttctactgtagaaatcattataatgcaagccctttgctgggtacatgatgacttgaatcaagtagatgttggcagctatgttctaaaagtttgtggtcaagaggaagtgctgcagaagtaagtttatttaactactgagcaacatccttggaaatttcatttttaatggtttaatctagaaaaatttcaagttaaatttataatgcagaaatacattggatcctattgaattgatttattgaatcaataaacttttattgaaatatataatgtctaagatgtcatgtctaagacagtggtggggtttcagagataagtgagacattgtattcccttaaggagcttgtagtctttacaggaagagtttcaggcagttggttaataagtgatataatgggtctttcttactgtaaagagtcaatagtcacatcattatagactatattcctcttgcaacatgcactgttactttatgcacagtagtcagctgtgatttccttttagttgcctgaaataatcattatatgaatctttttcttacccaggtatttattatatctttttttttttttttttgagacggagtttcactcgttacccaggctggagtgcagtggcacagtcttggctcaccacaacctccacctcccgggttcaagcgattctcctgcctcagcctcctgagtagctgggattacaggcatgcaccaccacgcctggctaattttgtatttttacacaatacagcctgttggtcaggctggtctcgaactctcgacctcaggtgatccacccgcctcggcctcccaaagtgctgggattacaggtgtcagccactgtgcccagccttgtaattcattatatctagcatttagtccagttgttttacagattttattctcctaggctgctagaaatgccctgtcccgatttttcttatttccttcttcatctttgtcttcatcttctttcttttttacattgactcttctcgtacagaataatttctctgtttaaatgctcagacttgattttaaaactgtctctgtttcaccattctcttcaatttctgatgcaggtgcaatttaaattttaccctcacctttataatttctaatttgaatagaatagtgaataattaatatatcttaacagtaatcattgccttggaagtcatgagcatattcaaaactgtcgaaaatgggacacagaaattagactacaactcttgaccttcagtgcaatgtgtcaaaatctggcccgaacagtaagtgtgtacctcataactgaattccatttgtttgaatctgaataattctgctaatttgccaattttcaacttgtacatttttcatgatttcatagttagaatggggtgatgaactcatcctcaacaggaatcttcttagcaaatgaggggagatgttcaatcatggaggtttaggtaacatagtccttagaggtagaggcatatttgaaaatcaaagtggagaaattaaaatttggttggtaatagctttatacaagagtgaaaacatcagggtgagtcagggaaaaatggggaagaaggaaaaattttgaatactaaatatgggttggggatgaaaagaaaatccacactgacctttgtaccaaactgagaaaaataaattattcatcacaaaatgaaaactaattccctgttttaaaagttcactactttcagtaggtggatgctgtttaaaaaaaaaagtgctttcaatgctttcttttgaggttaaagcaaaatagaatgcagcaaatttagccattttgttttactgcgtgaacccttgatgaacttaaaatcgaatttttaatctctaaagagaattattctttatttgttagaattttggatggaaaaatatcagtgatgtctgctttctttttttcttggttttcttgagttttgcttttatgttaggtagaattcatttcaattgggtaaagactatttcataaaatttggtacattttagcagtcattggtaacttttcttcttagtttcttaaggaatgatgttctttttttttttcttttggagacagagtttccctctgtcatccaggctggagtgcaatgatgtgatcttagctcactgcaacctctgccacccaccctcaagcgattctcatgcctcagcctctggaatagctggaactgcgggcatgcaccaacccacccagctaatttttttttttttgtatttttagtagagacgggtttttggtgtgttggccaggctggtctcgaactcctggcctcaaatgattcacctaccttggtctcccaaagtgctgggattacaggcgtgagccaccgcgccctgtcaggaatgatgttcttgactacatttgcgtaatgtagacttagggtagaagagcgagtaccttgttcatgatggggagtgggaggaaaattgattatcattagaaaaaataatgcagaaatttaaatgacctccatctgttttctaccccatatgcatttggctatcagccatctttagtgtttttagctctctattctctatatatagaacagaagtagtttttgttccaaaagctatttatatatctgaaagtaggcttgaaagcatttatgttttccatttaacaaacaagttttttttcaggatgttgactcactttttttctgagtcagttacaaataatatttaattctgatagaattttattttcagttctcagaaaaacactttagttgcaagattttatcatacacttaactatatttaatttgacaatagaaagaccaaagagtggatgtgatttttttgtgtatatgtgtttgtttaggcagaagatgatgaaacacccgtggatttaaacaaacacctgtatcaaatagaaaaaccttgcaaagaagccatgacgaggtatatcatctaaagcattaattgcaggttttcagactttgtttttggatgcaaatacacttattttggtgatgaaaacaatcattttgtgtgtagcatccttcagccacaataactgttgtttctttcagacaccctgttgaagaactcttagattcttatcacaaccaagtagaactggctcttcaaattgaagtaagtcttaattcacattttggcataatgacttaaagattcttgctgcttctttctcttaaatggtagtgttggcattggattaaatattttaggacttttaagactatattcttctttttaatttataaagaaaataggtttaattgacttacagttcaacatgactggggaggcctcaggaaacttaaatcatggaagaaggcacctcttcatagggcagcaagagagaatgagtgtcaagtgaacgggacccattataaaatcgtcagatctcatgaaaactcactcactatcatgagaacagcatgggggaaaccacccccatgattcagtttattgccatctggtcccacccttgacacgtggggattattacatttcaaggtgagatttgggggggacatagagccaaaccacatcattgtgcccctggcccctcctaaatgtcatgtcctcacatttcaaaacacaatcatgcccttcaaatagtctcccaaggtcttaactcattccagcattaacccaaaagttcaagtccaaagtctcatctgagacaaggcaaatcccttccacctatgagcctgtaaaatcaaaagcaagttagttacttcctggatacaatggaggtacaggcgtggggtaaatacagccgttccaaatgggagagattggccaaaacaaaggggctacaggccccatgcaagtccaaaatccaatagggcagtcattaaagcttaaagacttttttttttttttttttttttttttttgaggctgagtctccatgtgttgctcaggctggagtgcagtggcacgatctcggctctctgcaacctctgcctcctggttcaaatgattctcctgcctcagcctcctgagtagctgggattagaggcatgcatcaccatgtctggttaatttttatattttttagtagagatggggtttcaccatgttggccaggctggtctcgaattcctgacctcaagtgatcctcccaccttggccatctaaagtgctagggttacaggcatgagacaccgtgcccagccaagactatattcttgacattaatgtttcatgtcttgttttcggacctaacttacccccaaaattttcagtaatgcttaaattaacatgtttattctcacttcagctctgttgccaagaagaaccttcagttcatctctaaaagcatttattggatgcttactatatgctgaatgctagagttatgaaaatgaatgacctagtccccacctatcaggaacttaaaaactagtggtgagggatttaaacaaaacttcaatatagtatagtaaaatgtattatagaggtatgccttgcagttatggaaatcaaggaagagcaccttacctaagttgagggttcaaagaaggcctcttagaagggatgttccctgaaccaagtcttacacagttagcaagaaaaaattgggaagggtatataaacaaaagcagataggtgtgatatttacatggaagtataagcaattctgtgatagagtacaaagtataaaatgaagattggcagatgacattggagatagctatgtgattattatccttataatccatgttaaggaattttactttatcttctaggtcaggagaccatatccagtctactttctaatttgtaaattaaaaaaaaaaattaacaaaaccacacccctggattttttgttgttgttgttttttgttttttgagacagagtcttaccttgtcacccaggctggaattcagtgatgtgatcttggttcactgtaatctctgcctcctgggttcaggtgattctcccacctcagcctccctagtagctgggattacaggtgtgtgccaccacgcctggctaatttttgtatttttggtagagacagggtttcaccatgttggtcaggctggtttcgaactcctgacctcaagtgatccactcgccttggcctcccatagtgctggaattgggcgtgagccactgcgcctggccccatacccttttttttttgttttttttttttttaacatattctttcttgtcatttacatttgtgctccaacactagagttgagtagttggaacagagattgtgtatcctgaaaacctaagctgttactgtttggccctgtacagaaaaagttggccgactcctgctctagccacttaaggtgtttttagcctagggtgggttgggtgaattgtttagtcctgtgatctgaaatcactctggctgtattgtggaagttagatttcaggttgggattggtttcagagcgaatatttagaaaggtttttatagcagtccaggtgaaagataaagagcatggagaagttaaaaaggagagaactgattaacaatatttaggagataaaattgaaaagattttaataggtgatgagatgtgagtgaaggggaaagagtatgagtgtaggatggcttccatatttttatctacaagtacattcttatcaacatataaatatatttattcaaaaatattcactgaatatctctggtaagctggagtttactagaatctggagtttcgtatggagtgtccaggctagagataataaacttggaaatcatcagaatataaattgtattttgcagccataggcaggatgaggtcaccaggaaaatcattgtagatgaagagttgcccatcttaaaaaaaaaaaaatccccaccccgccccctgccgcaggagccacaccatttctctattctccttgccacaaaacttctgaaagttaagtggttttacagcttccaattcctttcttcccattctcttatatgcccactccaatcagtttagtacttccctgaaactgtacttattaaggtcatcaaggacttccatgatcctgaattcagtagtcagttcctaatctgttgatggatggatcgatggatggatggatgacagggtgtcactctgtcacccaagctggagtgcagtggtgtgatcacagatcactgcagctgcaaccccctgcagatttctctgtgttgtctgggctggtcttgaactcctgggctcaaacaatcatcttgcttcggcctcccaaagtgttaagattacaggtgtgagccactgtgcccaccaagtctttatttttctcaacctgtctgtattttttgatacagttgatcatgtctttctttttgaaatacttagttggcatctgggataccaccttctgctttccttatttccattagctgctctgtctcactcttacttgtggcttcttccttatcttcctgactaccaaacattagcatatccccagggctcagttctaggacctcttctctctgtattcacatcctaggtgatcttggtatatccctatactgattgactctgaaatttatatgtctaaccttaaccttttccacatctccagactcaaatatctattacttgacatctttatgtgaatatctaattaattgacatctcaaatttaagatgtacaaaactgaattttttatagtacccatcatatctattcatccatcgacctttcctttctctttttaagagtttattttttgagagcaatgttaggttcagagcaaactgagaggaaggtacagagatacctcatatacccccttccctacacatgcataacttgacctcattatttccctttttaataaatggcaactttgtcttccatttgctcagaccaaaaccctggagtcatccttgatgtctcaagaaaaagatcttatacatttcacattcagtctaattctggtcagctccaccttgaaaatacatttagaatgtgagcactttcatcattaccaaagctatactctagtcaactgcagtagtttcttactaatttcccagtgtctacccctgccctctacagtatgtcttccacaggcaaccaaaatgatcttttgaaaataagtcactaaatgtaatgtgatatcctggattatattctggaagataaaaagctcattagtggaaaagttggtgaaatctgaataaagtttgaaatttacttaatagcaatataccagtgttaatgtctagcttagacaaatgtaacgtggtttatgtaagatttacttagtctagttttccaacattatatgggaactttgtatttttttataactgtctataaatttaaaattattaaaaggtaaagattttaaaaatgaaaataggaaaattagccgggtatggtggcgtgtacctgtaatctcagctactcggggctgaggtaggagaattggttgaaaccgggaggcagaggttgcagtgagctgagatcacactgctgcagtccagtctgggtgaatgagacctgtcttaaaaaaaaaaaaaaaaaggaaaagaaaagaagagcagaaagcaaaataagagaaaatcaaaggcagaaggtggggctttgaaaagataacgtttgtaaatcctttaaaaagtgttagatcatgtcactccttcactgagaatcctgtttactctcttacttagtaaaattcaaagccctaattgtagcttcaaggttccgcacagtatggactcactacctctctgatctggcttcttatcacttccctttgttttttttctggttgattatctgccagttatgttccccactggggacccctgtgcatgttgttcccctctaaatgcttttccctgtgacatttgcatggctcacccttacacttttttaaggtcagtgcccaaatatcaccagagatttctttactcaccatcttatctaaaatagtaactctatattatacttatccccctcctttatttttatagctttattgaggtataatttatatatcataaaatgtacccattatatgcacacaattcagtgattcttagccaatgcatagagttgtataattatcaccacaatccagttttagaacattctcatcactcccaaaaaagtttccttgtactgatttgcagtcaatcctcactcccagcctcagccccagacaactactaatctggttcctatttctatagctttgccttttctggacatttcatgtacatggaatcatgtactatgtagttttttacatctggtttctttcacacaccatactgtttttgaggttcatccatgttgtagtaggcatctatagttcacttttttcttgctgaaaaatattccaggctaccccacattttgtttatttgccaaatgattagcatttggacttaaactttataatttttggttatcatgaataatgctgttataaacatttatgtatgagcccatggatatatgttttaatttcttttggatggattttagggggagatcaagaagttgctgaagttttttttattgttgtttattttatcttttttaaagaaatggaggtctcactgtcttacccaggctggcttcaaactcctgggctcaagagatcctcccacctcagcttctcaggtagctaggattacagccacacaccactgtgcccagctaggaagttgcagaggttttgattactcctggcctttagttttctgaagataggatgttaattcaatttgctaaaatgaagtcaggatggcagtaggggttttgaggcaaggaataatggtttggtttaatatcctatagggaatgggaaggagagctgaccaagggcagattaaaggaattttaggtgccgtggaagtttgtgctgaaattgaggactgttgaatctataagattttcctaaaagtgctcagctgcctggtagaagaagcagagaagagtttagtcagaatgagggagtgaggacagaagagagtttggtcagaatcagagtgtgaggactggaagcaaaggggttgtaaccagatatgatattgtggttaaggtttcaataggataccatttgggggttgaatatattgtgaattttccacatggacgtttatgtaacggaggcttgtattacaggatgtagggtagaaagttagataaatatccaatgcaaaaatatggcatgccgttggggaaatgaccatgtcggtagtaagatgtatcagcgtgggccagccaggagacggaaattgtactagttacttgaaaagggaaatttagacagggcatggtggctcatgcctgtaatcctagcactttaggaggtggaggtgggcagatcacctgaggtcaggggttggagaccagcccaatatggcgaaagccggtctctactaaaattacaaaaattagccgggcatggtggcacatgcttgtaatcccaccttctcgggaggctgaggcaggagaatcatttgaacccaggaggcgaaggttgcagtgagctgagatcatgccactgcactccagcctgggtgacagagtgagattccacctcaaaaaaaaaaaagggaaatttaaagaatcattaggccgggcgtggtggctcatgcctgtaatcccagcacttggggaggccgaggcaggtggatcacctgaggtcaggagtttgagaccagcctggccaacgtggtgaaacctcgtctctactttaaaaaaaatacaaaaattagctgggcgtggtggcaggcacctgtaatcccagctacttaggaggctgcggcaggagaaacgcttgaacctgggaggcggaggttgcagtgagccaagatcgcgccatcgcactccagcctgggggacaaaagcgagatttcgtctcaaaaaaaaaaaatcattaattagtaaaagatgattaattgctttaaggggtgaaagaggactctaaggcaggaattggcatactatggctcacacaccaaatctggcctgctctctgtttttgtaaataaagttttattggacctatagtgacagtcatttggtcatttgtttatgtattgtttgtgtctgtgttcacgttttaatggcagagctgaattggtgccagagactgtatggcccacaaagcctaaaatatttactaactggccttttaaaggaaaagtttgccaaccctactctaaggggtccagcgataggaggtgcataaaagcagctgtcacctctaggctgaggaaaaaaggacagtaaaacactctgaggactgtgataaagtctctccccgaaccttagactgaaatttagtctctttgaagagagtatggctctcacaggaatacatagttgcctatggcaaagaaacctgctagataaatttagccaaaggtgtcaggtaggagaacatagcatgagggtgcagctagaggtagtctttgaggactactcagctctcacactgaattaaaaaaaaaaaaaaaaggaagctggctgtttttcgtcttccggggcatttggcatatcctcataggctttcctagcctgtcctgaacccctggtaatagaattgtttacctttgtaccaagaaggttgggaaagcaccaaaatctgcatgtggtgtgtacccaggtagactttgaggggttcgtgctgtgagacctaaagcccttatgagattgtccaaaacaaaaaacatgtcagcagggcctatggtgattccatgtgtgctaaatgtgttagtgacaggatcaagcatgctttccttatcaaggagcagaaaatcattgtgaaagtgttgaaagcacaagcagggagtcagaaagctaaataaaagatgaagcttttttgagtaataaaaattaaaagactttttaaaaaaattagaaggcaggaacccagatgggaagtgtcttcctaatgctcttggccttggagggtcctttctgtgtgttcaattgacaaaatctaaaaatgcgctagcttggcaaagagaaatgtttatagggtctagctctagtatcagaaaggaaagcagaggaagggtggatttggaactgatagacaataaattgataattggcacttaaagagtagtgtaggccaggcgcagtggctcacgcctgtcatcccagcactttgggaggctgaggcgggcggatcatctgaggtcaggagtttgagaccagcctgaccaacatggtgaaaccccatctctactaaaaatacaaaaattagccaggcatggtggcagacacctgtaatcccagctactcgggaggctgaggcaggagaatcacttgaacccaggaggttgcagtgagccaagatcccaccactgcactccagcctgggcagcagaatgagagtccgtctcaaaaaaaaaggcaaagtaatatgaagtaatataggagaatggcatgaccttcaaaactggaaagatttttgcatgaatgtgaagtaaaaggaagcaggaagtataagtcaaataagcaaaaatgaggagctagaaaacaggctccgaggactacagggtaattgggtatttgagaaaattaggtggtttcatttaagcttgaaggtgaaggtttatagtagccaagcctcaagggtggaaaaatttaaatttttaaggggtggtatagtactgagtttcagcccattctaacagtacttggcataaaagtttggcataaatgttttatgaattaatacattatataagaatgtttcttaatatgtactt

SEQ ID NO: 921 - DNA, 32742 bp, Homo sapiens
  source 1..32742: mol_type = other DNA
cgtgggagagaagggagggttgggggaagtgtggaaaacctgaacctgagctgctgtcgcctgaggaagatttggtgggaggagaagcagaggggaagagacgggttgagagtgaggtgaggagggcatctaggtcactgctcccggggggcacaaagttcgcgatgtggctgaagcctgaggaagtgcttctgaaaaatgcgctgaagctgtggctgatggaaaggtccaacgactacttcgtgctgcagcggcgtcggggctacggggaggaaggcggaggggggctcacaggtaagctgtggccaccctacctgcctctgggctgtgttcgctgttacttaaaaggtggtgaggacaacagttactcgtcgctaccagtttcccgatcctaaatcgtgggcggagggactggggttcttctcccgacaccacctttccgccaccacctccaagtcctgagaatgtctcactggacgacgagttgctctttggttgggacaggtgaagggaggagcgcggttctttctgaggccaaggaagaaacgggtacctaccttgtcgcttcccatggggggagggaggctgatgatgagtgttagacctagacaggtcgcatttaggctggtgacaggggccagttcgcagttgtgaacttaacttttttcacagaacccataccgatcatcagcaccctggggagattaagcgtatgggggatgggatggagtgggtacgcggggatggtgaggagaaagggaggcgcccaatcacatcctgagaaatagacttcaaaagaaatattagggaggagggagaactggagtcaggagaggtggaggggtaggctcagaattgctgatctctcccaatttagcatcttttactttgtctccaagttttcaatctttgggatcccctctcaaaggctattaacaacgtcgtaataaattaatctcttgagtgactggtgctgccccttcattcaaagctgtgattgtaagccagacggtaagagtttaactcttcctgtctaacccaccctgaccccaattcttaaaaagtgttttttggccaaatgtttaaagtttccagagaaagttattttgagaccactcatcttgggtagggatatttaaagttttggacgttgggaaagcaagagctctttttctaatcaatctctaatttggtattgtgaccttgaagtggtagaccaggcagcgtgatgtaatggaaagagggaagagtcccgaaaacctgcattttagtcccatcctactctcttacttgttggatgacattcctcaaactctttcatttactcaaccttaagcacctactgtgtgccacaaggttcacaagattcagtttcttggctttgcagtgcttataatctggataagaagggtgggaaggtctaaaggaaaaagaaaaccacctagtaaactaggcaagttataattcatggaggagatgaccttgctttttctctcttggaaaatggtgcctacctcacagagttgagaggataaaacgaaagataatagcaccaaatcaatgtatgtcgtcaagatggtgataaacgtatgctgttatttcgttttcaagccactcccggggtgcaaagaattctgaggttctacaggacattttttaaaattttgctagacctattaatcttatccagcttctaaaaaggccctctcgaaaatatggcaacaaaaattgccctgttaaatgtgacattttgtcattttctaatttttaaaaattacaaatgctattttgcagaagagtctttccatttaatagatgcagatattttcgagatcaaaattttagaatcgatgttcataattacccagtgacataaattatccacttgagtccattgagaatagttcaggatatatttaaaatagatttcaggccgggcacggtggtttatgcctgtaattccagcactttgggagaccgaggcaggtggattgcttgagaccaggagttcaagaccagcctggacaacatggcgaaaccccatctctacaaaaaatactaaaattagccagccatgtggccccagctacttgagagactgaaatgggaggatggcttgagcctgggaggtcaaggctacagtgagccgtaatagggccactgcactccagcctgggcaacagagggagactctgtctcaaaaagaaaaaaaaaattaaaatagattttatagtcccgtgttacagcctcaggaatagtcttataatttattttcgttcctcatactaaaactgtgttcctttaagtaggtaaatcaaattcttgaaaatataatcactgtaatgtagtattgcatgttttttttaacttgttgcaagtttccttttttttttttttttttttttgtttgagacaggatctctcactctgtcacccaggctggagggcagtgatagtgatgtgattatagctcacagcagcctggaactcctgggctcaagtgatcttcccacctcagcctccggagtagctagggcttcaggtacaagccactaagcctggctaatttctttttttttttttaagagacaggctgtgttgcccaggcatgatcttgaacacctggccttaggatcctcccactttggtctcccaaaggactgggattgggattaaaggaatgagccacctcacccagcctgacatgctttcttcttaaagcatggaccaactgcactagtttacctctatcctgcccactccatttactagtccccatagtctagaataagagaaatttgtctgaagaaataaactaagatttctaccacatatatatgttgtgactagtgatatccacacttatttagtggtcagtttataactcttcatgattattttatctgtggtattgacaagatgcttgaaattaccacatgagagctaccactgtaattccatgtaaattaaacaaaatggataagaaagaaacaaagaggtgcttttaaggttcatttggttctttttggtccagagcataagtgtgtgctgattttcctagctgctcaattactgtattcttacttaaaatcatgaagccaaaagctttgttgtgctttaccacaaatccacatttggattagctctcacaggagcttgactgtgtgccagcataagtttgcctctgttcactttgtttgctaaaatccagtgttatgtgttatccctttaaaagattagtttatgcattttgtttaatgaagaaatgataatgatcatctagaaaccttagtggttatactttaagatttcatttctttgccatatgataattggtggtaatcaccagcaatgtaatgactcttaagtgtggacttgataaagttagttgactccatttttttctaataatggaatagcagcaacagagaactcaaggattattaaaacaagagatgagtttgtaagttagaattctgaggtacctcttttaaattgttgaaacacttctagtggatatctgatagattactgaccatttgcctaactttatcttaattgttctggctcacagcaggatggaatatcttgtggaaatttttggtatacataagcggttttatagataaagcgattttccttcatttagagaaataattcacccttctggattttacggtccccttatgttatctcttgcttctcctagctaataatgacttttctatgacacctacatttagcacctggttttaaagagttaaaactaatttatgcatatttgtcttattaagcacaaatcaatttgctttgcttggcagatgggaactactacacgaatggagctatggggctacattctactaagtactctagtatatgggatttaggaaggtctgccaatcaggaagccttcatataggtagtttttaaagagtattttagtcttgaattttccatatctgaatagtgtaagcaggttcttcagtgttagattgataagctccctcagtagaccttttttgtgtggtgtagaacaaagctacgaagtaaaacttattaaaatggagaatttttagacattctgtttctgatttcctttttcatcttggtaccattactttgaaattaaattgtctgtaaaaaccagaatatgataatatttgaaataagcttttcattttatgatatttatatagactgagcaaatcactgtgtaaacaatttgtcataaacccatacataataaacaataaggtaacctttttaaaacctcttagtgaccatcccttgaaaatataaagcttctttcccctatttcctcaccccagactcaaggagtccaactctgaaaatgtgcgccttagttattagcaaaatatccctgcatttcatgcttacaaaggacatatctgataaaaaaattttggccttctaagtacctgtctactgagatgagggtgcccaagtgccaagcatgacatttcatttaaggtaaggaaagatctacccgcccccccccatacacacacacacaaacacacacacacaaaattaataagttaacattttggcttattaaaaagaaaatcccatggggcaacccctagagagggcagatcacgctttgtgctcccatccctctctggaacatcttggtccctgtgaaatcaagttaaagattacttttaaagatctctgaatgagaaagagcaactttgtaggaggttttgagtaatgaaggatgatcagtgttaccctcacctttttttttttttttttttggaatagtggaaagattattgactgcatacctaagtagaaaactaatatttggtttcaagtagatttaattctaatgaaagaaaaaacaagactgaaaagtcatgacattgaccgtcctttatttctcaaaatctcctacaaggctgccctttcttattcaaagagatctttaaaggtaattttttacttgatttcagagaacgaaatgttccagggagggagaggaaaacagtgtgatttgccctccctaggtattgccctatgggattttaaaaaaataaaaaataaataaaccaggctgggcacagtggctcacgcctgtaatcccagtactttgggaggccaaggcgggcggatcatttgaggtcaggagtttgagactaccctggccaacacgttgaaaccccatctctactaaaaatacaaaaattagccggacttggtggcgggtgcctgtagtcccagctactgatgaggctaaggcaggagaatcacttgaacccaggaagtggaggctgcagtgaaccgagatcgcactgttgtactccagcctaggtgacacagggagactccatctcaaataataataataacaataataataataataaataaaccaactacaagccaacatccacaaatatatgaatataacaccaagttcagtgattccacttgccccattaaccctgtttcttttatcttccttgattttttgatagttttatgtctctattcagctataattattttataaaggcttagtttcctcatctgtaaaatggggataaaaacttgtctttcctacctcacagcattttttatgtgggtcaaatgagttttgaaacttgtgagcaactatacaaatacttgacatttatctattaatgaaagagaaagacgttaaaatgccattttctgggcctgaagaacaaaggggttatatatttatgccattttccctagtaattactttccccatgttgtatatagaaattgatttggagtggtaacatagattatatctgatatgcaatgatatcactacaaaaacaaaacactgatagttactaattgaagaatttgggcatgatagtgattatgcatttatggtttataatcagaataatgtacaagaattagaataacttatcatgacatcatttccttttgatctgtcatcgcccaaaacctggaagttctcaaacagtgcttccgtagatatcagcatcacttgtcttgctgagtggtgataaagagtacatataacattggttaccttagtagtatttttcaaaacaatacttaaaaaataattattcaactggtgaaaactcatgctgtttgtgaacagttgtggaaggcttatggctataaggtaagctaaaaataaaaaataaaaagcagtcaggcatggtggtgcacacctgtagtcccagctacttaggaggctggggcgggaggattgcttgagcccaggagttcgaggccagcctaggcaatatagtgagataaaaaatattttaaaaagtaaaaggcattataatgtttgccacattgctgtacagctatgacagattttatattgcctttattttagaacatttgcccagttttccaccttttgctactgctatgtaagcacaaaaggtaagattaaatcctaaatgtgatggtatacaatgctttaattcaacagatatttaccgagtgccttttaaaaaacaagcactgttttaagtgctggagataaagcaatgaaaaaaaacaaagtccctactctcatggggctaataccgtagttgggggaggcaaataaacaaatagtatatgatatgactggtgctgataagcaatatgaagaaaaataaagtaaggtatcatgatagagaggggagggggttggtatattagagaaattggtctgggaaggcctcttaggatgagctgtggacagagacttgtggtactagaatatatgagccaaacaaatatttgggaacagagtgaatacatataattttttctagaagttttttctgtgaagggaaagagagaaatagggtggtagctggcccttgtcctgggtgttgagtatacagtggtgaataagacaggaatagttctggccaggcgcagtggctcacacctgtaatcccagtgctttgggaggccgaggcagatgtatcacctgaggtcaagagttcgagaccagcctggtcaacatggtgaaaccccatctctacaaaaaatacaaaaattagctgggcgtggtggcacacacctgtaatcccagctacttgggaggctgaggcaggagaatcactggaacccacgaggcggaggttgcagtgagccgagatcacgccaccgcactccagcctgggtaacaagagtgagactccgtctcaaaaaaaaaaaaaaaaaaaagacagaaatagttccaacccttacggagtttatcatgtgatggctcagacagttgataaataagtaagcaaaccaatacaattgctagtgtagtcaataataatagcagccttgttctgttggcttagaaatctccataatgcagggaaaccctcaaagcaattttccaaggccagctgtcttataaagtatgcttatctgaagtcctgttaaagatacaaatatttcctaaaagcagtgattaataataggtggtgtactggtggcaaagttccagtgtggcatctgtgaagcatcttgccaaaaaccagtttggggtgttttcaaattaaatcatccatctatgagcactaacaatatctgagaggtggtttggtagaagtggtgggaggaggggggacgttctaagtaggaggaataatgtgatagtgcaaaagcaaaagataacagttgttggggacacagcaaatattctagattcatttacgtggagttgaaaatatgagactcaatatataatgcacttagcgactagaaaaaggttattaaagagcaatgtcttaatctataccagaggaaaacctgagatagagaattaaagggacctaataattaaacctttgttttttgtgtccactgttctttcagtggacataaaacagcctatgtataacaaaaatttccacaagatattccatcctgctctgagccagaacaattaagtaagataaaattaggcaaatagtcagtaatctatcagatatccactagaagtgtttcaactcataagccaaataaattaacattttggcttattaaaaggaaaatcacgtagagcaacccctagagagggcagatcacactgtgtgctcccctccctccctggaacatcttggtccctgtgaaatcaagtaaaaaattacctttaaacatctctgaatgagaaagggcaaccttgtaggaggttttgaaaaatgaaggatgattagtgttacccccccacttttttggtagcagtggaaagattattaactgcatacctaagtagaaaactaatatttcctgtcaagtagatttcattctaatggaaaaagaagaaagaaaaaaagaaaaagaaaaaacaagactgaaaagtcatgacattggccatactttatttctcaaaatctcctataaggctgccctttcttatgcaaagagatctttaaaggtaattttttacttgatttcagagaataaaatgttccagggagggagaggaatacacattgtgatatgcccctttttccccctcccttactacactataaagaactgaagttttaaaacaaggtatagggctgggcacggtgacccatgcctgtaatctcagcactttgggaggccaaggcaggagaattgcttgagcccgggagttggagaccagcctcggccacacagtaagaccttgtgtctacaaaaaataaacaaaattagcaggacgtggtggtatgcgcctgtagtcccagctacacggaaggctggggtgggtgggagatcgtttgagccagggatgtggaggctccagtgagctgagattgcatcactacactccaggcagggtgacagagtgagaccttgtctcaaaataaataaataaaacaaggtgtaatcacattttctgattattattataatattagttgctctcttgttttaaactaaccaaaatgatgggcctggtttagttcttctaaataatgtttaaaagtactacactgtataccagtttattcatttgctatcatatttgctttcttctttgtacctagaaattcaggtgttgcaatttatttgcttttctgagggttactctttttgtgcattggtgtataggtcttgaagagtaagaagtggctgtaaatatagtaccaattctcatattttcctgtgtctctatctttagaaatgtttctgggtttgattaataattcatctattctttttttcccagaagacattgtaatctgttgtttgttatatcaattgcttccctaaaaaattctaaatcctttaatgaaaaaaagatttcagttagggaaggaaatgagtgcttatatatatatattcagttttcaagtaagtccctttaaaagaatgcagggagagagaaaacaggaccaaagaagaattatttttattaactgttttccgaagctcttaatataaagttggcagctttcaaaatgccaactgtggctattgaattattccaaaataagcattcatagtgtcattttaaggacttacatctggtagcaaagtaatagaatcaggaaaatccacaaactttattgagcacactaccttctcttatttgaatatatttcctgctaagtgtattggcagtttactaattagtttgtttattaacatataatgaaactaagttcagtaaagttgtacttgtttgactttgtaagcatgacaacttatgacaagataaagaatccactgtaagtttccagtaatcattaccgtggaaaaaattataattgaacattttacttagaatggaaataaatcttgtttgtaattaggaagttcattacatggctcttctgcagctagagcagtattcacttacacagtgccctcaatccagtttacaaacagaaagagcaacttgtcaaactaaaggacattttagtttgtgtactaaactagcacattgataatgagtatcattttcaagctgtggctgttttactggtctttcctctagcactcagcccattgccctacctgttcatcattaccattgacctaatacaaaaaaagaaatgtttatgaaatttgcaggtgtctaaatattggaaggggcaattaataccatagatcaatgtgctcaatattggccacaggttagattcaaatgaggaccttttatttttatttatttattcatttatttatttatttttgagatgagtctcactctgttgcccaggtgggggtgcagcggcgcaatctcagctcactccaagtgatgcaacctccgcctcccgagttcaagagactctcctacctcagccttctgagtagctgggattacaggcacctgccaccatgcccagctaatttttgtatttttaatagagacagggcttcaccatattggtcaggctggtctgaaactcctgacctcaggtgattcacccgcctcggcctcccaaagtgctgggattaaaggcgtgagtcaccaagcccagcctctgaggaccttttaaaataaactaaaagatactggatattcatggatgaaatgatacaatgtctagaatttactttaaaatactccaggagggagtatttagaacccagaaattggtacatattaatttctgaatgacttgcagggacttgatgatgattacagcttaatgagctggaagagttccccaagtgactagaaatgtagtctagcactagtttccaaattatttcttgcatagttttatactaactgcctgatttcacacttaacaaaactgagcaattttctttctacatagtacaaggcgcttataatcttgtgaacatttctgctgccaaaaagtgacctttcttgccagtgattttgactactcctctcacatccacatagccaccattaatctttcaacagtatcttcaaaaagatagttatcttttatctttatctgttatctgctaaagctatcctgtattcaataaagtgccttcatttgaaattctaattcctttattttgacaaatttgacaacttatgtttatttatatacacacacatttatgtacttaattctgtttttcaacatagtgatagctcttttggttgtcttttgcgactactcttttatccctttttttagtattttcacattcctatcttcaaattgaaaacattctcctcttctctatttcctcagtaatttttttttattattacactttaagttttagggtacatgtgcacaatgtgcaggttagttacatatgtatacatgtgccatgctggtctgctgcacccattaacgcgtcatttagcattaggtatatctcttaatgctatccctcccccctcccgccaccccacaacaggccccagagtgtgatgttccccttcgtatgttcatgtgttctcattgttcaattcccatctatgagtctgaacatgcggtgtttggttttttgtccttgcaatagtttactgagaatgatgatttccaattttatccatgtccctacaaaggacatgaactcatcattttttatggctgtatagtattccatggtgtatatgtgccacattttcttaatccagtctatcattgatggacatttggcttggttccaagtctttgctattgtgaatagtgccgcaataaacatacgtgtgcatgtgtctttatagcagcatgatttatagtccctacaaaggacatgaactcatcattttttatggctgcatagtattccatggtgtatatgtgccacattttcttaatccagtctatcattgttggacatttggcttggttccaagtctttgctattgtgaatagtgccgcaataaacatacgtgtgcatgtgtctttatagcagcatgatttatagtcctttgggtatatacccagtaatgggatggctgggtcaaatggtatttctagttctagatccctgaggaatccccacactgacttccacaatggttgaactagtttacagtcccaccaacagtgtaaaagtgttcctatttctccacatcctctccagcacctgttgtttcctgactttttaatgatcgccattctaactggtgtgagatggcatctcatagtggttttgatttgcatttctctgatggccagtgatgatgagcattttttcatgtgttttttggctgcataaatgtcttcttttgagaagtgtctgttcatatcctttgcccactttttgatggggttgtttgtttttttcttctaaatttgtttgagttcattgtaaattctggatattagccctttgtcagatgagtaggttgtgaaaattttctcccattctgtaggttgcctgttcactctgatggtagtttcttttgctgtgcagaagctctttagtttaattagatcccatttgtcaattttggcttttgttgccattgcttttggtgttttagacatgaagtgcttgcccattcctatgtcctgaatggtaatgccaaggttttcttctagggtttttatggttttaggtctaatgtttaagtctttaatccaccttgaattaatttttgtataaggtgtaaggaagggatccagtttcagctttttacatatggctagccagttttcccagcaccatttattagatagggaatcctttccccattgcttgtttttgtcaggtttgtcaaagatcagatagttgtagatatgcggcattatttctgagggctctgttctgttccattgatctatatctctgttttggtaccagtaccatgctgttttggttactgtagccgtgtagtatagtttgaagtcaggtagtgtgatgcctccagcttttttcttttgccttaggattgacttggtgatgcaggctcttttttggttccatatgaactttaaagtagttttttccaattctgtgaagaaagtcattggtagcttgatggggatggcattgaatctataaattaccttgggcagtatggccattttcacgatattgattcttcctacccatgagcatggaatgatcttccatttgtttgtatcctcttttatttcattgagcagtggtttgtagttctccttgaagaggtccttcacatcccctgtaagttggattcctaactgttagaaccaaagacaaaaaccacatgattatctcaatagatgcagaaaaggcctttgacaaaattcaacaacgcttcatgctaaaacctctcaataaattaggtattgatgggtcgtatcttaaaataataagagctatctatgacaaacccacagccaatatcatactgaatgggcaaaaactggaagcattccctttgaaaactggcacaagacagggatgccctctctcaccagtcctgttcaacatagtgttggaagttctggccagggcaattaggcaggagaaggaaataaagggtattcaattaggaaaagaggaagtcaaattgtccctgtttgcagacgacatgattgtatatctagaaaaccccattgtctaagcccaaaatctccttaagctgataagcaactttagcagagtctcaggatacaaaatcaatgtacaaaaatcacaagcattcttatacaccaataacaaacagagagccaaatcatgagtgaactcccattcacaattgcttcaaagagaataaaatgctcagtaattttaatcacatagttctgaagacactatctgcatattttggctcctacttttctttctttttactttaccaaatctccaatttctcatagtcactatttcaatgctaaaagtgatagaattatttttccttttatccccaaacccatcagtaattccctcctcattagttgaaatataattattttctgtttccctcatcctcattcccattgtcttttccccaatactttctctttcataatatttgtcagttttctcatttctattttttaaaagcttcaattcatacttgaactttttttcatatcagataacttcttatctctataatctgcacatactgccattgccaaaatcttctttcttgaactttgccctatcaaaatcctcagaaaatttctaattgatgctatgctgcatttgtgactcctgtttttactttttatcaattcctgtatctactctcctatcctttcctttcagctaagccaaatttctctttatgtctttgtcttatctcctactcttctagtttacctccttctatgcatgtaacttcctaatgtgataggaagtgatgtgaggcaaatgtgagcatctgccaatctatctatattctcattcaaaccttgcttaaaatctcaattctttttaagtgggtcaaaataggaagagagccaaaagcctggtttataattgaattaaatttttcttaaaaatctgtattctaaattaaagggaaatgcctcataaagcaaaaccaacactcaaccaatcagagcttccagaaaaggaaggtaaatttatatatttcagccatcccattgatatggttaaatcaacaaactatatccttattgtgcagcaatatgttgaaagttatggatataaacacagagacagaagacatggttattgtcctcagaggacaaataatctagataaagagacaaaaattatatacatgaagctcttagaaagtagttataataaccagcctaatatatgctaggttgtgtagtacaggttaaacatcactaatctaaaaatgaaaaatctgaaatgttccaaaatccgaaacattgattgctgacatgatgccgcaaatggaaaatttccacacctgacctcatgtgacaggttgcagtcaaaactcatgcataaaattatttaaaatattgtataaaattatcttcgggctatatgtataaggtatatatgaaacaaataagtttcatgttcagacctgggtcccatccccaagatatctcagtatgtgtatgcacttaatccaaaacctgaaaaaatctgaaatctgaaacacttctggtcacaagcatttcatataagggatactcaacctgtatagactctaagtcctatgaatattcagagaaaatggaaagtattattgcttgggatagccagtgaggatttcataggggaagtgggtcttgaagaaaatgtagaattcagattagttggactggactagaagactttcattaggatttctttttttttcattagcatttctaggtaaaatgataattgcttagcaaagaccctatgggagaaattaactggttgtttaagaaaacagtgaactttgttctaggaaatagtaggaaatataattagattattaaactggaactaattgatcaagaaccttgaattcctaattgaggaattaagaattgttgaaaagaaaatccctgtacagaagcattttatttaatcaaggttttatcttgtttaaatatctaagattttcttaaataataatagtattaactaatatcgggtgttttactgtgtgctaagcattgctctaagtgcgttaaatgtaacaactcatttaatctttacaacagccctttgtagtaggatctgttttaaccttattttacaaatgaggatgcagaaagggtaagtactttaacttgctcaagttgacacaagcgacagagccagaatttaaacccagttagtctatagtactatattctacattcttatctaatatacatacaaccttatgaacgagatacataagtgctgcagatacattttgagatttggacaattgaagctgacttaactcttttattgaaagataattttctcagatactactcacattggcatactgtaatctctctttatcccaaatgtattttttctttaagaaaaatctctgtaaggactctatgggctagaaaagttttaaaataaatttattagtttgttatatgaagtgatacagatttgatttatctcttgtaaagtccttatttcaacaatctttctattacaacagggcttctggttgggactcttgattcagtcttggactctactgctaaagtagctccatttcgcatcctacaccagacaccagattctcaagtttacttgtcaattgcatgtggtgagtatgatttttaaaacataattcaaattaaataagggtactacaaagctgagtattcatatttatttatagtctgtagttgctttgagatttaaaaacaaattaaatgtgcaactttactttgagagaatagcaagacctctatttttaaaggatatgggttattaagttttttttttttttttaatccattggtgtgagggacctgaagcatgtggtctagcagggctgattctgcacagattttggtcagtgttactgctatataactcctttcttcaacttctgctttatccaactgctgggaagatgagaacttctccatgaaataaattgtttcattactaataactcaaatgagaagaatctgaagttatctgtgaacccaaaacataatgactcctaaggaagtataagcctggaaaattaaaccttttttattcattcccaccttctcagaaaaagcatcatatccttgaaatatgaaggaatgtcttacagttaatgttacatattcattcatgccagggtggttcagatgcttcaacatatatattatgggtagaaaaggaattaggataatcctttctaataaagcaagtcaaaataaatttttaaaaagctgcattgacagtttcttacttccttttatgatgccattataatgttggtctaaattagaatcccagatttctagcctttttgatattgaaaaactgcctttcttcttatccccctctcttctaaagtagatatattataattttttaaaaagaacaaaagcacatgagtttctggaacattcatatgtgtgaacatatagcatacaattaattttttaggttgtgtggcttgttttttatatttccgcctaaatttcttttagtgttgccagtgagtctttcctcctggccctcttaaagtgaatgtcacttaacctaaatgaggttgacattatacctgctgacatcacgagaattctgtaatctcaactctaaatctggttagtaaaaattattttttttaaaaaaaggcctttctacttaaataaagatgattgtataacttatttcccccaaattaacctgatgcagaaatagtgtagttacctactaatgaagcttccttataccaaaagaatcaaacttaaggccttaacatttcccccatggcttttatttgtggtccattaaagacagttattactcttgctatggtgacttagtagcatgaataaaattctgattgaattgtaggaaataggccatttgcaatgtcaacaaattttttaatatgccagtctccatatattataaaatatactaaaaagtcagcatatttcttttgaatatttatataatccatagtgctgagaagactttaatggtatgtgagtgataggaagagattgatagatactgaaatattcttcaagtcaaagcaactagggctaataatgtttaatctcaccctcagcaaacctcttaacactgattcagcgggtcacatggatttaaccttgctacagaatttctaacctcctgtatgaaatttctgtaagtttactaggtcttttgatgaatggggttgctctgagcaaaggttttgtggcttctgaaataagtagagtggccacagttaaaatctacatttacttagcatgcataggattgtcacatacatgctgttttcagccacacatattatagacacagcactaactgcattatttggagaccaaggattgaattacacattatgtattttctggtactctacatattttcttaaaagatactggttattctttaggcaccagttactagcatcttgttttcagaattttatatattttctcatgagctggatttactttactcccctttcattaaatgttttgttctttctatttatgagaagtactgttcatgcccacatagagggataaagtaggaataaatgtaaatattttactcctttatgaccatcattttttaaagtgaaaatgttatttctttttaaactatgcttttaaataacaagagcagttttattgtggagttttccttaagtgttttattttcttgtgttattaatcaggagccaacagagaagaaataaccaagcattgggattggttggaacaaaatattatgaagaccttatctgtatttgattcaaatgaagatattactaattttgtacaaggaaaaataagagtaagtggcacggatatatcttgtagatggagtgccaaaacctttgactctcatgtatgaggatcaaagtttgcatggaaggtcattgtttcactggcacctttcaggattggtagaaacgaacatatgaatttcagaatcagtgtgctaaagaaaactgtaaagtctttagcacagggggagattgatagatattgaaatattctcttaaaacatactggttattctttaggtaccaattactgacatattgttttcagaattttatatattttctcatgagctggatttacttttttcccctttcattaaatgtttgtctttggtgcccttgtgaatgcttttaggggcatttttgtttcaatatctcttgagttttgagttgaataaaccatttgttcattcaaaaaaatatatttagcacttgtatttgtagtagttccttatgaggcattcagaaaaaaacctaagcacaaaactgaagaaaatttgcttacctctgtcctaagagaattatctatgtacacacatatgatatatgtacctgtatagatatatacagtcgtccctaggtatctatggggattggttctggccgccgctgtagataccaaaattcacagatgctcaagtctcctaatataaaatggcatagtatttgcatataacctatgcacatctgcctatatacctaaagtcatctctagactattcattcctaatacaatgcctatgcatcacttcatttgagtggactctgcatagtcttcggtgcatggcaaattcaagttttgctttttggaactttgtagaatttttttcccaaatattttcaatccctggttggttgaatccatggatgaggaacccatggatatggagggctgactgtacaattgtattcaatcaactgtttgaatgtatgaaatatatttttgttggtaggtgatgaattttcagaaaatattttgtctcctttagggattaattgctgaagagggaaaacattgttttgcaaaagaagatgatcctgagaaatttcgagaagcccttttgaaatttgaaaaatgttttggtttaccagagaaggagaagttagtgacctattattcatgcagttattggaaaggacgggttccttgtcagggttggctttatcttagcaccaactttctgagcttctattcttttttgttgggatcagaaagtaagtggtttctattgcttactatggccttgaatttgctgtctgacctaccaactctaatgatgttaggttgtaaataaaataataggattgatattaaaggtaattaaactgtacaataaaaagtttatttcatctagggaaagaactcttttaagactggttgcttaacataaaaccattagaagtgtatatagaatgccttgcatatcgtgggaagtgagtcagtattaaatgatgatctggcatatgactgctttcaattccttgttatgaactacctacatgctttagtctgtgttttaatctattttaaacatacaatttgaatatagtggccatagtacctaatggcccacatctcactttgtagctacaaagaagaatcaaacagtgctatttatagcatacaaacagcttttacattggtagttatataattatgtaattatataaagagatagatttaaatatcaaatcagaatcattttttttaaaaattatctaaaattaaattgggcacagtggctcacgcctataatcctagcactttgggaggccaaggcaggaggatcacttgagcccaggagttcaagacgaacctgagcaatatagtgagactctgtctctacaaaaaaaaaaaaaaaaattacattagctgggcatggtggcacatgcctgtagtcccagctacttggggggactacttgggatgtgagaatcacttgaacccgggaggtcaaggctgtaatgagccatgatcatgtcacctcactccagtctgagcaacagagtgagactctatctcaaaagaaattatttaaaattagatctcttcctggaatcaccaattcttgcacgttcatgttgatgcttcaaatttttaactaatcttgaactctaaactattttagctgtttatagtatttttcaagggattaactattgtttcagaagaactgattaataaacataaatcactatgaaaatttaatcatacctgcttatacctcttatttgcagtaaaactcattatctcctgggatgaagtctcaaaacttgaaaagacttcaaatgtcatactgacagagagtattcacgtgtgttcccaaggagagaatcactacttttcaatgtttttgcacattaaccaaacataccttcttatggaacagctggcaaactatgccattagaagactttttgataaggaaacatttgataatgacccagtcctttataatcctctacagatcaccaaaaggtattcaaagcttaatttttagttttcaaagtattgtttgaccataagaatgaagatagtattgcttaccattaaaagttaactcttctatattatatgatagggttttttttggagttgattgtgggtgtgtgtgtgttttgtgagtttattcatatgcattacataaatagtacccttctctccaggaaatttaattgtaagaaataatagaagttagatttgaaaattatttcttgagattcagataggacttgccctggaatgcttttagaaatgcagagatttttatgtgtggttagtctaactctaaatttctctatgaatagtctagacagtttgggtctgaaattgttaaacatattgtttattttttaaaataacttacagaaaacattttttaatgaagaggcaagttcgtggagtcagtggagcatggactttagaatgaaagtagaacaacccttagacaagtcatatctctcaggacctcagtttcctcatctgtcatttctacctcagagggcacttatgaggaatgggcatgatatgtgtgaaagcactttgtaaaatataaaatatgaggcaaatattaatcattattagtgcctccttcagaagtatgtgtctgatagctgtttgccattatatttggtttgttgaaactgaccagatatcttttatcctgctgaacattctgaacagttgactaaaatgagcatgccaaaggggaaaaggagaggagatgatccagaaatagctagtgaaagcagcttctggcaaggaggatgtcagtatagactatatgggaaagtataagaggaacctaagccaaagtcctatggatagaccagaacaagtgacctagaaggttgtatgatcactacatagccctcattgggtacagttgttcctcttacctgttcctaaactattcctaaaattgatatacatgaggatttgtttgtgagcctccctgcttttatggaaattagatcagcaaggtaaattttttatacttcagtaccaaaactaggtctcagtatgcatgatttataaatagaattctataaggattaagaatcctgtttgtattatattataggtgggcgtttgtttttgtatttcatttctttattggcaaccataaacaaactgttttgccattttatttcccttaaaatacagtctaaaaggctatcaatgagttattcatcaccaaatcggtatttaattaagatataataaatccatttttgtctgtgtgcatttttaggagagcccattgaaaatcgtacatatctacatctttttttctagtaagttaaaaagaacagtaatttattgggacttagtctccaaatggcttttttataaaatggaatatctttattgctctgcttattgtttttacaaatatgtattacttttatagtttaaacaatacagaagcacagtaatgatagttaagtttagcgtatatccttctaggctttttaatgcatgaatttataaatatttgcaaaaataggtctggacatcacacattgttctacaatctgctttttttctcttgtatcatggacaactttctattcacataaatggactttattttatttaaataatagtgaacccacaaaattgcaatttatttgttttattagctttcccagtttgaaaaaaataccatttaactgaggtaaaaattaacatggttgtgtttttctgttcatgtttatccgaagtattttgaaagacatgatgaactaccacatatttaaatagtatatgcaggaagaatgaatttagttttagctttgttggatttgagttagaacttgcattatttacttattatcccagatggcattgctgcttaatgcaattgtttcgtgtgcctagaaaaaattatactatttaaagcaattgctttttacacaaaggctacatttgtctatcagttaataagccctctgtatttattgacacctatcctgtgcccaacatagtacaagcagtattattttatcatacttctactttagattttttaaaacattcatttaaaattttacttcacttaatttttaatatcgtctttaatagactactctttccctctaaatttttatgccacaaattttcattattttattttacttgaactgggtaactcgcttgattttctggtaaccagataggaacattgttgtcttccaggattgattttaaccatagtcacatattatgcctatatgataatataatagtcttctaggaaatcaccccttagagatagtttgaagacctacatgatctctaacttttgtgcattttaatctactaataaaatgaaattggaagaaaagaacaaacaaaaggagtttgcaaggaatcagtgtatttttttctatttcagaatttgttgaaaaatatagcatttttagtgtttaatctgtgtgcacagtgtatgtagattagtcaatataggcatatgtataccttagaattcatttctaaaaattcatttgtgccttatcccattttttctttcctacagaggtctggaaaatagagcccacagtgagcaatttaatgccttttttaggctgcccaaaggagagagtttgaaagaagtacatgaatgtttcttatgggtaccattcagccacttcaatactcatgggaaaatgtgcatctcagaaaattatatctgctttgctagccaagatggcaatcagtgtagtgtaatcattccactacgagaggtaatgtaaatttggttacatatcagtttttagtttgaaaatgttatccttcacagagtaaaatgtcctttaattctataaattattaaaacctcaagatgcaatatccttttagtaatttaaaataattattcttcagaataagagtacagccttctgagatattctcagttccatttagtaaagtctttttttattattatactttaagttttagggtacatgtgcacaatgtgcaggttagttacatatgtatacatgtgccatgttggtgtgctgcacccattaactcgtcacaacattaggtatatctcctaatgctatccctcccccctccccccaccccacaacaggccctggtgtgtgatgttccccttcctgtgtccatgtgttctcattgttcagttcccacctgtgagtgagaacatgcggtgtttggtttttttgtccttgcgatagtttgctgagaatgtcatacatttttgaatgatcaagctccattttgcattaacctaaatgcttatcttgtttttaaattttaaagttttaaaattttcactttcagtaagagctgtaagactttactaaatggtaaagttagactatcacttttgatgtactctgtcagaaaaaaataacattgacatcttttacgtaagtcagaaataaattgttggtatttgatactgaatttttacatttgtactgtcatttttaaaggatacatgttagacctttttcttgagaagtgaaataacttgcactgaggttaattgtatgattggtgcaactagtacccaaagtctatttcttaataagtcatactatagaccaaaacttttggccacaaaagagtaagccaaacacattttacttgaaggtgtcaacaataaaggaaaatttaattgacctctatgtttttcaccccctaggtcttagctatagataagacaaatgattccagcaaatctgtcatcattagcatcaaaggaaaaacagcttttcgcttccatgaagttaaagactttgaacaactggtagcaaaactcaggctcagatgcggagcagcttcaactcaatatcatgatattagcacagaggtaattaattatacagcaatcaaatcatttggaaaaaaaggtgtgtgtttagtgtagcccattcttcaagaggaattcatagtacctttcctatttatgcccaggggttttttttaaagatagaatctaagaaattatattgtctaactcacatccttaagcagaagtgagaattaaggactttattcatttttaggaacccatacattataaaattactataatttgatctttcttttactctatttgctgtttaccatataaatataccttgtactttcacatagtttggtttttaagaagtcaaaatatatttgagaattcagtgaggcctcgaaaaaggactcctcttactgttgcaaagacatagcaattttaaacctgtctggatatcttttatttaatatcttataggtcagccttatttacataatctggccaaaagcaaaatagtggtatatctgtttactagtaaaatattagagaggacagagaaatcaggaaagatccaaaattgacaccctaacatcacaattaaaagaactagaaaagcaagagcaaacactttcaaaagctagcagaaggcaagaaataactaaaatcagagcagaactgaaggaaatagagacacaaaaaacccttcaaaaaattaacgaatccacaagctggttttttgaaaggatcaacaaaattgatagaccactagcaagactaataaagaaaaaaagagagaagaatcaaatacacgcaataaaaaatgataaaggggatatcacgaccaatcccacagaaatacaaactaccatcagagaatactacaaacacctctacgcaaataaactagaaaatctagaagaaatggataaattcctcgacacatacactctcccaagactaaaccaggaagaagttgaatctctgaatagaccaataacaggagctgaaattgtggcaataatcaatagcttaacaacgaaaaagagcccaggaccagatggattcacagccgaattctaccagaggtacaaggaggaactggtaccattccttctgaaactattccaatcaatagaaaaagagggaatcctccctaacccattttatgaggccagcatcatcctgataccaaagccgggcagagacacaactaaaaaagagaattttggaccaatatccttgatgaacattgatgcaaaaatcctcaataaaatactggcaagccgaatccagcagcacatcaaaaagcttatccaccatgatcaagtgggcttcatccctgggatgcaaggctggttcaatatacacaaatcaataaatgtaatccagcatataaacagagccaaagacaaaaaccacatgattatctcaatagatgcagaaaaggcctttgacaaaattcaacaacccttcatgctaaaaactctcaataaattaggtattgatgggacatatctcaaaatcataagagctatctatgacaaacccacagccaatatcatactgaatgggcaaaaactggaagcattcccttttgaaaactggcacaagacagggatgccctctctcaccactcctattcaacatagtgttggaagttctggccagggcaattaggcaggagaaggaaataaagagtattcaattaggaaaagaggaagtcaaattgtccctgtttgcagacgacatgattgtatatctagaaaaccccatagtctcagcccaaaatctccttaagctgataagcaacttcagcaaagtctcaggatacaaaatcaatgtacaaaaatcacaagcattcttatacaccaataacagacaaacagagagccaaatcatgagtgaactcccattcacaattgcttcaaagagaatagaatacctaggaatccaacttacaagggatgtgaaggacctcttcaaggagaactacaaaccactactcaaggaaataaaagaggatacaaacaaatagaagaaaattccatgctcatgggtaggaagaatcaatatcgtgaaaatggccatactgcccaaggtaatttacagattcaatgccatccccatcaagctaccaatgactttcttcacagaattggaaaaaactactttaaagttcatatggaaccaaaaaagagcctgcatcgccaagtcaatcctgagccaaaagaacaaagctggaggcatcacactacctgacttcaaactatactacaaggctacagtaaccaaaacagcatggtactggtaccaaaacagagatatagatcaatggaacagaacagagccctcagaaataatgccgcatacctacaactatctgatctttgacaaacctgacaaaaacaagcaatggggaaaggattccctatttaataaatggtgctgggaaaactggctagccatatgtagaaagctgaaactggatcccttccttacaccttatacaaaaatcaattcaagatggattaaagacttaaacattagacctaaaaccataaaaaccctagaagaaaacctaggcgttaccattcagtacataggcatgggcaaggacttcatgtctaaaacaccaaaagcaatggcaacaaaagccaaaattgacaaatgggatctaattaaactaaagagcttctgcacagcaaaagaaacaaccatcagagtgaacaggcaacctacaaaatgggagaaatttttctcaacctacttatctgacaaagggctaatatccagaatctacaatgaactcaaacaaatttataagaaaaaaacaaacaaccccatcaaaaagtgggcgagggatatgaacagacacttctcaaaagaagacatttatgcagccaaagaacacatgaaaaaatgctcaccatcactggccatcagagaaatgcaaatcaaaaccacaatgagataccatctcacaccagttagaatggcgatcattaaaaagtcaggaaacagcaggtgctggaggggatgtggagaaataggaacacttttacactgttggtgggactgtaaactagttcaaccattgtggaagtcagtgtggcgattcctcagggatctagaactagtcataccatttgacccagccatcccattactgggtatatacccaaaggactataaatcatgctgctataaagacacatgcacacatatgtttactgcggcattattcacaatagccaagacttggaaccaagccaaatgtccaacaatgatagactggactaagaaaatatggcacatatacaccatggaatactatgcagccttaaaaaatgatgagttcatgtcctttgtagggacatggatgaaattggaaaccatcattctcagtaaactatcgcaaggacaaaaaaccaaacaccgcatattctcactcataggtgggaattgaactatgagaacacatggacacaggaaggggaacatcacactctggcgactgtggtggggtggggggaggggggagggatagcattgggagatatacctaatgctagaggacgtgttagtgggtgcagcgcaccagcatggcacatgtatacatatgtaactaacctgcacattgtgcacatgtaccctaaaacttaaagtataataataataaataaataaataaataaataaataaataaaatattagagaggacaaggaggattttgatgtttaatatgtctctcatggaaatgcagacaggtcaaattcaaatgaattttcttttacaatgtccaggaaccccaagttttaatagattgatacaacttatcaaattatagctatttgtattttaattaaaattcaaagaaaaactaaatgtgtctttattggctatattattttatttgaattggagtatagagccttttactgctatctccagagtagagattgaaaataatatgctaagtcaattataatgcagtattgataaaactaattttccctttgataattaaaaagcacaatgaaaacatgtaattaaatttttttttccatctcaattccagacgcagaatttctacattggccatcaagggttttccttgccccaactttattatctctcattctcttttagtatgtacccaggatattccttagtttgatgtgggaatacaagtaaaatctgaccagccttagtagttttctctcccaatgctcccaaattcttacttatatcatgttttccttgttctgttctatttcacattcagtccacgtgttagcttcaaagctcaacatatctttctttttcctttaatttgcttttccaaaacctgaagagctgtaactgttccccttaaaactttcatgtgcttttagtagctgaatatgctcagttgtcaagaaaggattttgtttcaaaatgagtttaccatctttccaaatatgcatcagaattctacagttttctagtttctcactcgtttttagaggttttaataaatatatgtacaaaataccagctagtatactatctgcttggaaatatgtatttttaaattgccataatattctgttttcacttaagatttttatcttatcaatgatgaagaatattgacccattttagtatctgtatatatctagttttaataatagtacacgtaaaaacttagtaaagagaaagctttttaaacaagagctagttccatttgatttctaagtaacagaaattatagctatattcttttataactacacttttactaaaacgaagagaaaaattgcattctataattttaataaacctggtgacttttgtacaaacagcaagactttttattttaaatctccaagagtctaaatcaacaagtctaaatatgaatacaggaagtactttaggaaatctttcctgtgagaatgtcaaagacattatacaaagaacaagtcctaccagaagtaattgaaattatgcatgagtaccagttctatccaagtttttatatgggtatatatttaaatgttccacattttaataagttatactaaaatctgggcatataaagagatttagtaaaattctaataaactgcttggaaaaatacatgaatcttttactttcattgacacatataatcaagaactattactagataaggtaatttttcaaaactactcaatgaaagaaaaatgggccctcttaggttagttttaagcaaagtggcctaagaatggaaagcactactgaagatcccttgcctgatgcttttaaactacattatgaatgaattgtagaaactatggaatgtcaagaaaggtagtaattgagtttatgccttaaagtttttagatgggcaaataagtatcttctacatattatcacagaatatgtaaacataacttgtttcatatagttagtaagatagttactaactgtatgtaatatagttattatcttaataagatagtttcataaccaggactatcttactaagtttttaaatagaagtaatgggtttcctacatgataatgtagatcaaaattgtagtttaaccaacataactgattttttcttgccttgataagaataaggtgcttcctatgaccataatataaatttggaaaatgatttttagctgtgggggtagatttatttctaagttgggaaaccagaaactattaaaaatgaaattcacaccctttaaattgtggactatgaacaggatcctatttaagataagcttctgatatttgagaaaagcatttgtttatatttttttgttttaattattggttttacaggtcaactctggcccccaaaccaccatttattataccgagtttatgaagtattctaatttaaatatagtattttgtagaaatttacacataaagaaatgttaatctttgctttgtctttccttcacttttagagccatatgataattgtaaaatcaatgtcagataataaaaatgaaacagattaagaatacctgctatagagttaacaatctatgttgctttctagatgtgattggattttgctcaggcactaaaagtctgatgagtgccaagtttatttgtcgtaagtgtgaacacccaaataaatggagagaaatatagatatttatccaagtatatatataaaacaccatgggtaaaagtttccattcaaaagagccagagcaaaaatgttcaaaaactttaagtttagttccttgaataatctactttattacactcttcaaaatttcaaacattaaactaccatctttgaaggtaaatgttttttattttatttcttttgtcatttttttaaattttctaaccacctactgcctgttgatgaaggtgaaggttttaacgtgactttatgaatacttaagaggcaataatggatagaactgacatacttgtcatcactcttataaatttatgtttagggtttcattgcttaagaggttatttttttccctctgggatacttttcctgtagtttagaacaatagataaactgatgattcagtcatttaaattaaaggaatgtgctgtgcttgagatccagactacaaccatgaattttccaacctgtatttgcaaaaatgtaactcctcgttcaaacagctaaacttaatattaagttgtcaagtatgtgatttgtcaaaataagcatttaaaaaaaaaaagaagggaattgttgcaatttgagacctatactctctaatcattaatttttcctttattggcttcttctaccttaccctttcatttacacattgatttgaatactccttaactttccttgaatcctatctatactcatctgttctcacgctgctatgatgaaatacccaagactgggtaatttataaagaaaagaggtttaattgactcacagttctgcgtggctggggaggcctcaggaaacttacaatcatggtggaaggcacctcttcacagggtggcaggagagaaaatgagtgctgagcgaagggggaagccccttataaaaccatcagatctcatgagaactcactcactatcatgagaacagcatgggagaaactgcccatgattcaattatctccacctagtcctgcccttgacacgtggggattattacaattcaaggtgagatttgggtggtgacacagagccaaaccatatcattccacccctggcccctcccaaatctcatgtcatgtcctcatatttcaaaacacactcatgccctaccaacagccccctaaagtcttaattcattcccatattaacccaaagtctgggtccaaaggctcatctgagataaagcaagtcccatccacctataagcctgtaaaatcaaaagcaagttagttacttcctagagacaatgggggtacaggcattggataaatacactattccaaatgggagaaattggccaaaacaaaggggctacaggccccatacaagtctgaaatccagcggggcagccaaatcataaagccctgaaatggtctcctttgactccatgtctcatatctaggtcacactgatgtgagaggtgggctgccacagccttgggcagttccacccctgtagctttgcagggtacagcccccctcctggctgctttcacaggctagcattgaatgcctgcagcttttccaagtgcaaggtgcaagctgtcagtggatctaccattctggggtctgaaggatggtggccctcttctcatagctccactaggcaatgctccaatggggactctatgtgggggctccgaccccacattttccttccatactgctctagcagaggttcccccatgaggactccacccctgcagcaaacttctgcctggacatccaggcatttccatacatcctctgaaatctaggcagaggtttccaaacctcagttcttgacttctgtgcacctgtgacttctgtgcatctgtagcccaacaccatgtgtaagccactaaggcttggggcttgcaccctctgaagcaatggcccgaactgaaccttggcctcttttagccacagctggagctgaagcagctgggatgcaggggaccatgtcctgaggctgcatagagcaggggggccctgggccaggttcacgaaaccatttttccctcctaggcttccag

SEQ ID NO: 922 - DNA, 30068 bp, Homo sapiens
  source 1..30068: mol_type = other DNA
gagtattgaggggcggggcggaggtggagatccggatccggagcggctgaaaggcggaagtggaggccggagcctgggacaccgccggcggggagagaagcggatcccgtccgagccccggccccaagtaacgccgccgccccggagccgccgtgagtatgcttgtcccaggacctggtgtctcgcctgcgttgaagcatctccagggcagcccttcctcccgcccagccccagtttagggggatactgacccctcccccgacccgtagccccctcttgaggggctccccaggcgtcgggccataggaggtggggagcttctttccttagcttacctgcctttggtgagccttaaggaaaccgctatgactgtcctctggcctgtccattctagttgtgggagagaggtaccctaagttccgctccccctgcttccagaatcggaggatctttgctaggtgtgaaggaacctgtccctcttctcttttagaagtgacagggagtgctgtctgtcgccgttttccttcctcctgtcccacaaaaccagttgtcccctctagccctagaggaatatctcgatttcctttgggggaggggggtcgtctgggtgagaccgttccacacgcacagaagtgtgtgtgcgctcccgcaactccttacttcctctctttcctcaagccagagaaccaaccaggacctcagctgagtttaaagtcacttactagaaatgagctgttttcctgttttgccccttctgtctcccagccctgtcctctagttatgttgttctttgagtgtctctctctttctgcctctgaagaatttagctgaggtttgctcaatcctagctacagatcacagatcagggtggatgtgcccattcattatcttctttcccctccccccttgctccaggctcagctctgtcctcccagagcacgtgagtggtttcccagccgcctcaaagggactgcttttcttgggactgctgtccgtgtgtctatagggaggagaataagacccaaaatgaggagtctggaattgaagggccatctctttcccactcccaaacacacacacatacacctccctgagcaacaggtccacaccacgccagggtctgtctgcaatcccttcagggcttggacttattactgaggactaagtcaagatcacaatggcagttctggatttttaattgtagcctgaggaattccgatacatgccagaaagtgcaggttccctcaaccatattgactgatccttgtctgttgcttggggcttaggtgtgtgaaatagctgctgtctcagaccaagctttgttatgtggccaaagtacaggccggagactgtaccttaacgaggagtagcctggctctgaggccatgactgacccttgctatctacagtggaggaagggacggaaagccgtgcagtttgtgggaacttctgtagctcttcagtgttctgggctacctttaccaccctcgcttgccacttaaaagtgctgtgttttttggccttgaggtgtgtttgagggcttctggacagtggctagtatctgattcctacagtcttttgagtagagctaggatgtactttcttcacttttttgtttgtttgtttttgagatggagtcttgctctgtcgcccaggctggagtgcagtggcgtgatcttggctcactgcaacctctgcctcctgggttcaagcagttctcttgcctcagcctcctgagtagctgggattaacaggcgcctgccaccacacccggctaatttttgtatttttagtagagatggggtttcgccatgttggccgggctggtctcgaactcctgacttcaggtgatccacccgcctcagcctcccaaagtgctgagattacaggtgtgaaccaccgtgcccggcctacttatttcactttttatcggacaacagaagaagccttccttattagggtcaacagctggatcacaggctctgtatctgtgtgggttcctttggggttcattggagacttcttcaaccaacctagtttctctgatctggtcagcctgggcatctgaggggcagggccagagaggcctgactgctcactggccattggtctctgaccagacttaggtcttcaggagtagaccgcagtttgtcactcttcaggagtgctgggatgaggccgaccagccttctgaggagaccttcttttctttgtctggacatgctctcccagctctgactctgaaacgactttttttttttttttggagacagagccttgttttgtcacccaggctggagtgcagtggcacaatcttggctcactgcagcctctgcctcccgagatcaagggattctcctgcctcagcctcctgagtagctgagattacagccatgcaccaccacgcccagctaatttttgtatttttagtagagatggggtctcaccatgttggccaggctggtctcgaactcctgacctcagatgatccacccacctcagcctcccaaagtgctaggattacaggcatgagccactgcacccaacctgaaacgactttgaaggggaagctctgccatttagagagacgaggcaggccccagtgctttgggtcgttatgcagccacttctggcacctagaaattatagagtccaagcagaggtctgactctgcctggcagagagagcgatggctccgtgtgcgacagaacccctcctttctgatgctgttcctcccctgccctcttgcctctcacaattagagggctgttaaactgtagagggacagtaacactaatttttaaaaatcattttaaggttgcaaaattattttcatacatattcctcataggtgccttgggaaatagtggggcttgtttccccactttgtttttaatttttattattacttttttttttttgagtaagataaggcaagtgtccctgctttagaagggatgcagaaggaacttaagtagtttgcctaagatcgatcatacatttagaaagtagtagagctggggcttggatttggggtcagatgtgacctgatctaacagtgggcccttcttcggcctggtttgttcgttaaatgaatgaacatgcagactgagtgcgccacggcacaagggcagactcttaactctttagccctcctcatcactagcgctcctctgtttttttgtcttccccagcgtctacccgacctcctgtcttctctcttgacccctttcacctctgcctctgaggaccaaaacagttaggagtcccaagtcagtactcttcagggcctgagagtttgctgacatctacatgtcattaatttttctgggaacctgaaagtcctaatggctagaaaatgaaagttaaagtgagtaaactcaggggtcccactgggcagggttaagggggaagcaacagagcgggcctctggttagtcctctgtttctcctgtggtgctgcctgctgcttgcaagtgggaagaatgtggcttgccaccaggagctcctgtcactagaatttacatggaaacagagcaagatcatacatttaaattcagccccaccaagcaagtacttcttagaccttctacttctttttttttttttgagtcggagtctcgctctgtcgcctaggctggagtgcagtggtgcgatcttggctcactgcaagctccgcctcccgggttcatgccattctcctacctcagcctccagagtagttgggactacaggtgcccaccaccacgtccggctaattgttttgtatttttagtagagatggggttccgccgtgttagccaggatggtctcgatctcctgacctcgtgatccgcccaccctggcctcccaaagtgctgggattacaggcgtgagccactgcgcctggccagaccttctacttctaacccttgcccagtaaacaggcagtgtggtcgggtggaaggcactagaacttcagaggcagttggacctgagttctcatcctgattcccccacttaccagttgtgtgaccctgggcttgttacttgacctcactgagcctgtgtttcttctggtaaaatggggatgctaaataccttgcagaattagaaacaaagaaaggagctagtccagtgctggcagactggatgcccacaaaatagcagttgcctctgatgggtaggtaggggtttgaaggttctttttttttttgaggcagtctcattctcattctgttgcccaggctcactgcaacctccgcctcctgtgttcaagcgattctcctgcctcagcctcctgagtagctgggattacaggcacctgccatcatgcccggctaatttttttttttggtatttttgtagagatggggtttgaccatgttggccaggctggtctcaaactcctgacctcaggtgaggtgatctgcccgcctcatcggcctcccagagtgctgggattacaagcatgagccaccgtgtctggctgatttttttttttttttttttttttttttttgagatggagtttcactcttgtctcccaggctggagtgcaatggcgtgatcttggctcactgcaacctctgtctcccgggctcaagctattctcctgcctcagcctcctgagtagctgggattataggcgtgtgccaccatgcccagctaatttttgtacttttagtagagacagggttcctctatgttggccaggctggtctcgatctcctgacctcaggtaattgtgcccagcctcaacactgattctgattcaacatgtgtaccaaatgtatgctggggctgggcacagtggctcatgcctataatcctagcactttgggaggatcgcttgatcccaggagttcaagaccagcttgggggccaggtgtggtggatcacgcctataatcctagcactttggaaggctgaggctgggagatcacctgaagtcaggagttcgagaccagcctggccaacatggtgaaaccccatctctactaaaaataccaaaattagtcaggcgtggtggcacatgcctgtaatcccagctacttgggaggcttaggcaggaacctgggaggcagttcaacctgggaggtggacgttgcagtgagccgagattgcaccactgcactccagcctgggcaacagaccaagagtctatctcaaaaaaaaaaaaaaaaaaaaccagcctgggcaacataatgagaccccatgtctaaaacaaaaacaaaatgtctgctgggatgccttgtacattgcttgatggtttcacaaattgtctcattttgtagacattgaacagaattgatgtgggttgtattcccattttacagaagagaacgctgtgccacttcagttttacttagttgtaagcgttttaatattaaaacagtcctgtaactattatagattagaatgcaaagtttgcatgaattgaagctaacacaggaaactttaattaattaattaatttatttatttttgagacagggcctctctcacccaggctggagtgcagtgggacgatcatggcttacttccgccttgatcttgtggacccaagtgatcctcccacctcagcctcctgagtagctgggactgtaggcatgtaccaccatgcccggctagtttttgtatttttagtagagacagggttttgccatgttgcccaggctggtctcagaactcctgggctcaagtgatcctcctactttggcctcccgaagtgctgggattacaggcatgagccgctgcacctggccaaagacagtattttgcttgtagccagctgctttgggttcaactcccagatttctgggagtttcctctcccctgacttgagtgaagggtacatatgttggggctgtttgagaagcactgctttaggtagaatttataaactaggatgtgccaaaatccaggtaatcatgcttgcaaaaaccttggcagaggagaatcggaatatttttggcatcctctgcattaatagcttggtattgtaagagattacttttccaattaaatagccccatcctctatgtataagaacagtaatacaaataaaagctaaacttctatttttgccatgtgccaggcactcttgtgagccctatgtgttgactcctttaatcctccgacaaccccaggaggtaggttctgtgtttaatccccatgttagagtgggggactatgtagtaatggcagagatggggtgtgctcttatcgctattcaatacagcctctccttgacccatctctgggctaaatgcctactgttcactttgcctagaaggctcttctgcacctcacgtgcctggaaactgtatctccctacttttctctcaaagctcagtttgaatgccacttcctctgtgaagccttcccttgccccaaatgggctgagggcttgtctcctacatgggctgtcttctcaactgctatctcattgttccttatttgcctcattctctggtgggtgagccctttaggggcacagatcgggtcctgtttgatctttgtgtgtttaggacctggcatggcactcagcatagtaggctccctactgaagttgttaaaggagagggcagacattcaaacctgcccttaaagcaaacaccaaacacctgcccacttctttttttttttttttttttttttgagatggagtcttgacctctcacccaggctggagtgcaatggtacgatcttgctcactgtaacctccgcctcctgggttcaagtgattctcctgcttcagcctccctagtacctgggattacaggtgtgtaccaccacgcccatctagttttgtatttttagtagagacggatttcaccatgttggccaggctgatctcaaactcctgacctcatgatctgcctgcctcagcctcccagtgctgggactacaggcatgagccactgtgcccagccttgcccacttctttttttttgtttgtttttgagacagagttttgctcttgttgcccaggctagagtgcaatggcacaatctcagctcaccacaacctccgcctcccgagttaaagagattctcctgcctcagcttcccaagtagcagggattacaggcatgtgccaccacggccggctaattttttgtatttttattagagatggggtttctccatgttggtcaggctggtctcgaactcccaacctcaggtgatccacccgcctcggcctcccaaagtgctgggattacaggtgtaagccaccatgcctggccctcgcccacttcttttaacacacacttcccttcctttcttcacacactttggatgtcgtgaacctatgattcaaacttaaatccatctgatcccacagcttgagccatatctttggtccatcccccagaaagttgctcacagacaaatgggagagcaaacaggtcaataggatcaatgttacagtacggatgatgggaagcaagtcacaaactcagtttccagaagttaagactctccaaatctccatttctggtgaagggtttaatgggacaatgagggcgcggccctgactagccacagtccggctgactggcttctgccgtgtgtgtatctgatggcaggacagaacgaccgtgcttctgcagttgtgtgtggtgaggcagcaccgaccccagaccagtacttagcaaggatcagtggaagcaaatttgactctgcctgtggatactgttctgtatgtctgcacaaggctcgttcctgagtgaaggtggcttaaaaaagtggtggcagcagctgttcagaccagtggtatgagcagccctcacatgtgtattccacagatggggtctttaacattccctggtcctgtgcctgcagtacttggatatcctctgctcaccttgaggctggtctttctttctttctctctctctctctctctctctctctttctttctttctttctttctgtttctttctttctttctgtctttccttctttctttctttctttctttctttttctttctttctttctttttctgtctttctttctgtctttctgtctttctttctgtctttctttctttctttcttgacgaagtcttgccttgtcgcccaggctggagtgcagtggtacgatctcggctcactgcaagctcccgggttcatgccattctcctgcctcagcctctcgagtagctgggactacaggctcctgccaccacgcttggctaattttttgtacttttagtagaggcagagtttcaccatgttaaccaggatggtctccatctcctgacctcgtgatccgcctaccttggcctccttttttttttttcttttgaaatggagtcttgctctgtttcccaggctggagtgcagtgatgccatcttggctcactgcaacctccgtctcctgggttcaagtgattctcctgcctcagcctcccgagtagctgggactacaggcgtacgccaccatgcccagctaatttttatatttttagtagagacggggtttcgccatgttggccaggatggtcttgatctcttgactttgtggtctgcctgccttggcctctgaaagtgctgggattacaggtgtgagccactgtgcctgggcaatttttgatttttttgtagagacggggtctccctatgttgccgaggcttaataaacttattctttcagaatacttttagaaaagttacgcagatagtacagagttttctcacaatccctcacacatagttttccctgttattaacatcttatgttagtacgtattttacattaaagtccatcctttattcagatttccttagatttttacctgatgtccttttgctgttccaggatcccatgttacctatattcattgtctctttaggctcctcttgctgtgccagtttctcagacttttattgtttttgatgaccttgacagttttgaggagtgctgggcaagcatctaaagaggatctcggccaggcgcggtgactcacgcctgtaatcccagcactttgggaggccgaggtgggtggatcacttgaagtcaggagttcgagaccagcctggctaacatggtgaagcctcatctctattaaaaatacaaaaattagccaggcatggtggtacgcacctgtaatctcagctactcaggaggctgaggcacaagaatcgcttgaaccaggaggcagaggttgcagtgagccaacatcgtgtcactgtgctccagcctgggctggagacagaatgagactccgtctcaaaaaaaataataaaaaataaagagaatctcttctcaactgggatttgtccagtatttttctctttttaacagagtcttgctctgtcagccaggctggagtgcagtggtgcaatctcggctcaagccattctcctcagcctcccaagtagctgggactacagaaatgcaccaccacgcctggctaatttttgtagagacaaggtttcaccatgatgtccaggctggtctcaaactcctgagctcaagcgatctgctcacctcagcttcccaaagtggtgggattacatgcgtgagctaacacgcctggctgtgtccagtgtttttttcataagtagactgtgccaagttttgggaaggaggaccagagaggtaaagtgctattttcatcacatcatgtcaagggtacatacaatccacaagcctttccatgactgatgtcaaccatgatcacttggctgaggtgatgtgtgtgaggcttctctgtaaagttgttctccccttcccctttccatgctgcatgcaccctttggaagaaagtcactgtgtagcccacacctaaggaacagggacttatgttcatgttccccttgttgagggcggagtagctacatgagttactaaattattttttctttttctgttttttttgagatggagtctcactccatcgcccaggctggagtgcagtggcgcaatctcggctcactgcaagctccgcctcccgggttcacgcctttctcctgcctcagtctcccgagtagctgggactacaggcctataggcgcgcgccaccacacccggctaatttttttgtattttttttagtagagatggggtttctttttttttttttttttttttttttttttttttttttttttttttttttttttttgagacggagtctggctctgtcgcccaggctggatgcagtggggcaatctcggctcactgcaagctccgcctcccaggttcacgccattctcctgcctcagcctcctgcgtagctgggactacaggcgcccgccaccacgcccagctaatttttgtatttttagtagagacagggtttcaccttgttaggcaggatggtctcgatctcctgacctcgtgatccgcccgcctcagcctcccaaagtgctgggattacaggcgtgagccaccacgcccaccctgagatggggtttcaccatgttagccaggatggtctcaagttcctgacctcgtgatccacccgtttcggcctcccaaggtgctggggttacaggcgtgagccaccgcgcccagctgaattattaaattcttctatatgagagacttgtctattttcccccatttatttttatttatttatttattttttggagatgagttttgctcttgttgcccaggctggagtgcagtggtgcgatcttggctcactgcaacctccacctccggggttcaagcgattctcctgcctgagcctcccgagtagctgggattacaggcacatgccaccatgcccggctaatttttgtattattagtagctacggggtttcaccatgttggccaggttggtctcaagctccaggcctcaggtgatccacctgcctcggcctcccaaagtgctgggattacaggcgtgagccactgcgcctggcctattctcccccatttatttgttcaattatttatatcagtatggactccaggatatttattttacactttggtttataatccagcgataaggccgggcacagtggctcgcgtttgtattcccagcacttggggaagccaagatgggcggatcacctgaggccaagagtttgagaccagcctagccaacatggtgaaaccctatctctactaaaaatacaaaagttagctgggtatgatggtgcacgcttgtaatcctagctactctggtggctgaggcaggagaatggtttgaagcagggaggtggtggttgcagtgagcagagatcctgccactgcaccccagcctgggcaacagagtgagactttgtctcaaaaataaataaataaataatccaatgttactttgttttattgcccaaaatgtttcagctttgcccattggttgctcttttagcctcctttgacctgcctagtcattgtgaggatttttgtttttggtttttggttacttctttacattttggcactgccagatttttggagacagactcactctgtcccccaggctggagtgcagctgcacgatctcagctcactgcagcctctgcctcccagattcatgcaattcttgtgcctcaacctcctgagtagctgggattacaggtgcacgctaccatgcctggctaatttttgtatttttagtagcaacgaggtttcaccatgttggccaggctggttttgaactcctgacctcaagtgatccacttgcctcagccttccaaagtgctagggttacaggcatgagccaccactcccggccccaggcttactttgtgtatttcgtgccagagttgtagattcagctggctctccaaggccactgcctttttagcaaatgttttctctcaggtatgttgacatagagtgatgtggatgccttgagttatttcttctcttgatggttagtcatagttactagagactctggagttgggaaaggtagaggtggacctgggaaatctaccccctgagaatcaactgcagtcctgggagttaatcccagtagctggctgttgttctactcacccattcatactgctcttacccctgcctgatgctatgactgatccaaaaaatggtctgatttggtctttcctttggaatttacctatggaggtgtgggaagatgaggcatgtgtatataatcgttctctatttcaggtgctaagttctccagctaaaccttcctggactctgggtcttgtaagagattccacatggtccgggccagtcagtgtcttttgctgcccttccaaaatggactgcccccatgggacggtttgtggctgttggcgggctcagggtaggctgtcactttgtgccgtgatcctgaatcattgaatagctgaaatccttccattgtactgtcatctctctgaaaatgtgtaacttgagccctgctggaaacactaacttgggatcttaacaggagttggtttacaagccttttgccttctattcatagctccatgtatgtccccttcaggtggctgtcagaggcatcccaggcatggaggagggcgtgggtggcctctctaaccctggctgctctcctagacatcagattgctctctgagctgctcagacagcgtggtgatgaatgacgccagtttccaaacctctagcatttgcagcctggtttttaaaaggaactctgctttctttgtcagctgctctattcctgtcccctagccctctcaacaactgaactgcttcttccctttcctgaaagaggctttgagatggaaggaagggcatttgggctttaagatgctttgtgggctgggcgcggtggctcatgcctgtaatctcagtactttgggaggccaaggcggggggattgcttgagcgcaggagtttgagatcagcctgggcaacatgatgaaaccccatctctaccaaaaaaaaacccaagatgctttgtgttaatggggctttttttttttttttaagaggttatggtttgcatggttggggccttcaccccatgcagatttattggatggtaatggtttctcccctccatttttgtggttttgggagctagtctctggaggatacaagattggggttgttgacaggacactgagtatcttctaggaaactgaggaaagacgtcctcttcagcattctctccaaatgagaggtgctgaagaatggagtcccgggaaactggaggtaagaggaatgtgtgaatgttgtctgacagatgaagtgaggagtccggctccttcacagggaagtgaaggcgcaggggctcccctgctacagaacatgtactgaatgcttcccgatgccaggccctttgctgagagtctcacatgcatcatcttcctggcagtcctggagacgggtggtactggtctctccattttacgtgtgaggaaatgggttcagtgacaacaccaggccaccctagtaagtggtgcctccagaacttgaactgaagttcaagttgtctgactccagcacttgtgctcttaagctctgtgcagtagggatggaggaagtcctccctggggaagtgaggcagctcctcagctgctctgtggctctgttaggggacccgagccgtctggcagatgaatgcagatttaagccctcaacttcccccgttcacttgccaagtgtaagcgggcggtacctctcacatgcacagttcaccgtatctgtgctcacctactatgggtcaggcttgctgttatgtgctgttaacacaaaggaaacccattgtccagcctttgagaattttgtaatgtggttgttttcatctgcaacagtgcctttaatttctcttgctttctctctcacaaccctcagtcccccaagttctccagccccttgccacctacactagtcttatgaacatttggggccatggaagcagaagtgtgattcgctcattgaatcttgtttagacctattcattgcttgatttcttcactgggcaccactctacagtttgttcagcaaaaattaagaaagatggcagacacagtggctcatgcctgtaatcgcagcactttgggaggctgaagcaggtggatcacttgagcccaggagtctgagatcagcctgggcaacatggtgaaaccccatctctacaaaaaatagaaaaattagctgggcatggtggcatgcgcccgtagtcccagctacttgggaggctgaggtaggaggattgcttgagcccaggaagtcaaggtagcggtaagctatgattgcgtcactgcaatccaacctgggcagcagagcaagaccctgtctcaaaaatgtatatagaaaaaagagctgggtgtggtggctcatgcctgtaatcccaacactttgggaggctgaggcaggcggatcacctgaggttaggagttcgagaccagcctggccaacatggcgaaacctcatctctactaaaaatacaaaaatacaagctgggtatggtggtgcacacctggaatcccagctactcaggaggctgaagcacgagaatcgcttgaacccaggaggtggaggtggtagtgagcccagattgtgccactgcactccagcctgggcgacagagcgagactccatctcaaaaaaaaaaaaaaaaaaaaaaaaaatatatatatatatatatatatatatatatattctaaaatattgttctttggtgcccaggcttctgagaatagccatcgtccctcaggtctcccactgagaactttgacttttttcttgttggttgcatagccgctgaccacggtgtgtgtggtgtctgaacaggaggcatttggattgctatttctcttttctcccactttcctctcaaacttgacctctgctctctgtttaggagctgaaggcaaaacaaaggggcagtgatttaaactggctttcttttgttttctgttatttgtaagggcgggaagggttttggagaggtgtccgctggtgtgagtggctggatgaacaggtgctgcttctgatcctgactttcagcagaggtttctggagtctttctgggcctagggaagcagcagaagtggcagctgtcctggctggtgcttctgacccctgcagagccccttttgagacggggggaagacgggccctacattgatgagattccggtgagaaatgtcctagctaaatagtaactgcctgaacaaatgaaatacaggatagttggggtaggctggggccagaagaacctttgccttggatggcactcttcctagcatcctgcctggcattggcaggtgaagaactgactggtggcgtgtgagccaccatacagccatgttgtcatccctaacaagccctgtggctgggacgtgtgtgtggttctgggctgcagaaagattccaagttgagcttttgcttgaggcttgagagagcagccctagacaggagtagagaatctggcacagcctggatcacaaggtcaggaaatcgagaccatcctgactaacatggtgaaaccccatctctactaaaaaatacaaaaaattagctggatgtggtggcacgcgtatgtagtcctagctactcaggaggctgaggcagaattgcttgaacctgggagctggaggttgcagtgagccgagatcacgccactgcactccaacctgggtgacagagcaagattccgtctcaaaaaaaaagaatctgccacaaccttgctgactgaggtgtgctgttagacactgggccctcttagggagaacagtctcaggaatgtcagcgttagggcctggcccccctggtgccttttggaatcggtaggctggcggagagccttgcctggtgcagctgcaggcagtgccctgtctgtgggccttccgtgctacctgtctcctctgttggccagcagggccaatgactgagagttgttgagctgcccatgaagcctggggcccttctgtggacagcactggccgaccacactggccaagctgtgctagcagatccatggagatgtcctcccaccccaatagtcttcctccctgtgggtgcagaaagagggagtggatgctggaggtttccatccagccctgactgctcctctctgagcctctccagagaacccatctgtcattgagagctgggaagaagctcagggatcagggaaggatttcatggtgttctgctggggtagagtcctggaaagctaagggtctgtccctcaggggtgtcttccacccgagtgagcttggcatctgtcctaagtgatacaagacttcccacacaagggaaagggctgcaggagccagctgtgctctgtcctggctgacttcagcaaagttccaggctcagtctgcatagtgtttattaaagatcacttggtaatgtgtatccaggctttaagcctcttgatgcctctgcacactggccccttttgcaggtattggtggagttggtgtctgcacttggggctctggtggaccccatcagggcctgattgtggtgtggaagtctaggcactaagcctcagaaatcttattgaaaaaagaatgaaatgaaaccaatctcagttaaggaaggtgggggtgctttccctgtggaaggggacccagctcaccttcagtgcccctctgggataatttacttccctttccgctggaaaaagggtcatcttcctgtggctgtggaaaggcagcaccttcctccctactgctgcctcccccaagtctaggtttaagagctggacctcctgaaggtgggaggtggagcccaccctgttgcaacaccccccattgggattcggctagatctcaccctgggctcttaagcttctggcttccagggccagggccaagcttcccctgttagactcttaggtaagacacaggccctgtgtgaagcagttccataggcctggtcacacagaggacacccttctctttgattccatcccccaacccctaaacccccctttcctctgcagatatactctagactggttggggagtggagaatatcatactgttataacctctttctccccatcgaaaagacataaatatcagtttctctttattattgtgaagctttaaaccacttgaaaatcctttagcccacagttaagcccaaacagtaaatatatccttaatatatatgtgggaatcttattttttatgaggaatcccattgtcttgcaccttatttgtgtttaacatttgggtatctttgttctccgttggtcttttccaattcaggtatcatctttttgattgtcttttttttttttgagacagagtctcgctctctcgccaggccggagtgcagtggcactatctcagctcagtgcaacctctgcctcccgggttcaagcgattctcctgcctcagcctcccgagtagctgggactacaggtatgcgccaccacgcccagctaatttttgtatttttagtagagacggggtttcaccatgttggccgggatggtgtcgatctcttgacctcatgatccacccgcctcagcctcccaaagcgctgggattataggcgtgagccaccgtgcccggcccttgattgtctttaatattattttcttcatactaaagaggcagaaaatattttatatacagaggagctagattgcattcatatcgtttccaagctttaacttttcatgattatatgcaaaattctataccagcagcattttttaacctttttattgacatgtgacttatgtataatagtttacaaattgtaaatacagctcgatgggtttttatattattatacactcatgtatttacctctcaaatcaagttataactcctccatccagcagtgtgcttttttttttttttcttttttttgagacagtgtctcgctctgttgtccaggctggagtgcaatggtgcgatcttcgctcaccacaacctctgtctcctgggttcaagtgattctcctgcctcagcctcccaagtagctgggattacaggtgccagccaccacacccagctaatttttgtatttttagtacagtcggggtttcaccaggttggacaggctggtctccaactcctgacctcaggtgatccacccacctcagcctcccaaagtgctgggattacaggcatgagccacctcacccggcggcaatgtgcttttttcagtttgatagaaactcattttttcctagctaaaagctacattttttaaaaacatgcatagaaggtcgcagtccctgttatttttagtaacaggggttatggtaatgagattgttaatattctggggtttttctttctatctctaataggagagccttgcttgagttatgagtcttgggcaggcttgggctctgccaccagctagctggctgtgtgaccctaggcaggtcacttctcctcaccttcattttttttctttaattgtcaacagtaggatggggtctttaaggcccttttgggctctgactaccaattctagcctctggggtaataaacctgccacttgttgaaagctcaccttcagcctgatactgtggtgcattgtttcacttgatctgaactaccccatgcaattagtattaaagaataccaatttttagataaggaactgaagctgataatgatcacttgtgtgacttggccaaggtcacacggctaataaacggtggagtggagcttgaaccaaacccggctcagcctcccaagtcctaacctgctagccacgctggggaaggttgtgggtacctcgtgtggatcgtggctggcgttgcttcagattcttctttcctctgggtctgcaaccagctagaagcctggatagtcctgctgtgagtctgtcctctgtttctgtgtgctggcagtggttttcccttttgaggaagagctgtgttcttgagcctatgggtaaatcatctccccaactaatcggagcctgggaagcatttgcaaaaccttgactccagttggcttttaaatcaaatgtcttccactttagcctttgaaccgagttacttcctcctgtgtctcttgctccattttctttaacaactcctttctgctgttgtttttttggtttgattttgttttgttttgctggactcttgtttaaatattcaggaatgcccttttccggggtaaaatgtagctgaagagtcactggtcagaagcacctgcaggggaccctgggcggggtcacttggttctcaggccacctggctaaccttgagtgagctagtctctacgccccgcctgccctggtcaacagtctgattggtttccctaatcagcttgctctccaggctgtgccaggactctcagctagaggaagtctctaaagcaaacaggaagtacacgagacactcatcagctggaattgctcacccttttaccaggaaggacaaaacatatgaagtgggtgacttcgtggattagaggaaaggtgaaactttcaaagggaggttagggggaggaattgcagcagcatctagtgtcttggagaaggctccagttgctgagtgaagctgaagacccctcccacattcatggacttacacatgcacacttacgagttgtgcacagcactgatcgggggtgcctttctgtctcttggatttctccctccttcgtatatcaactgtagctcttgtgcttcgatcaactgcttaaaatcactgggaacttatttttaaaatactgatttctggactccacctctagagattctaattcagttggtcagggtattttctaaaggccctgggtgattctggtgaagaagagtttgactggaggctgaaatagaaggatcacttgagcctgggaggtcaaggctgcagtgaatcgtgattgcatcactgctctagcctgggcaacagtgagactctatctccaaaaaaaaaaaaaaaaaattacaggtggctcacacctgtaatcccagcacttttggaggttgaggcaggagtttgataccagcctggccagcgtggtaaaaccccgccgctacaaaaaatacacaaaaatttagccgggtgtaatgacgtatacctatagttccagctactcctagaagctgaggcattagaatcgcttgagcctgggtggcagaggttgcagtaagcagagatcgtgccactgcactccagcctgggtgagagagcgagattctgtctcaaaaaaaaaaaaaaaaaacttaagaaaaaaaaagaatttgagacccactgacctgtagtgtccagagcagagggaaccccggagcagggaagaacagtgtcccatttttctttctctttctcttccatccttggcccagaagtgcctgtgcacagggccagggtgtttaggagcttagatcccttctgcgctttcatgtgcattgtattaataggaaaatagtgtgactccaagtccttatacattctctcccctttcctgtggaagacatgaggttgggactggtgcttgttcttagtggcctctgaacaagccagggttctgatttggatggtgggtccatggcaaggagaatctttctccctagatctgaagctccagcacggccattgtacttgtgaaaaaaagtcaacttttttttgagacagagtcttactcttttgccccaagctggagtgcaatggcgcgatctcagctcactgcaatctctgcttcctgggttcaggcaattcttgtgcctcagcctcccaagtagctgggattacaggcgtgtaccaccacgttggctaatttaaaaaaatcaactttgactgtaactttagctcttatggagaatttgatttttgtctcaaagaagactttgaaaactatgtcagttttggctataattccatcacctgactgcacaagtggataatttttgccaggggttcaaaaagaaagattgccagtaagacacacatccctgggaggcaggacagctcagtgaatgcattcacctttactacctgccatgtcttcagtttcccaggcttgggaggagagggtataatgcttcctggggctctcggtctggccttcccctggcttagacaccctcatatctccgtgcgcccttcctagcaaaattggcttccttgggctttattgactgcaaaggttggacaccactgctcatttgatcaccaagcagggccaggcaaaccactaggcaacagaccgtaaaaagtgctgggtgtgcctgctcaggtatctctggaaggcaggatcagtgaccaggcagaacatgtcaccagctagttcatgccagggagagcctgtctcagttcattgggatggccagagtctgttcaccaacagtcttggagaaagtgttacaaataaccctgtcagtactcttagctactgtttactcaacatgatgtgtgtgagacagctggcaaacactgccattaaccctggtgtgccccatattagtgatgagaacactgaggctcagctcaggtggcttctacaaagtgattcagaagtggcaggagacagtcacatctgtggtgccgaaagccagtgcctgtgctcactctctctctgccagatgctctagccctggctgtgcttcagtgggtgtgcttcacctgcagatgctgggctctgtgccaaaccttcatgagaatctcgaggggctggctgcacagatgacttcaatgtacagacaccgttgagaaccactgcaggagagttatttgtctccccttctggcttgtttttaaaaatcacattctgttcctctaaccctgtggtttggtagtgacaagacttagatctgttacctgtatttttctcgacctgtaggtgctggttacttcccagctcggtaccctaagcaccagctgctttggtttttttggaatcagagacttggttttctattaccatctcccagtccattcatacctcctcctccagtgccccagccacagaccattgctcagccaagactctgtgtcacgtggattcatggtaataaccaacttgtaattccactgtggttttccctctgttgctgtcgccctgcctggctctgggcggctcctcccactgttgagggcactcagaaactgcaagattactgtgactgttgctagagccagctagagctagaccttcctggaccagcaaagttgctgccacaaaaaaagagagtttcattcacctagcagccctaaaccaaacatagggcaggcactgcctccattgttcttccacagcagggaggatggcatcatgtctatggtgggtctggggggttctgtcacctgtaggctgggtgaccatgagcaggacatttaatatatgaatgttaaattatctatctgaaaaatggaggttgtcgtaaagcttgaaggagataatagttgtgcaattgggaagctgaggcgggagggttgcttgaggccaggagttggagaccagcctgggcaacacagtgagactccatctctgcaaaaaaaaaagaaagaaagaaagaaagaaaattttaattagctgggtgtggtggtgtatacctgctggaggctgaggcagtaggatcttggaagctgcagtgagctgtgatcacaccgctgcactctagcctgggcaacacagtgagaccttgtttctttaaaaaaaaaaattatttccttccatcagcactctttgagttcctagtatgcacataggcactgtgaggaaggcatctctaagaagcagaaagcacagaccttgtctcttcattgactgaggtgaaatgagaaagcgtcttaaactatgaaaaattgaaatgacataactttgaaatatttacatggtatttctggttgctaattgagacccaccaccccgtacttccttccttgtacttttggggaagaggtgggccccatttcaaacctcttttcctttggttctctccagaaaggaaactgttgtttctggctagtgaatcattcttcctgaagctcactttttaaatgagttgctgggagaacttggatgtggaaaacgatttgaggttgaacaaaacaagccctttgctgtcagcttcttgcatgaatgtggaccatttgcttcccacagatacctcctgttcatccacattgctgtcccttaaccatgagggaatgtacttcccttgctcaggggcagatcggggctctccctgggatcttagactccattatgcaaagggcagcctaataaaaaccttttctttccaacccaggttcaaatgctgaacagtgttcagtacttaatacctactcacaggacctgtttgtaaaacattctgtatatattctgatgtctgttgacatcagatgtatatgtctgatgagacatccacttatgtcttctagaggcttctagagataggctcctcatgtgtctgcaattccaaaacttaacaaaaacaaaaagttgagcctctgaagctgtcactaaccaagtgattcagatgtcgggactggaacaccagctgttggggatgcaggacttggtctctgccctcccacacctcctgcctcttctttctctccatcgccccatctctgccagtagagaatggaactgaggtctctattgaaaaagggaaagttggtagctgtgctgactgtggcagagctatgactttggtgtgtgtttctgtgtgtgtttgtttcggtgtgtgttttgttttggtgtctgttttggtgtgtatttctgtgtgtgtgttggcatgtgtttttgtgtgtgtgtgtgtgtgtttcagtgtgtatttgttccggtgtgtgtgtttctgtgtgtgtttgtgtgtgtgtatcggtgtgtgttttactatgtgtttgtttctgtgtgtgttttgttttttaatgggtgcgagactttggcccatcaaaaatgagagaactagggaagaaggatcaggatgagagagtgaaacattgctttgattctggtgcacagaggcacacagtccagccctagactgaaagtcggtcagtccttctgaaggtggcaggagaaaaatggctatgttaataacaacttgtgctggccaggccctggtccctgaatggccatgaggttggccaagcaccttctctgaggagctttctaccaggacctcttgggcccctgtctgcctcaccactgtggtcctggctaccagactggaacttcattattgatctaaatcctagtgtcttcctgagcttttgttttgttttgttttgttttaattttgccccaaaagcctgttgacttaactgtcaccaggctgtcacacattcattcatcgcctgtgtgtgtttatttgtaggtgaatgtacatatttgggatccagaagtcaatgtgtttgctcagaaccatgagcctgaagttgggagaccattctcctctttacagctcagatggtggtagagccggtagacatctagtatagcccagtggggcctcctgacctctagtggggagggcagggaggtgaggtgaggggaagcagtcagctaggtcttcagtgaggccagagggaaagatctgtaatttaagaaggacacagcgggtgacggcctctgaactaactcagtacttctcatttctcccttacagttggaggtccccctccccactaagtgcctctttgcatagcaccagtccccacccgcacgctctctggaccactacagctggacgggcaatggcgggtcggggaggcgcagcacgacccaatggaccagctgctgggaacaagatctgtcaatttaagctggttctgctgggggagtctgcggtaggcaaatccagcctcgtcctccgctttgtcaagggacagtttcacgagtaccaggagagcacaattggaggtgagtgggcatgagggagtcggggaggggcctgaaggttgccaaagaaatgctttgaccttgaggagatgggaagctgcctgcctgcattagggactaaatgcgtctgtggtggcagccccacttcctcacctgggccctggaattgagcccagcaactggtctccatgccagagtcccctcaagcatcgctagtaagcatttgctgggagtggaaagctagcttcccatcctgtttctgccccttcttgatctgtgtggccttggctgaggccctttcactgccctggcctcatggagggagagctgactctggatctttgaggccccttcttactataatgggtggtccatgtgccctggcctttcccacttccagaagaaggaacagcctggtgagtcggagctgggtgataggtgggtgtttctgaagctgactttaccctttctggagctcacagcctgttgttgattttccagtggtcagcatttaggatgtgagtgagggtctggcctcggcctcttgcctccgtggctaacacacacatcaagaggcaggggccaacgctggccttggccttgagtcatcctttctctactctcttggtaggaggtttctaggcagctggaaacaaaatgggccatgtcagcagtctccctgctgcctcctcagcatttgggtcaggagctggagaggggaagtgaggcagtgccccatgtccctcagtgagctgggggagggcagaccaggaaagcagccttctacacatggctgtcctgggttctctgctgggtccaggggcaaaggggccttttgctgtctgtcccagctctggactcctcctttgaagcatgtgtacaggcaccctgcattcccctaaggagtcacctcttagtgactgaaggtcaggtcacagggtggccatacaggaacaggtctgggtcagagctaggggcggtggctagctggagtgcctggaggtggtaggggtggttgggaagccggccacccagcctcagcctggtggtggaacagtgtgtacttccccagcatagctaagtgtgtgagaatgtccttaggaaacccaaggtcagtgacacccctgggctggagcaaactgaggggtggagcggtccctagctgctggtctgttctctgagtggcggaggaggaggtctgagggcgctcacccttctgtgcttggagtaggcttcccctaggctttccctctcttgcccctgctgtgttgctcttcagagagtggtcctgagatggctcagtgcatgcaggagtcccttctcctgccgttgcctgggctgggtctgcaaagcctgtgcagaccccgtcccccagacacatacataaaaatccaaactccaccccccactcaggcctgctttggctcctggcttgagggttctctgtgcccatctcagtggtgggcttctgagtgccagagcctagaagcaacagtgggattgtgtggggtggattccaactcgctcttgcccatggacgctccttctctcttacagcggccttcctcacacagactgtctgcctggatgacacaacagtcaagtttgagatctgggacacagctggacaggagcggtatcacagcctggcccccatgtactatcggggggcccaggctgccatcgtggtctatgacatcaccaacacagtaaagatttccccttgcttcttcctttgcccttcatcttctcaaagtcccagggattgggttatcagagccctgatttcaggccgcttaaccctctgttcctgggtggggggtgggcagatttcctgtttggggacattgcatcagaatctttaggtggcaatgtcttagataatttggctgtgccagcttgagagtctctaatgggtggccctgggcagaatgccttctctgtcccttcgacattctgtccctgtctcctcaggatacatttgcacgggccaagaactgggtgaaggagctacagaggcaggccagccccaacatcgtcattgcactcgcgggtaacaaggcagacctggccagcaagagagccgtggaattccaggtggggagatgacagacttgggggaaggagtggagtaagcagctccccccggcctcgcctgggatgctcaggggctttgggaagggccatgctaggaggcaacagggaagcttccatctgctgtcctctcgtgcctcaggcatgggcctaacatggctcctgtctgtaatcccagtgccttgggaggctggagtgggaggatcacttgaggccaggagttcgagaccagcctaggcgacacagtaagactctgtctctgcaaaagatttaaaaattagctgggcttggtggcacgcacctgtagtctcagctgctcaggaggctgaggcacgaggattgtttgagcccaggagtttaagattgcagtgattgcaacactgcactccagcctgagcaagagtgaggccccatctctttaaaaaaaaaaaaaaaacagccaggtgtggtggcacacacctgtaatcccaatactctgcaggctgaggcgggagatcacttgagcttaggagttcgagaccagcatgggcaatgtggcgaaaccccatgtctaaaaaaatacaaaagttagctgggcatggtggtgtgctactcaggaggccgaggtggggaggatcattagaggccaggagattgaggctgcagtgagcagtgatcgtgccactgcactccagcctgggcaacacagtgagatcctgtctcaaaaaaaaaaaaaagaaaagaataaaaaaagcatgggcctaaaaggaattgcccgtcacctgtctctccctggttctctttctttggtggtaggggtatgtgtatatatggatcactagccttctacttctcttttcttgtaagttgactttttaattaaacttattgagaaagaaatacttaagtctctgctaaccctagaaactcaacttctcttcttctaatttccccagtttcttgtccttccagaaatatgcacgtgttttttaatccctttctttacattgatggcagtgtgctatacatactgtatatgataattttttaccaatccctaataatagcaaaagactgaaaacagtgctgcagtagacatccacatacttttgtgcttttgtgcaaacatgtaagtgtatttgtaggttaactttctagaagtatttcctagcctagtgattttgaagagcaagaaggcagggtggacctggggaaacccgggtaagacatctgctagtgattgtgagctgagaggtgatatacatgagcggggaaacccagatcagggcagccttaggcctgaaaactcctgtgtgtgtccagctgatctctattatgataaggtgctcgaataaggaaggtttgtatcctgggccctgggccctggcccctgccaacatttccctctcacctcctctcacctccatccaaaccaggaagcacaagcctatgcagacgacaacagtttgctgttcatggagacatcagcaaagactgcaatgaacgtgaacgaaatcttcatggcaataggtcagttgcttctcctcccctcctctctccaccacagcaagggcatatcacctgtctgctggtctagagtgggcctgcggggtcccttcaccactctttttttttttttttttttttttttttgagatggagtctcgctctatcacccaggctggagttcagtggcacgatctcgactcactgcaagctccgccccccaggttcacgccattctcctgcctcagcctctcgagcagctgggactactggtgcccaccaccactcccagctaattttttgtatttttggtagagacggggtttcacggtgttagccaggatggtctcgatctcctgacctcgtgatccacccgcctcggcctcccaaagtgctgggattacgagcgtaagccactgcgcccagcccccttcaccacttttaaccttctgataaaattgttttcatcatcacctgactcccagatgtagatgttggttgttcacccgagaagttcctgaagcctgggccagagtctcaacatttcactctctgagcctgtagcctgccacccatttcagagcctgccatcactacccctacccactgcctaggagtttttagctcatttggctctggaatcttccttcctgggttgcagatcctggctctaccactcattagctctgtagtcttgggcaagttatttaaccttactttgccgcagtttcctgaaaacaatcagaatgcacctgacacacagaagccctcaatatgtgagttaccactgattgggtataaaggccagaatctgctccagtggaactgggagagttattggggtacccccaacaaatgcacttttccccctcccaaacagctaagaagcttcccaagaacgagccccagaatgcaactggtgctccaggccgaaaccgaggtgtggacctccaggagaacaacccagccagccggagccagtgctgcagcaactgagccccccttgcctgcccgctgcccccgcctcctccgcctgaatgacccgactggaatccactctaaccaatcgcacttaacgactcgggccaccactgggggggcagggggaggggtccaccatgatttctccatataattttgatcataggccggagtgagtcattccacctgcacctttctgtacaaatactaattcaattttaagtcttaagtcacttttttaatatatatgatcttctgctcttcccacttcctcccctttctactgctctcccattttcccttgctgggagtagccacatgctcttgccccccaacccttgtatatggggacagtggggtcagtgcagctaccctttctttccctcctgcggaacagcggacccagcaagagcatccacatcctcactttgttcggagtggtctttggtttgggcggtggggcagaccttgggaaggggcttaggaagggagaggcagctcttccttcagctggctctcatcaggctgcagccccctccccgctcccacctccctgctgggaaaccacagcattatcacagcattattgtgacagccacgaacccattgcccacaacccctccaccctcggtcaccccaacctctggctctgagccctgttctgaccaaatcatgatgatgagtatttgggggtgggtgggtaagggggggagtgggaggggacggaaccaactttttctgtattttgtattgtatgttttcttcaacatgtaaccaatcagtatcttgtcaatatagtcagccgatcgatcgacctcaca

SEQ ID NO: 923 - DNA, 32742 bp, Homo sapiens
  source 1..32742: mol_type = other DNA
ggcgggcgcgccgggcggcaggtgtcggcgtcggcggcattcggcggcgatggagcggccctggggagctgcggacggcctctcgcgctggccccatggcctcggcctcctcctcctcctgcagctgctgccgccgtcgaccctcagccaggaccggctggacgcgccgccgccgcccgctgcgccgctgccgcgctggtctggccccatcggggtgagctgggggctgcgggcggccgcagccgggggcgcgtttccccgcggcggccgttggcgtcgcagcgcgccgggcgaggacgaggagtgcggccgggtccgggacttcgtcgccaagctggccaacaacacgcaccaggtgagcgggcgccgggcccgggagccgctcgggtgcgaggtgccgcccgcgtgcccctcccggcccgtgcgccccgcgactcccggaggagaccccagccctgccgcgcccgcgtcccccgggccgcagccccgaaactgcggcgggcgggcgggcggagtcgggcccgggcggccggcggggctgtgttttgtcataggggaggcaatcttagacttccaccgcattcttttttttttttttaagttgtcaaaatctcttgaacatcgtttttcgtctgtataaataatcaggacccagtaacgctgttaggccccaggaaggtgaaggagtaattaactcttgagcgcttgcagaagttgggctgcgcagaagcaaaggtgtgtcctctctgggtcagtactttccgggtgggagaggcgggagttcaggaggcccgaagcagcgatctggtcaccgtgttttaatagttaaggggactagcttggaaatgagatggcaatatttatgtgatctcttttactgcttcagatttgaccttctgtcatggtacggaagtctgactagcatgtctatatcccgtggtgacaagattttcaatagttaagaaacgcattgcacatattctgctttgagccagctcttggtcaaaagactttcaaaattatgggatttctgtccctggggacaagcagctcaacctttgcacactactggactgacaaaactaattattaagaaagtcctggttccttgcttcagcacaacttgggcatctttctcctatttctctaaaattaacaatttaatccttgctagccacatttgcataatgtattttcaattctatatattttctcccttgcctgttttcctctttcaaagaaaatgaattgcacttgggggcagagatgggtggccaaggctctgtgccagcacttgtccttctgtaaccgtttttcagcgtcagccaagcctcagtctccctttggactgcctggttatctggaccatacttgttacctgtaatagaattctctgatctgaggacacaagacacaaatattcaggaataattgtgcttagtgtatcccgagcagcagctgtgtaaaggtagccaagctagtgctggagggtgagacaggttgggtagaatgagtactgggaagtcttcctacttgatgagaaaaaaaaatcgaatagacttccttctcacagtgggggattgagaaaggctttacaacactaatgcttaatttatactggaccacttccttccttgagctagctggtcacagcattcttgctccatatttcaaattcttctctcgctggttgacctaactttaggtctgctgctactcctggatttagatttactcctgtttttctttttctctttttttgtgagatagagtcttacctcagcctcctgagtagctgggactacaggtgtgcaccactatgcctagctaatttttgtgtaattactattttttttttgagatagggtctcactctgttgcccaggctggaatgcagtggtgtgatcacagctcactgcagccctgacctcctgggctcaagtgatcctctcacctcagcctcccaagtagccgggactactggtacatgcacccagctaattgttcttttctttctttctttctttttttaagaaacagggttttgccatgttccccaggctggtcttgaactcctgggctcaagtgctccacccaccttagcctgccacagtgctgagattagaggcgtgagccactatgccctgcctggatttattccttgagtcagagtcttcctggttagtttgaattgatgtgtcatttgtaatatattgattccaaagaaagaggttgaaaaaactggctcaggggttctaaggccaaatctgtggaagagtagacctaaaaccactcattctttgaagtccacatgtaaagaaattttcttctatttctttcatttagctgtttgcaataatttttttttagtttttctctcccagtctttttttcagtgaccttatttaaaatagctattttggctgggcacggtggctcatgcctgtaatcttatcaatgtgggaggccaaggcaggtggatcacttgaggtcagaagttcaagactagcctggccaacatggtgaaaccctgtctctactaaaaatacaaaagttagccagacgcggtggcatgcgcctgtaattccagttattctggaggctgaggcatgacgatcacttgaacccaggaggcagaggttgcagcgagccgagatcgcaccgttgtactccagcctgggtgacagagtgagactctatctcaaaaaaaaaaaaaaaaaaaaaaaaaaaaaagtttttgcgtttgttagtcatccgtggtctcttcttcagagatctcatcctttctgtatctggttaaaaaaaaaaaaagtggagcctttgtttaatatcatttaccttaaaaatggttaagtagtacttcttaaccaagaattgttatgtagtagcctgttcttctgtttatttatttggttttagaagtcataaaaaatcctgaactgtattgaagagatctagtatttttggaccgtttataaaacagtgtgaaataaaagcatcagcatgacagaacaactttttatcagagatattgtactttgtacaactggggaaggaaggtacatgtagaatcatttttcctacataacatgacaggattcgagtcccaagaaaaagcaaaagttcatggttctcttatttcttttaacttggtcctgtttcatttcaagccacattaattcacatcatcaatgtatgtgaatgccctccaaatgcctagatctgtgctagatgctggggtgccaagatacaaagaaaagatcattcagactggagaatgaaaagcctcagaaggttatagcaaactactagacctgtgtctgtggcttatgaggatatattagcatttaacctgtcttctcaagaaagcacggtaaagctaaagcataatagtgcgtttatattacggtttaaggagaccggtgtcctgatgaccactcaggcttctctgtccatgaaatccagcaggtttttctctttgcccaagcctccctttttctctctaaggttttttttctcatatcatttcttttcaatctattaatttaaaatatatttaaagtgcattgggtttattacacacagcatatattttttcacatagaagtcctaatgattaagtgctttattttaggagttgaggcaggagaggaaaacattttcctttctagttacagtattacaagttagctataatagactcatgggaaagtggaaataaaaaatactggctattactaaaaaaacaaacaaaagggatgacaagaaaacgaaggagaaagataaatagttataactttccaaaaattatgctccctaattttgttctaagggtttgacttaccatggtaaggtggtatagcactgccttatctggactgcctgcatttgaaccctggccatgtcactgtgtgatcctgggtgagttacttaagttttctgtgtctcagttcctaatctgtaaagtgaagataagagcacttaatttgtagggtggttgtgagaattaaatgagtgtgtgttaaattatatatacataatatatacgtatatgtatattattgtataaatatatatttgtattacataatatatgcatatgtaatattgtatttgtaatgagttatagtatgtattacaacatatcacattgtgttgtataatctatacatatgtaataactcattagaagaatgtctggcacataattagcactcagcaattagctatcatttataaatgctctcttcttagactcaataatcttccttttgcctggaactcaaaactgttttcatgccacatttttaactgattctttccttcagctgcttggagtattcatgacatgtataacctttgtacatgcgtgaaattgagcaggcctagaagactttattgttggttactaagttggattgcttcaaaacatttctgctgtaagcacccctttgagggtaggcatgaaactgtcttaaaggaacagatgaaatgccttggccagagttgtggtggtggctgacataatttccttacttctcattcctgtgtacagaccatttgacaatttccttaaaactttttaaacttatgatgaataaagccaggaactcttgcttattttctgtcctccctctgctcctgtcactaactacttctgtaaacataacttcccaacttctactccaactttaaagcatctggttccttaaataaacaggccctgtagagaggccgtgttgtatggggtgtcagctctgggaagaatgcgtgtgtttgtttgctggctctggcagggttgagtccaagctgacaggactgagtgtgcctgtcagaggcttcagggagctgccgctgaagacctcggcctgttgttgtgaatcgccagacctttgtaacacccggaagtctgaaggtcagtcctttaatgccccggaacttcctaactgcctcatttcttccaatacttggcctctcttcatcctaccttccctagcacccccagccgtctagcttatttaatagtctcttgagttctgtttcttccattcagctttggatcaaggagtaggaactctgtaggatctccttcttggtcctggttgagcagagtgagcgaaaccttcatgaagagtcttctctcatgcaatgtatagtcagacctttagcccctagagggatgttaaaatgacttatgcattggatatttcagtaagaagtatcagcagatttgatgaagtgtaatttatctggggaaaggttagtcttcatctgaagtttggttgggatgagagtagaaagctagccaggtatgacagatggctccaagggaatgcagtgttaacaattaggtaagttctctgctgactcaaatgtttggctctgtgcacagtgatttttaattagaaatctgagtctcatgtctgcttgtggaaataattggaagaaggcttatgttctgttcaatttctaatggctattttctttttgtgattattaacaacaataataggctttctatcctgctgttttgatcagatctttcatgtcagggtcacagatactattagcagtttcttctgcactctgccagtttccagtcaactctcgtcaacaggcattgggttctcagtgggtgactgcagagtctgcgttccccaactttgtcccagttggcctgttacccttgtgtgaccatcacatgctgggcagtgcttagcaccaagttgtaatggtcaggacgggggagtaacgtttgttcttctccctccttcctacctaatcctacccctcaattttttttacagaaagtgaactatgttttgaggctgcagaaatgaggctcagatattttatataattaggagctaatattaaggcagacaaagccatcacatttgacatgtaatttaaaatacagcttttctagaaacaacaaaactgtggcaatggctctgacaatattatgaactagatactgcatttgtagatttctacaagtttcagttccctttctctccttttgtcatcagtgtttttattgcatcttttacttctatttttaaaaacttggtgaaaacttgttcttcccactatgtggtctcagtgatttgtatgcaggtggatttgaggattaatggggcttgaagaacaagctgatcaatttcagtcagttctaggcagcttttttgttcttgtttcaatggtgactgcagtcaaagttgggttagtaatatgttgctttgagatagtttggttgaatgaatgttcatgacagattcctcatacctatgaaaatttttaggtgaaagatggaggctgtttttccttctctatccccaatctcaatctcaggaaaccacagtaaaaacaaaatccttccactcagaacctgtcgtgttttgccgaggaagttttctgtgaatgtaacttattttctgttttgtgttttagtctctggccctcgattcctcatctacagcacaagaagttttggactagctttaaaatttctttcaaaaattctatgattcatatgggagaggccagaggttgtgatcacaaatgttttcctggctgattccaaatttagaagcaaactgtggctgtttgacttcccagtcaaacttgaacatagcatggatttcacatttaggggtgttttactaccacctccagaacttgcttcagtgaaatatgcatgttcttaaagatagcaggagtactttttttcatgtagttatgaaagacatttttctcttttattttgggggtaatattttaccgtttgttccttgttggctgaaaaatctaatgctaataaaagctactagcttgaatagtccaaaagcaaacccaacagatagcagtaaattcatttttctttttccctttcctatagtactctgccaaaactggggctttttttcttcatcctggctgcctgtgtgtttgaaaatagatggtcagcttaccataaatatattcacatgtagaaacttatatgtgattaattggcttgatttatttttatcagaagaaaacgtatgtatgttccttctctggcttatgaatactatccgtcttatgtttgctttggataagcattttagtcttcctgtatgtcctaaaacgcgcgcgcgcacacacacacacacacacacacacacatacacacacacacacacactttctaatattgtactgaagccagtttgcaagtctggttccacagtacaattgctctgaaggaccaggagaaattgaactgggaaggaaaatttgtattaacttcaataattcccagacaagttagttcaaatcatttttatctagtatttgctatttgtcacaaaggattcaaaacataaatatgttgtatacaaaatctcaaagagatgtctcaatacccagatttgggtcctggctctgctgcttcatagctgtgtgattatggaaaatcacttaacttcagtggtctttacagttgttttttaaactagagcagcagctcttaggattgtttggagggtcaaatgagaagttttatcaacgtgttttgttaaaggtaaagtactatatagatgtcattcatttagacacttactgagctgcctgccatgtactgagtggagtccagacctgtgcataaacaaagcaaagcactggggctatcttaaggatttaggtgttcagagatgtttcactgggagtttggaagaaggcttgaccactgcagtgcagtgttctgggaaagccctctggctgaagagagaatcaaagtggaggtgatttttagggagatctgtaacggcacgaaggaagtaggaaaatccaagatatgttcaagggatggtcaacagaaactttattttagggtgaggtagttgatggggagtatgactaaggtttccaggaaaacatatagggaagttaaaaaaaagatagctcttttgtgggggatggaaagagaggaggggcgtgggtagtgagtttggcaaaaggacttacttgtgaaagagagagttttaacagatagtgctagacatgaggctagagctggaggaaccagaggtagaaatggggagccaagaagagttcccctttcagaggccggccattgctttggtcttggatgtgaaggtcccagaggaaagcagaacagaaggtgaggcagaccatcctttatacttgaagtgctaacgtttccaaaaagcactcctaaacttctggacctggttgaagaagaatgtgagccaaggcatgaggaagccaggagctgtaagacagtgatgcctatgaacagatttttctgaacatttgtgaacaaggataaggttgaactcttgctgataatgtgcttaatggtttgaatcatggattattgggccgattagctggtcagagcccttttgctgatgcggctggctgacttgcttactggccaagagctgggagtagaacacagatgtcccaacatggtgctgcatttggaagtgtttcataggagtgttgaaatcaatgcatttgctttagggataaggcaaagttatgagatcccagttataagtaatatagttgtgaattctactctttttctcaaggtcatagtaccctcaacagagctcaactagcctttctaggcctcagtttcccgtcacataaaatggaggattatcatgaagttttgaagggaagatatatgtgaaaatattttgaaaccttgaagtaccgtatgagtatgatttgtataattccttaataaacctgctgatgtgtcacagcccccacagggcctgcttgtcagccaggtgatcctgatagatacagcccttgagccaaaccctgaggagcatgtgtattaaagcagacggatgaggcataaatgcgtttggtttatcacttggcagagttggatgacaggcttgggtgggggtggcaagaattaaagtgagtcaagattggcagaaatgtaagacgtgtatgtagtggttttcttctttttttaagcctttgtgattatgtcaaacttttgttaatataattgatgatggtttgaggcagtagtttgggggaacaggatctcaggtattagatctggattcaaacttcagtggtgaccatggacaaattaacctctctgaaccttagatttttcatctatgaaatgggagtactaatactacctcttagggtcattgtgaagatagtacaggatttagtgtatattcttttgttgaggatttcttgtaatgattttcattacaaagcttctgacacattaccagttagatgcttaaatatttgtacatgtgcttaatttttttcatatctctaatatttctagagaattattataggtactcacaagaactgcatctggattaagacatattagccctggctaagcagggtgactcacacctataatcccaagatttttggagtctgaggcaagagaatcacttgagcccatgagtttgaaaccagcctgggcaacatagtgagaccccatctgtataaaaaaatttttttaattagcctggtatggtagcatatgccggtagccctagccacacaagagtctgaggtgaggggatcacttgagcccaggagttttgaggctgtcgtgagctatgattgcgccgctgcattccagtctgggcaacagagcgagatactgtcttccaaaaatacaaaaaaatttattaggggtaggtagtggtgcacatctagagttccagctatttggaaggctgaggcaggaggatagcttgagcccaggagttcaaagctataggacactgtgatcgcatctgtgaataaccactgtacgccagcctgggcaacatagtgaggtcccatatctaaaaggaaaaaaaaatgtactacttgtatcactggactcaggatgaaaaaagaggagggtgggagataggtttaggcagagatcatctattcaaaatgcctttctttctttttcttttttttttgagacagggtctcgctctgttgcccaggctggagtgcagtggcactatctcggctcactgcaacctccgcctctggggctcaagcagttctctgcctcagccccccaagtagctgggattacaggtgcccgccaccacacccggctaatttttgtatttttagtagagatggggtttcaccatcttggccaggctggtcttaaactcctgacctcgtgatccacccacctcggccccaaagtgttgggattgcaggcgtgagccaccgcgcccagcccaaaatgcctttcttgaagctatgggagatagagaagaaaataatcagattaataatcagaaaacagtaatcagatacctggtcatctggttataatagcttcaagcatatatggttaaatagtttttgttttgttttaaaacaaaattttaaattttaaacaaaatttaaaaatttaagagacatggtctttactgtgtcacccagactggagtgcaggggtgtaatcatggtttgttgtaaccttgaattcctgggctcaagtgatcctcctgcctcagcctctgcagtagctaggactacaggcacatatccctgtgcctggctagtaaataggttgaaataacttaaagttatttatttttatttatttattttttgagactgagtctcactgttgtcctggctggatggagtacagtggcatgatttcagctcactgcaacctctgcctcctgggttcaagtgatcctcctgcctcagcctccaaagtagctgggactgcagatgtgcaccaccacacctggctaatttttgtatttttagtagagatggggtttcaccatgttggccaggctggtcttgaactcctgacctcaggtgatctgcctgcctcagcctcccaaagtgctgggattacaggcatgagccactgcacctgaccaaattattttttaaagactataatttaataacaatttttcttccccttcattaagctttaatttgttaagagttaatggctctggtttaagttgatagctctgaaatagcaccttgcatatttcacccctttctttaactgagcagctgctgttagctttgcactctactgatctctgtgaagtttcaagaaatattagtgaaatgtgataggtacttcttaggaactttgcttgaaagaatagcggaccagaatgttgatggaattattttttattatgtgcatattgcttttttaaacttttaacaattatttaaaaatagagatgaggtcttactatgctgcctaggctggtctgggattcctgggctcaagtgatccttccgcctgggcctcccaaagtgctaggagtataggtgtgagccaccacacctggcctatgtgcatatttatttaacctactatttcaccacttcctggcctatattaaccctctgttccagttaaagtgatcttctaaccagtcccttcagctccccatatggtctgttgcttctccatctttgttttcatgggtttcttcctgtctgaatgcccttctagcccttgttagtttttcctgttctcttctataattttggactgtgccatgtaatacaacacttctgtcttgtgttcagtttcatttatagaagttttactccctaaatgataaactccttaaaggtagggcccagcttgtactatgagtccttcatcacttttgcctcccacaatgctgaagaaagagtagtcatgaaatgtgtagtctggagtcagacagacatgagattgaaaccttgctctgccacttaccaactttttgactttgagcaaattacttaacgcctctgagcctgctgctttctttataaattaacagtgagtaccttaatatataatactaatataataagtgcttagtaaaggttaaatattattgtttttctttaattcagcagttgtttgtcgagcacctatacacatgaggcacttatcaggtcctgggaactggtgtagaacaccagacctctgccttgatggaactttatggaccaatagagaaaatggcactaaatgatatataattataaatgtagtaattaccaagaagaaaaatagtaaccacaggaataattgacaggtcttttttagtctggggcattaggaaagattcactgagaaattatttaaactgatacttgaatagaattttgccaggaagagtatctcaggcagagagaacaacatgttcataaggcctgggtctagaaagagcttggcatactccaggatctggaagaaggccagtgtggttgtagcagagggaatgggggaaggggttagcgcccacacccaagggagaagcagcaagcctttatggttctctcggctcagtcagctggcaactggagcatatctctctgtcactttcttttctttaaaatgaactaagatataacaattaaatgcaaaaattatgaaatgtagctatttattgagaaatgaattgtttcatggaagtgactttcaaaaactaagcctacccttttataagtgccaaaggttttttgtttgcttgcttttttaatggaaatctttctaatatacttctctgccttcttggtcaacagtatgagcctaggtcactaagaagagaataaattatgctataccaggactgctgtggtttgaatgtgcctccccaaattcatgttttaggaacttaatcgtcaatgtaacagtattaagtggtgggtctttaagaggtattatatcatgagggcaccaactcatgaatggattaaggcctttatcccaggagtgggttaattataatagggagagagtttggtcctatttcttttctttttgttgttgttgttgttgttgagacagagtctcactctattgtccaggctggagtgcagtgttgtgatctcagctcactgcaacctccgcctcccaggttcaagggattctcgtgcctctgcctcccaagtagctgggattacaggtgtacgccaccacacctggctaatttttgcatttttagtagagatggggtttcaccatgttgcccaggctggtttcaaactcctgacctcaagtgatccacctgccttggcctcccaagtgctgcaattacaggcgtgagctaccatgcctggcctggtcctatttcttttctgtgtctcctgtgcttgcttccactttctgccatgggatgatcctctgcagatgcctatgccatactcttggacttcacagcctccagaactgtgagctacataaacgtcttttctttataaattgccctgtcttggatattctcttatagcaactgaaaatggactaagacaatgactcacagtattttaatgtggtatgacatttaatacccacaggagctattgagatatgtggggctatcttctcccatttcagatgtcctggattataaacttaatgccattgtctgcctgtttgcttctttgctgcagaaatgatattccctttgtaattcctcttgtaatatcctcttcctcttgctgttgtccctgtctgtctctacatatatcaccctcaaatttgatttgcttcctctctatgctgagaaagcagatttctaatattagacaattctaaccggtttaataaattgaattagagtgatggtctgcaaatttctcttagaagtcaaatgcacagatttttaatgcatgatagtgacatcagaggtctccttgcttcttttcggtgagtatccgggttgctgaggcatctgaatcatggaggttgctgttgcccctctcctttgaacactggcttattgtggagcagggagctgatctcgaaaacaacaaaaacccagatacatagcagttgaaaagcaaactgagtggctaaattattgatgagtcatagaattttaaagcttagagagactggaaagattgtcattctagcccccgcacttcggtaatgatgtcaggttgtgctgcccaatttcacgcagcgttttgtagagctggaaataaaatttgggttgactgattattagcctggtactctcctctgtatcatgctccctcagaaaactctgaataattaaatagatttggaaacttgtacattattttgtagttaattttttcatttccaagaatagacttcatgagaactgggacatttgtgatcttatttctggctcatgttttatgattctagcagtgcctaatttaacagaactatattctgttaggattttcttcctgcctgcaaaagcatcactcaggttgtgttctaggcctcactggagtttggaagcctaatcctagatgggcagtctgtatgggatcaccgatgccttgcctttgtaattctcagttttacccctgaggaaatggattcccaacagataagatgatttgtgcttaccttcccaaccagttagttactgagctaggcttaacgttcttttgtagttttattttcattgtgacaggctgacttctgtagattaaaagtctagtatgtttagcctttatttttagatttctgtacataagatgcctgttgataggttataatcttcagtagctcagagcatgtattatcacagcacatggtaggcatgcagacatatttgttgaaagagggcaggtatgtgaagaatgccatcattgaattcacttccttctttgcttgtcaaaaaggctgctcctgatggggtcaggccatcagcaagtggcttttaagctgggccttgccttgggaaaactgacccacatgcaatagtgcaggtgttagttttttcagtgttttatttttgatcatgtgtgtaactaaacatgtaagtttctcatgactggatttttttccaacctacagtgactcttgggaccaactttaaattttccaagcttatagtaacagtaatttaatttggtttctagtttaattagatgggaagatggttgtttccatgaagaatcttgtgaacagaacctagggggtattcagacgatcgtagaaatgaacattgtgctaattcatgaactctaaagtatgggggccccctgctttaagatggtaggcaataaatgcttggatgagtcttatatcatccgttttcaaggtggatgcattttagagaaggtagtacaagctgtcccctgctttctaacataatgaattcctgaaaacctatttgacagtcagatggcaactataaatgccagccagttacttctgcttcccagagctcccctaccgagggcagtagatggctgttggtaccatctgggacaccagaaatcactgttcaataggtaatggacaaaaggctctgaatgtgactctgaaaaggaagtttagtgttatcagtcattaatgatattaggaggtctaccttacatcaagaccacctatgttcctgtgcctcagtgtagcaggggctctttgacctatcctgtaaccttctggtatatctgttaactagtgtaatataaataagaataaactaacatgcgtccaggcgtggtggttcacacctgtaatcccagcactttgggaggctgaggcagacagatcacttgaggtcaggagtttgaaaccatcctggccaacatggtaaaaccccatctctactaaaaatacaaaaattagccaggcatggtggcatgcacctgtaatcttagctactgggaaggctgaggcatgagacttgcttgaacccagaaggtggaggttgcagtgagctgagatcatgccattgcactccagcctgggcaacagagtgagactttgtcccaaaaaagaataaatagataaactgatatggtctatgtgtactttttatatcaccctttcctttatactttttctttccttccttttttttttaagtaaaaatagcttacttatatagttttatttttaaaatgatttctgccaattggaggtgggatgagagtaatttatgcactctagaaaaactataaagaagagtgcacccctatcaattctataataccacttaaagacagttgctattgatattttaaagggtatccttccagataccttttttttttcttttttaagggacaatcttgctctgtcatccagactagagtgcagtggcacaatcatggctgactgtagccttgacctcctgggctcaaacagtgtatctgggacgacaggtgcttgccaccatgcctggctagtttttattgttgttgttattgttggttttttggaggcaaagtctcactatgtttcccaggctggtctcaaactcctgagcttaagcaattgttctgcctcatcctcccaaagtactaggattataggtgtgagccactgtgcccggcccctgataacattgtaaccataaatatgcacatatgatgtcacatgctgttttgtagcctgctttttactaatatgctctgagtatctttcaatgtcagtaaatacctgaaacattttagttttgggttttttaagatttttttaaacgtttcttctttttttccttgttcttgaaacatttttaatagcacctgatatattgttgtatggcataacataatttacttaacaaatctccagttcttcatttataatatacaggtatagtaatatctcatggggttatgtggattaaataataatgtgtgtaagatacctaacacagaagatgacatgtggggaatgttcaatagttgttagctgcagtaatcaccccaacatatgacatcttttataaaggtatgtgattatccccttatgacaaattcctaagaataggatttgctcaggcacatgatacggacgttctcagtttttatttgcatcaccaaatagctctccagaaaagttgcagcaatttatgtactcccacccaccgtagaagaaggtgctctggtccctatgccctcactggatacattttgtcaagtcttttaatctttgccagtctgaaaggcaaaaatgtcatatttttctttttctttcttggctcactacaacctctacttcctgggctcaaaccaccctcccatctcagcctcctgagtagctgggactacaggtgcacaccaccatacccggctaatttttttttttttttttttttttttttttgtggcgacagggttttgccatgttgcccaggctggtctcaaactcccaggctcaagtgatcctcccgccttggcctcccaaagcctgggattacaggtgtgagccactgcaccggcctgttctttttgttttagagattaaatagcttttcaaatgtttattggccatttctttgtccttctatgaattgggtgctcatgttctttccctattttccgaaaacctgtttgaggttttggcctgtttcctactgatttgaaaaccctttctatattaatattttgtcatgttacaaataattttatattaattgaaaccctttctatattaatactttgtcatgttacaaatatttttttccagtttttttcagctttctctttggtgttttgcaatttaaactttttacatagtcagagtaaatccttaagtatgagttctgatttttgtaccatttttgtaaaggtcttcccattccaaggttataaaaatattcgcttatacttctagtatcattttttgacacagggtcccactctgtcacccaggctggagtacagtggtgccatcacagatcactacagcctcgaactcccaggctcaagcaatcctcccacctcaacctcctgagtcgctgggaccacaaactcatgctatgccaccacacctggctattgtttttttgtttgttttcttttttggtagagacagggtctcactatgttgcccaggctggtctcaaactcctgggctcaagcagtccacccacctgggcctcccaaaatgctaggattacaggggtgagccactgtgcctggccatttctagtatttttataatttaatttttttacatttaaatcttcgccctatatggaatttatttaggcattttaagaagggagttaggaattcagctttttattttattttttttccaaatagccagtttttccagtgttcttataccactaacttgaaatgctagctttatcatgtgctaaaagaaacctcatccattcctggatctgttttgctctattgattagtctattcctgcgccagtaactctgtcatgggattaataaatttttccaaaagtggcaataatttcatgctcatctgctcctggtagaatcaagctgacatttcacccagctactcttaaacttcttggcttctgtgcttcctatcctagggtaggattaggtcatctgaatgactgtatttgctctgggctcctcagggtactggcttttggactgttaagcacagaaacagcatatttacatagttttccttaattttgacctgtttctagatcatacgtttagctgactccttagcaatatgaagtgaccagatcgtgttctctttgtgccaaatgaagcttgtccaacccacagcccgtgggccacatgtggcccagggtggctttgaatgcaacccaatacaaattcgtaaactttcttaaaacattatgagatttttttgtatgatttttttttttttagctaattagctattgttagtgttaatgtattttatgtgtggcccaagacaatttttctgccagtgtgccccagggaagccaaaagattggacaccccaacaatctgcctcttaggcatgctacattagagcaacacagctattttttttttttctttttgagacggcgtttcactttgtcacccaggctggagtgcagtggcgcagtctcggctcactgcaacctctgcttcctgggttcaagcaattcttctgcctcagcctcctcagtagctgggcctacaggtgtgtgccaccacacccagctaatttttgtatttttagtagagacggagtttcaccatattggtcaggcgggtcttgaactcctgacctcaggtgatccacccgcctcagcctcccaagatgctgggattacaggtgtggtgtgagccatcatgcctggcctccagttattgtttaccagaaacaaaacatgcttcacttctccccacactctccatttgaattatcatttatacaactaacacataacatctttatatatatatatatatatatatatatatatatatatatatatatatatatatatatatatatcattcactctaccttctgttggctggactctctaacatagtactagatgtttttatatgattcattattttgatattatagaacattcttcggtaatactgtgtcagaggttttgggttttcccttcctatagggattattccgcctttcagttatttctggcaacaaagctttatcctctgctcatatttcatttattcttcttactttgccttgattacagcaattgagccataacttattggctcattattttcaggcctatgtatcatcagacacctttcctgtctaagtgatccagtggcctctctcagctttctttgggtctttcaagcaggagtactatttctaaagtgtcttcttaaatatatttccttttcactatttttattttccttctatttcaaccttaactttctttattctgaccttgagattcttcttattattattcttttaaatatagaccgggtctctctctgttttccagactagagtgcagtggcatgatcatagcttactgcagcttcgaattcctgggctcaagtgatcctcctacctcagcttcctgagtagctagaactacaggtgtgtaccaccatgcctggctgatttttaaactttttgtagcgatgggggcggggtctcactatattgcccaggctggtcttgaactcgtggactcaagtgacctcccacctcagcctcccaatgtgctgggattacaggcatgaaccaccatactcagcctgaaattctttttttattttaacaagtcttaatagcatttactgtatactcagcattttactagatggtgatattaatagattttatttgtggtgttctttgaaaattttcaagatacttgcatattatcttcctgtgtgttctacctgcaccgctgccttctctcattgccttgctcttgcttatatctgcctcccaactctgtaaactctgcttaaatctcagtagtcagacctttatttcttcacttgaaatttgaatttctcttctatatagactacccctgctcagtgcctctaaacacttcgacgtgttcagggcatctttaccaatgtttagctacgtgaagttaatggtaactacaatgggaaagagaggagtaaggtcaccatcatgtgtgaacatctaagaacacataccagtgtataacagtgtcttggctggctggaagagcataggaataaacgctattcagccattatttactgagacagcagtaaccgtgttagaaggaagattacatacagatcaataatgttagttcaggacaaacagctatcatgagttaaaaaaaatactaagaaaaagaaataatgttagtagcaggagtttgtgatagacttttacagagatgtttgtggagcatctaataaatataagaccttgtgctaggcctgatgggtaataccaaattatagcgtctgccattaagaatttatagcataatttgagaggaagacaaatatgtaaatagttctacatgtatagtttacatgtacatatagtttacatttatatataaatataaatagttatagtaccaggagtgtctgtgaatgctgtgaggataatgcttaggaagaggagatcactttgagctgtgataattacaaaccagaatggttggttttacagtgaaagatgggacttaggctgtctttcagatctttttcactggtatagtctgtcccctgtggctgtcaaaaagaaacacccacaatagaatgctgaggagcaatggacaagtgcagaaacacagaacttttcctttttgaaagttgcatttttcaacttttagatttaggggtacatgtgcaggtttgttacctgggtatattgtgcgatgctgggatacaaatgatcccatcactcaggtagtgaacatagtacccaaaagttagtttaccagtactcacctgcgtccctcctctaataatcccgtttctgttgttgccatctttatgtccatgagtacccagtgtttacctcccaatataagtgagagcatgtggtatttggttttctgtttctgtgttaatttactgagggtaatggcctccatgtgcatccatgttgctgcaagggacatgatatcattcattttatggctccatagtattacatggtgtatatagaccatattttctttatccaatccactgctgatgggcacctaggttgattccatgtctttgctattgtaaatagagctataattaacatagtgcatgtgtctttttggtagaatgatttgttttcttttggatatatacccagtaacaggattgctgggtcagatcatagttctcttttaagttcctttttttttttttttttttgagatggagtctccctctgttgcccaggctggaatgcggtggcgcgatcacggctcactgcaagctccgcctcccgggttcacgccattctcctgcctcagcctctccgagtagctgggactacaggcgcccgccgccacgcccggctaattttttgtatttttagtagagacggggtttcaccgtagtctcgatctcctgacctcgtgatccgcccgcctcggcctcccaaagtgctgggattacaagcgtgagccaccacgcccggccctttaagttctttgagaaatctccaaatcgcttttcacaggggctgaacattccctccaacagtgtataaacactcccttttctccacagcctcaccagtatctgtttttgtgtgtgtgtgtgtgatgttttagtaatagtcattctttctagtatgagatggtatctcattgtgaaacctgcatttttgaaaaatagtttcacttgctatagaattacagcttgactgtttttttgccagtactttaaatatgttactccactgtctggcttgcattgtaggaagagtcggctatcattctttgtttctctgtatgtaatgtcatcttttttgtggatgcttttaagatttttctctattgctgattttagattatttgactatgatatgatgtgctttggtgtatttttcatcgtgtttcttgagcttagggtttctgagcttcttggatctctgggtttatccttttcatcacatttggggaaattttggctattatatcttttttttttttttttgaaacggagtctcactgtcgcccaggctggagtgcagtggcgcgatctcggctcactgcaggcaccgccccctggggttcacgccattctcctgcctcagcctcccgcgtagctggtactacaggcgcccgccacctcgcccggcgaattttttgtatttttagtagagacggggatggtcttgatctcctgacctcgtgatctgcccgccttggcctcccaaagtgctgggattacaggcgtgagccaccgtggctattatatcttaacttttttttctgtctccagcccagcctcctctagatgccctgattgcatatataatcagctgcttgaagttgttctacttcaaaaagaatgaacagagccatcgctgagctgtagaacaactttaagaacatttgtagaaattgtagaacatcttctgaattgatagctctgttcattttttgtctttttttatctctgtgtttcactttggatagtttctgttggtatggcttcaggttcacactcacctcttctacagtgtctaatctcctgttcagcctatccagtgtttgtttttttgtttgtttgtttttgagacggagtctcactctgtcactcaggtggagttcagtcgtgcaatcttggctcaatacagcctccacctcccaggttcaagcgattctcctgcctcagccttctgagtagctgggactacaggtgtatgtcaccacgcctggctagtttttgtatttttagtagagacaagttttcaccatgttggtgaggctggtctcaaacttctgaactcaggtgatctgcccgcctcagtctcccaaagtgctgggattacaggcatgagccacagcaccctatccagtgtacttttcatttcagtcattgtaatactcatttctacaagtctaatttaagtctttttcttttctttctttctttttttttttgagacggtgttttcttgtcacccaagctgtagtgcaatggtccaatctctgctcactgcaacctctgcctcctggattcaagtgattctcctccctcagcctcttgagtagctgggattacaggtgcccaccaccacacttggctaatttttagtattttagtaattttcgtatttttagtggagacgggattttaccatgttggccaggctggtctcgaactcttgacctcaagtgatccgcccaccttggcctcccaaaatgctgggattataggcatgagccactgggtctttaaaaaattttaagtctttaaaaaaattttttttctttaacattctcaatccattctctaatttcttgtggagtacagttacaactgttgcaatgtccttatctactaattatcttgttatttctgagttagtttgatttttctcttcattatgggtcctgatttcttctttgcgtgcctggttatttttaaaaatttattttaagagacagggtcttgctctgttgctcaggctggagtgcagtggtatgatcatagctcactgtagcctcaaactcctgggctcaagagatcctcctgcctcagcctcccaagtagcgagggctacaagcatgtgccaccatgcctagctgatttttttaaattgtttttgtggaaatgggggtcttgctacattgcccaggctggctttgaactcctggcctcaagtgatcctcccacctcggcctcccaaagggctgggattatagacataagctactgcacctacccacctgatgatttttcagttggatattgtgagtcttagcttgttgggtgctagatatttttgtattcttttaaatattcttgaactttgttctggaacactggttacttggaaacagtttgatccttttgggtcttgcttttaagcatttttaggcgggaccggcacagcgttaagtctggggttatttttctttaccacagaggtaaatgtttctgagtactctacccaatttccttgaaataacgaggtttcctattatggttgctggtaacaggaattattcctgttcctgtgtgaggtctgaatattgttctctgccgtcctttcaggtaattatttccctggcctcaggtagtttcctcacatgcgtgtgctgatgggtgttcagctgaagacttggtggggtggctggggaggccccctgctcagatctccagaattttttttctgtgtaagtctttcttctctaatcttctgccctgtgaacctctttggcctccccagacgatatatcagcttcctctcttcagtttaggaagaactctggactctgcctgggtgcccctcccctgcactgtgcctgaaattctctccaggcagtaagccagttagctgtagggtcctccttgttcagttccttgtctttcaggaatcgtcgtcctttgtgcctggtgtccaatatcttggaaacagtcatttcatatattctgtcgttttgggtttttttttcttttcttttcttttttgagatggagtcttgccctgtcgcacaggctagagtgcagtggcgcaatcttgcctcactgcagcctccgcctctcgggttcaagcaattctctgcctcagcctcccgagtagctaccgcgcctggctaattttttgtatcttttttttttttttttgagacggagcctcgctctgtcgcccaggctggagtgcagtggcgcgctctcggctcactgcaagctccgcctcccaggttcacgccattctcctgcctcagcctccggagtagctgggactacaggtgcccgccaccacgcccggctaattttttgtatctttagtagagacggggtttcagtcgaactcctgacctcgtgatccgcctgtctcggcctcccaaagtactggggttacaggtgtgagccaccgcgcccggcccattctgtgtttttgttttgttttgttttgttttttattagctgtttccggtagaaaggtaaatgtgatccctgtcactccatcttgaccagaagcagaagtccacccagaaatgaacttttacatttcatactcatgtctgtcatggggaagttaagtgggcctggccttatccttttacttgggcgtcatctttttcaaaacttcataagtagttcttaaagaattcaatatttattgcgtgcccactgtgcactatgctgtgtgttagctgctgaaatgtatgggcttgattcctttaccagatggacctcaggtctagtggggaggacaggcaaggttcttgtggctacaattaaaagtgctgtaatacatattttgaaagatctaagatgccactgcagtgtagaatgacatgtacgttgtcttaaatattagaaatgattctggattaggattgatggctttgtgctgacttgtgaattctgtctcctaaccatgaccaggttgtctgccctttcctggacatccgtatttttttctcccattgaagtggcaggattgaatctgtactcttgggtccctagctctcctggatttatctcctttccatatgaccttttctttctgcttaacctttgggcctgctgtaacatctcatttcatttttcttttttaactttcaccagtataagaatgttagagactgaaatattaaaaaattaattacatttgctataggtagatgagtttttcagtgagtttgcccattttcaaaagcaaatcttcattggttatttggagtgggtgggagggacagcttaagggcagtagaaaaccacagttttgctagtaaatctggcctacatttccaaaggaactctttggatgatgagtgaggtccattaccatttcagttgtttcagtgaagctgagagttgccggtgacacgtgataatcctcctcattctgtagttgagcaataggaaaatgtgggtaatgccagtctgcattgactgggtcggctgtgtagagcattgcctgaaaagtaaaagttgcagtcctgattggctcaagactgatatcttacagcctgatgaagacaaccacgaattccagtgccataactgatggactttttcttttctcttagttatgacaaggaccttccttggaaagataacctgtgtttagatgactgtgatcttagcccttgtgatctgcctggtgcttgtggtagctctggatgttcctgtttttcctgaaggacctcattgatgtcatttcagacactatcctcactcaagagaatgtgaggttttgctatgtgtgaaatatcatataagacacactgctatgtcagtttttaagcctctggtttcagaagctctggcagccctactttttctcagatgcctggcaagcctgcatgtctgaatagcccttctttcctgcagaggctgtgagaagctctgccgagcatttgagagttaaccattatttacggagcaagacctgcgtgaggcactgattgtactaacttacaaaaattgtgtaagagattcttttgacatcaaaggtacttacggtccagaggggaaatcacatacgtgaattcggaagcccattcaagactgcaagagaaaattcgaagataaacaaaacagttcatgttttgagttctgtttctttagatttctatgtgggattggtggcttgagtgaccaagtagctggcatcccaaccatttatagacatgttctattttgaggttgagtttgtggtttggggaggatgtgtaatcattttcaacaaatgcttactgagtgtgcaaagtattcctgtggaaggcacagggagtaccaagaagtataaagttacattccccagcttccaaggagcttctcatatctgggagggcaaggcatgtttaagattttaaaatcttagtaagattataagtcttaagaaaaaagcataatcatccacatttattagaaatatatactgaactattaaactgtctaagaaatggggcttgggtggtgagcatgtggcctggaaaagagaaggatcttcactctttgctatatagactctatatagtatgtaatttctatatggtttgaaatttttgccaagtgcagttattacctctttggaatttttattttttttatcagttacaaaaattatagagaacagacgattgtattaatacatataatattaaccttgaatatctctatgtggtaggattatgagtgacttatctttattatgcgttcttataattgtctacatcttctttaatgaatatatattattgtataagtagagaaaggaagtatttgaaaaacaaaacccaaaaccacctacaatgattattataactatattttaacatgcttactatattttggatataatataccagctttcccttttttacctccttactctcactgcaactctagtaaggttgttttattattatcattattactattgttattaaataaaaaggtgaaacaaaggcatttgcttcttgcttctgcccgttgtcatttttgagtgagctagactagaagtaaaaggaatccagttacgaacttttcagctatactgtaaaggatgcccagaaaaatttaaattatgttgatttggttacaattacgcctgccagtgtgggctatgatcttttgttttaaagcatcctaaaaatactttgctatacctttatatttagttctgttggagaaagcaattagattgtcccatctcccatctccccatctggtgcagtaaagaaaactcatctgcttggcttactttgtgttagagagaatttaaatttccaagttatttgtgattcacattaagtagttaaatcccatccctcccaaattttgtactgggaatccatacccactttgtaattatgaacttaattactctgaacagtaataaagttcagatatttaaagaagccaaagattgaaggagagtggctgtcatttctaaattaattttttttccccttatagcatgtgtttgatgatctcagaggctcagtatccttgtcctgggttggagatagcactggggtaagtcatattttgagtctgttatttcagcccagcaagaagatgataacagatttggggaagggttaagcacctaatatcatttcttcctgaaactgtctttagcctcaatcacagaaaacacatgtttgcaagacagactttcaggaagttgtagttgtgttggttttgctttagaattgggaacatcttttttgcgggggggtggggacggagtttcgctcttgttgcccaagttggagtgcgatggcatgatctcagctcactgcaacctccacctcccgggttcaagcgattctcctgcctcagcctcccaaggagctgggattacaggcacccaccaccatgcacagctgattttttgtatttttagtgaagatgaggtttcaccatgttggccaggctggtcttgaacgcctgacctcaggtgatccacgcgcctcagcctcccaaaagtgctgggattacaggcatgagccactgcgcctggccgggaacatcttctgaccaccttcttccacggtgggaagatggacaccttttcagtccttggtggctgcttagcatcaagatgagcaagaagaaagatgaaagtgctctgtactgagaagggaagcgcacaatgcttggggaaacccctatatagaaacagaaaatgtccattaaaaacatcctggcacttttcctccaaattgtattgttcctgtgtcctttcctacaggtgtgttgagggactgtggtgcccatgggctcatggttgttcatctgttggtccctgcccctgccacaaaggaggtactgccaggattgggggaatggaaggaggatcagtcagctccttatccctcctgatatacagctgggctcccactaggaggacacgctgaggatacattggcccctggtcttaaatcaggacttgttgcctggctgtcttattatcctgcttgaacaagagcaggggcaacatctcctgccccctggtattccataatgcatgtgtcatagcattgaggcacatgatagttatattagaagcctaaagaaataaaatcttggtgctgaaaagcaaattgtaaatttcttattttgattaatttttaaactttcagtagaatttctttaagcatagttcagttttttctaaaatttgagttgtaccctaatttccatgatttacccatttatcttagatagttggtatctccaagaatttttttttttttttttttttttgagacagagtcttgctctgtcacccaggctggagagcagtggtgcaatcttggctcacagcaacgtccacctcccaggttcaagcaattctcatgcctcagcctcccaagaagctgggactacaggcaagcaccaccacgcccggctaatttttgtattttaagtagagatggggtttcaccatgttagccaggctagtctcgaacttctgacctcaagtgatccgtccgcctcagcctcccaaagtgctgtgattacaggcgtgagccaccgtgcccagccatctccaagatttctcatatggctttctgagactccctagactcttatagtaatccatccagaatcatttcctcatgcatagtttttggtagataaggtactgaaaaaatgaatttcatgaagaaccaacggcaaggagaagaaaaagacagacatacatgacacagtgatctctgtgagaacacccacgctattctagactctgtaaggagaaaagggaagagggttcttgcctgagagtatcttacaataatttggatacaaaatagttaaagccttcttttattttaatgtgtatttgagtagtcagcctcactgcttcaatggaggcaatggggatcatcccaacaaaatgagctgaggactttctcatcattctcagccctagtaactagatccttctagactttggggagtactacaaagtagggatatcaaaagtcttttaggtgttggcttaatctcgaacacatatcagcatgtgattggaatatcttttttatttacggaatgcttttttctctctccaggtcattctagtcttgactaccttccatgtaccactggtaattatgacttttggacagtccaagctatatcgaaggtgagatcaataacacgcgttggagcatttcactaagtaacattgagaatatagattctcccttttctagacatgatggcacgtaacagttgatgtaaaagatcttctagccatcctaagttttcaccagactgtcacactcagcacatgtttttgttgttgttgttgttgttgttttttgagacagggtctcactcttgtcacccaggctggagtgcagtggcgtcatcttggctcactgcagcctccacctcccaggctcaagccatcctcccacttcagcctcccaggtagctgggactgcaggcacacgctaccatgcccagctaattttttgtattttttgtagagacagggtttccccatgttgcctaggcttgtattgagctcctgggttcgaatgatccacctgcctccaaaagtgctgggattataggcgggagccactgcacccggcccttagcacactttttaacgtctactctttttttttttttgagcagggtctagctctgtcactcaggctggagagcagtggcgcaaacacagctcattgcaacctctccctcccaggctcaagccatccaccatcttcccacctcagcctcccaagtggctggcattacaggcacgtacctccatgcctgggtaatttttgtattttggatagacagggtttcaccatgttgcccagtctggtatcgagcgcctgggctcaagctgtcttcccacctcagcctcccaaagtgctaggattacaggtgtgagccaccatgcctggccttagcatctaattagcaactgaaagaagtatgaaaagggacctggttccaaggaggttggtttgacctgactcaggggcagaacaataaaggaagatgaagaaagagtgtatagtgctgtgtgtttgtgttcatttatatggatatttatttgtgggaaggtagtatggggtttaaaaagtctttctatttagtgtgagtacaaaatggttttttatattcctgaaatgaaaatcttcattgtactttcccagcaaatatttatacagcattttgaggcctaagcagattatttttaggtaagaaggaggctctcaggtcggacctaccaaagtgctttgtagtgttcacactggcgatgatggtggtaacatgtgttctggaaccacaacctatactgtgacattggtgaagttttagagttgtcttctcaaaggtatgacttggttaaaaagtaggttccgttccttagcagtaagattcaagaccaactaactcctagagattgctgaatgattgtgtcttctcaatcatttatgtctgtctcattttcccctagagacctaaagaagtaatgacataccagcagatgatatagaaactaccctagggtcagggtatctcccaggagtaatggtactttctcaaggttctttatttgactgctgttcttggcccaagtgggagtgaacccatgttcaagctctgaaatggattagcctaacctctcttccccgtgaggtatgaactttgactacatctcctgggcatggagccagaggtctctgcccttcaatacattgatgttggtcccagagaggcagcaaatacctttaggccaacaaggaattgccatctaactacagtgtaaattccatgaaggcaaggttcttgactaactggggtccccaggatctagccaaatgcctaacatatagtaggcaggcagcaaataataattgaataaatgaatgaatgtcttggcttctttataatttttagatggttaattaaatttttttaaatataggattgactatattttagaatcttggtgctagaaagcgctatagtaggtgactttgtttattcaatcagaacagtagttgaaccattttagatgaaaaacatcctatttggggagagaaaaatgcattttaaaatgtgtaactttgcttcagtaactctttcctgtggttaagaatgtttgctattataaattccctcctcacaaaattagctgggcatggtgtcacacacctgtggtcccagctacttgggagactgaggtaggagcatctcttgggtccgggaggttgaggctgcagtagctatgatcacatcactgcactccaggctgggtgacagagcaataccctttctcaaaaacataaaatatctcctcatgatagtttttcttaccaac

SEQ ID NO: 924 - DNA, 32744 bp, Homo sapiens
  source 1..32744: mol_type = other DNA
gttggcgccagcatccaggtaccgcgcgccacagcacctgcctgggcgttcccgcgcttggggcggggcttcccgcgtcccctttaagaggccgcatcacccgcccttgacgtcagagtgtttctccgcaagagcccgtgtcccgctaggctccgcgccctcgcgcccatagccccggcggcggcacgaccagaggcggccaggggagcgcgccgccccgctcggccctccagtccccctccgcctcctccctcccgcacagcagccgccagcgcggcctcctgcaccatgtcggtggccggcctcaagaagcagttccataaagccactcaggtaaggcgcgcggcaggtgcgtcccggggcagtccggggcgaagctgcgaggggcgcgctcggcgctggccgtccggcggcagcttggggagttcggcaccgagcctcgcccgcgccggccgcgccccgcctcgcaagccaaggcggcggctcggggcatccccggtctgggcgtccaccctcggtcccccgcccccggcttggtgcgcgctgccttcccgcgggtccccggcgtcctgcctggtagcgctgctcgccgcccccgcatcatctcgcgcccgtgctgcaggaaggggaccgcggctgcactgctgccgcggcgcgcaggtgccttggcggcgcggtgggagattatgtaaagtcgcctcttcacgggtgaccttgcggagtcggtgcacccggctttcccgggatgtgttggcatgagcggtggccgcactgggggtggcggggcggaggccggcggtttgcgctcctctcccttaccctgttgtcagaaccctccttccccgccgcccgcaggctccaggggaatggaaggctggggtcttcctttagggacccgcatacattaacttttacctggagaactcggtcgtgaaactcctttgaggccagggcatgacaaacagtctgcgggtcttaaatatttccctaaaacaaccaaattgttgaagacttaaaatcatcatgtattttaaattgtttttaataaatctttggcatcttggatgtgcccatttttctttatggggttaataagctgtgactgtaataaaactgattaatttagattctaataattaaaatcattggactcaaagaattttacataggggcaagtaagcgaatacttacgctgtgacctatttcttacataatgtgtgtgattactacttttttatccttctgaaataggttcaaatttatgggatctttaaggattttgatgacttaccgcgaaatgtttttcatgatttggtgttaaatagtttttcataggttagccttaattaacgagctttctcataatttctcggaagtagtgaggtttttcctaggctaccacagtggcagccttgttatgaaccacatccagaaaaggtgagggttgtgttttacagaaccttggttaacttagggtgacagatgcagcatgtaattcccgtcgtgtgtgtgtttgcacgcatctgcatcatcttcatcacacattcttgcctttatagaatcaattatacctgtcaacttaggaaatcaagaaaagtaagactatttctgtaaaaatgtttcttaatgtaattatttttgcttttctattataattggagttatctgtgacctctctgccagacatgtttatgaaagtaagtgatttgtttgttgatgtagtttggaaggcttctaataactttatactgcaagttctttcaggtttacagaaccaagcatatgtgctgcccaggaattctgtggcaggacttcttcgatattactaacctttttgattgctctactggtcacttctctatagcatatctcagcactgcgtttaccaacacatcttttttccacttggattctaaagatttcttttgcaaagcttagtgccctcaaaggcaattaagagtcttggctttggagtgggaaaggctaaggtttgaatcctgcctctgctgcttctgaccttgagagagtatttaacttctgaacctgtccatgctgaagtgatgataatttccgttgtctcttcagggttgaggtgaagagaaacgagtgtgtagaacacacgtataaagtgttcaataaattatagttattgacataaaggatatttttattagtataaaatactatcccttatgctgtgaagaagttacccaagctagaccttttagtttttccaacttaaaaaatagagcgctccatttccgctaaatcttgaagttctgtgtcgccctaaagtgtagaaaaaataatttaaactgcgttaggaaagaacttaaaaggttggagaaggtcggcatgtgatgcgatacggttaatgtttatcacaccgaatccaaatgcagaatcactgcgtcattgtcttccttttactgaaaagccttttatttgaaaggtgaagcagcacgtagtctcttatccataatttagtgtagcacactcttagaaagtctaaggcacaggtgactgttctgtgcatatgtatatttaggagagtatgtaaagcccatgttaatgtttgcatgtgacaaaaaaattagagaaatagtcctgtcctacttttgtagccatttttttccatcaggtccgtgaacctgatgttatctacagagaagctttagacctagaattacttccttttgagaactgatgtgctggataatatagcctgggtttgtttgtttgtttatttatttattcatttgagacaaagtttgactcttgtcgcccaggcaggagtgcaatggcgtgatctcagcatactgcaacctctgcctcctgtgttcaggcgattctcctgcctcagcctcctgagtagctgggattataggcatgcactaccacgctcagctaatttttgtatttttagtagagacagggtttagccatgttaaccaggctggtctcgaactcctgacctcaggtgatctgcccgcctcgattacaggctgagcccccgcacctggcctatagcctgggtttataagtggaaggagtctgttcacgcaaacgtttctttctatggaattgagcttttttgcttgtgttagtaagcgatgataaataaaacagtatattgtttgtacttggaatttctgattaaatgtgtcacaactgttgtcttatattagaattggttatttctaccttgttgctgacagttattttcaatatgtttacaatttggaggtaaaaaaatgcttttgccaagtaaaatttattagagaagaaaatcctttcagcatgaaaatatataatgataccaaaaattgattgatcatcttattttcatgtacttcattacttaattgctcataaagatataatttactgtataattagaataaagtattctttttttactgtaataaagggcagatgatcttgtgttgctcttttagtgagttttattcatattgagatttcattttacaaaagtcatgtcagtttttttacacttgttttaaactggcagcagcttagttaaaaatagctgtttccagtgaacatgaagctcctacaaaatctgtatttttaaaaattcactctatcatgcatatgatgtggacacattttgctttacaatatgtaaaagtctattataaagtaaaatatattaggtcattttatgagtttgctggagctgctgtaacaaagtactacaaactgagtcgtttcaacgacagaaatacattgtttcccacttcttgagacaagcacacttgaagtctgagaccaaggtgccagtagggccacgagctctctgaaggtatgagacaggatctattcgaggctgccttcttagctcttgtgctttgttgggaatctttgggcttccttggcttgtagatacatcaccttggtctctgccttcatgctcacatgacattctccctgtgtgtgtctcagtgtccaaatttccccattttgtaaggaccccagtcatataggattgggcaagcccatcctactccagtatgattttatcttaaataattaccatctgtaatgcccctatttccaaataaagttgcattctgagctattgtaattaggactttaatatgaattttgggaggggcacagttcaatccataacagtcgttatttgcataaaaggattaaccacagtattctatatttgattcaacatctaagaggacagttcagcctataaataacatataactttctattgcatcaaaaagatatactttctccttttttaatgagttggttagtatattgctaagttctgaatgtgtccctctaaaatacgtatgttgaagcttgactgccaatgtgacagtattaagaaatggggcctttaggaggtgactaagtcatgagggcactcatgattaagtcatgaatgggattagtgctctcttaaaagaagttgaaggggtcaccctgtccccttccaccgtgtgagggtttagcaacaaggcaccatctttgaagcaaagggtgggccctagccaggcacaaatctgttagtgccttcatcttggactgctagcctcccaaactgtgagaaataaattctattatttataaattaccccgtctaagatattttgttagtagcctgaacagactaagtcagaaatatacctattataaattgtgttttctgatttttttaaatgataaaattaatttgggtaggctgggttttatgatacagtctggtatatgtttatttgtcacactcagattccttaactgggaaaatttcatcatgtttgtgttctgtgtctttttgttttacctaatttcctctttcagaatgctgtattttatatggatgctttgctcaggagaccattacataagtcttttcatgcatttgttgatttggtgagatgttaaacttactaagtattggattaaatatctaattagttatgactttatctcagtgagattttcagtttcttaattgcctctaagcagtcaactctctgctgcctttaaaatcttggctgtggcttgttgcttgacccaggatttctacacctgtaccctttcacattcttagccagtagtctctaataggctgcaaggggcctatatattttataaaattataagtaacattttatacatgcatttttctgagggagaatgcccttagcctgttaccagattcttaaataaattcctaattgctgccccttcctcccctcgaaaagtaaaaatagggtggggcgtggtggctcactcctgtaatcccaacactttgggaggccaaggcgggcggatcacttgaggtcaggagttcaaaaccggctttgccagtgcagtgaaacctcgtctctactaaaaatacaaaaagattagctgggcgaggtggcaggtgcctgtaatcccacctacccaggaggctgaggcaggagaattgcctgaacccaggaggccgaggttgcagtgagtcaagatggtgccactgcactccagcctgggcaacagagtgagattctgtttcaaataaataaataaataaattcatcatgtcatcaggagaaagtggatgtttcttacaataatcactccaacagttctgttactgggctttaggatgcctgatcaaaatgcagccttctctgcattaatttagcagcaatcaaatgtaaaaaacctttccagaggtgtcaggattgaatgaggtaatgcttgtgagagtgccatgcttgcataataaggatcacttgaaccatgtaaaacaaaatgttgttaatgcgcttgaagtcaacgatacgggcctgtggggtatatgaaaagaaagtggtgactgaaaatgatttctctgtagactgagagtcctcgtgattgaagtttgtgttgttgaaacagctatatttttgcaagcttttttccccatagtgattctttaatattttaaattgagtttatatgaattttggtttcagtctacttagaaaattttaaagtaacctgcaaattaattagaagtaccctagaaaatggcaagacttggttggggcaaatggtgactgttttgagacagatgtcattgtggaagggagaggtttaatattcaggggaagggagctgaagcttgcagagcagattccattctgccaagcctcttgtgctgcatacagagtctcagggcatcaagcaacccgagggctttcttcagaggagtagcttgaggcagcggcgagagaagggcaggacacactgacaaatgaataatgagaattaggtgaggagatggagtttaagaactgcttcaaactttaaggtggatacctgatggggctttctagagatgagcaattcttctcaatttaaggccagataggggagatgctaagtaggtaagaagtcagtggattttttggcctccttttttctctttttgttcttttaatccttcgtacccttgtcctgtgttcttttaggtaatgttcagtgaggtgtagccacaagaggggacataggagaggctcaagaaaacagagtttattatactcacatgtcttagaatgacaatcactgtacaggaggataggaggggggacacgtggggtggaggtgacagctctgagagcaggatcagctaagcaggtgggaaacaggtgggagcagagagagcaaggactgtgggcaagtgcctttactagtgatctcagtgcagttcacagctcagtgcagttcacagtgcgttgcattggtgcattggtaggtcgtggtcagaagaagacagagaggtgaacttgtggtaggggccaaccttatcaaacttgtgcacctggttacctgggtggggtgttcacagttagcgtatgtgggaatgaatgttgaggcagcaagaggcagcaggagacaacatgtgaagttttgaaactttgtagtacaacccttctcagtgtttttggtttagaatttattgtttccataatcacttaaggagcctaaaagcttaagaatgatgtacatggtatccgatggataataaagactaaagagagctataactatacttattaaaatgccatgattgtgagaccctgccaagtcttttgcattctaccaacaaaatattttcatgctatactaaatcattagctgatgacaaatgcttcaggaaataatttcactatttataaaggttttacatttagtacaacttctaaatgccaaatatgatgttgtagttgctctaccctaatctccctccgccatcccctgggtcaaattgtatatagtagtaatgaatatggagaagctgtctgtaatactcgtgaagaacccacagctccatggaggtttacttggatacttaggacactgaaggacctctaggcagtgttttctgcctttttttgaattatgatatatataaaaaatagaaatatcttttttataattcaaactaacctttccccatagatactaatggaagcagttttataatgctgagaaacatctcaatatcaagctatgtattagtctgttctcatgttgctaataaaggcatacccgagactgggtaatttataaaggaaagaggtgtaattgactcacagttctgcatggctagggagggctcaggaaacttacagtcatggcagaagggggatcaaaaatgtccttcacatgacggcagcaaggagaagtacagagcaaagtggggtaaaagccccttataaaaccgtcagctctcgtgagaattcactcactatcacgagaacagtgtggcggtaaccacccctatgattcaattacctcccaccaggtccctcccatgacacatggggattgtgggaactacagtttaagatgagatttgggtggggacacagccaaaccgtatcacagaataatgcttgaaagaaacataaagcagatagcctatgcttttaaacgtacaggaaatcggctgggtgcggtggctcatgcctgcaatcccagcactttgggaggtcgaggcaggcagatcacttgaggagtttgagaccagcttggccaacatggcaaaacctcgtctctactaaaaatgggaaaattagccaggcttggtgatgcacagctgtatttctggctactcaggaggctgaggcaggagaattgcttgcacctgggaggcggaggctacagtgagccaagatcacaccgttgcactccagcctgggcgacagagcgagactgtctcaaaaacaaaacaaaacaaaacaaaaagtacaggaaataatgtccacagtgaatgactccagtgaggaaaggagagaaggggagtcaggacagttattgtccataacagtgatggcatcctgcagggggcattgtgaaatcccctgcctgccagtagaggaagttccttggttttacaatctggctctgcaatctgggaagaactcttgttctttcttatatatatttggccaggtctaaggagggttagaggaaatctgccctctttgggaacggcataacttttcagtcaacttcctgtttatttaaatttggggattgttttacagtcatagggttttcactatccatggtagatttgagtaatgaaatttcttcataaacttagtaggcttctggccaagtgcggtagctcatgcctgtaatccccgcactttgggaggccgaggtgggcgggtcacctgaggccaggggttcaagaccagcctggacaacatggtgaagccgcttctctactaaaactacaaaaattagccaggcatggtggcctacgcctgtagtcccagctactcgggaggctgaagcttgaacctgggagagttgcttgaacctgggaggcagaggttgcagtgagccagattgcaccactgcactccagcctgagcagtagagcaagtcactgtctcaaaaaaacaaaaaccaaaaaaaaaaaaccagaaaaacttcaacttaataggcttctgatgtgttttcttgtgagtttcatttgccaatttctatgatggaaattcttttttagacctaattttcatccagtagacttggttgtgttactctgaacttaacaagagggcctgatactttggcttaaccaagaagtcttaatggtactttgttgctcaaagtctttttcatttatatttcccgttatttgcttcagggactcaggatgaccctggatcggttctgccatctgtaacatatggttttcaaggttgccaaagggaaagaatatgtttgaacaagcatgggagatgttcataagccaggcctggaagaggaatatggtagacagaatgctacgattgttggtgactcttgctcttgtgtactctcctcccctttgagtgtgggtgcaatgttcaatttgaaaagatgttattcctgagacttttaactttgtaagacaaaagggagattatatgattggacttaatctaatctcatgagccctttaaaagcaggatattttctctggctggtagtggaaggaaaaatcagagagattggaagtatgagcaggactggacatgctgttgttggtttaaagagggaggggccatgtgagtagtaatgcaggcagcctctaggagcagaaatcagctctttggtgaccatcagcagggaaaatagggatcttagacccacagccttgaagaatctgagaggaagggaattcttcccccaagcttccagataagagcccagtctagccaacgccttcattttggccttgtgaggccctcaacagggagctcacttaagcaggcccagacttctaatttatagaattgtaagataataaatgggtattgttttaagctgctaaatttgtggtaatttgttatacaacagctgaaaatgaagagaaggaatagttccttctgtttatgtttggttggctggaacttgtaacatggcccctctgtggtacacctaagagaaatggaagaaggcaagtgtagcctagctatgtgcccaggatgtaaaagtgggtttttggttaaaaagctagcagttttgctattactggtgcctataattaattaattgtgtgtctgtatattaatctatttgtgagcttgtaagtgtatgtatatgtgcatatgtccatatgtacatacacaacatacatatgcacatatgaattttaagtctagtttgctgaataagtcttttcttaatacataaggctcagtatgttccatgtgccttttgaaactgtcgtccaggctggggtataatggggcgatcacagctcactacagcctcaatcctctgagcccaagcaatcctcccacctcagcctccagagtagtgggactataggcgtgtgccgctatgcctggcccatgtgcctttttaatatattttttattttatagatttttttctacagtgctttggctttttgatatttagatgtttttctctgatgaggcacaagtttatttctgtggctcctgatcagttttttttttaacagtggcaccgttaagtacttgctgagcagtaccttagcctggtgggctggtggaacagtgacaacttctctaaccttggaatagagagactacagatctgcaaagaagtttctgaattcttagtctctgacagtgtggcagggatttcagttagagtagaggagttgactgttaatcctgcatctgtttttgtgcttgggggaaggctgaggccaacacagacagtgaaatgccttacttagtgcaggcacatcggatggctacatggtactttgaagttgttcattaagttgttgaggattgcagatttgtgtagcacatttgaagtgtgttgtggtgtaagcagcagggttgagggtggttgtgggccccgtaacatgtgggccattgtctgtgatccgttagccccatgctctttgacgtgattcatggatccttagccctgaatggttttctaggtacatctggtagacggtgccagacataatttggaaggcatgcggtctggcaccctgagatatattttagggacttggtgtcagttgagcagcttggccagggagagaatagtgaggcctgattttgtatctgagtggtaagtaacctgaaggagaggtgtcctgtagaaattgcagggtggacacacctctcacttctgttattttctgcatatactggttgctgaggtgaccctaatgtgcttctttctattgagttaatgtgtgtacagtggcttgatggctgaatttataccattcattattttactgcttaagtggctgcatctgggcaagaaggacctacaaaccctttgccatggccattgcacatcatcatcgtataatacactggctaaaggaagtgttttctggaggtgttcatcagtactgtagttaagagtttactgattaatattaatagcctgttatccagagatcttctacttctgatgatgaaccttgcacttaagttctgtctcccatttcactttttagttaagtttaacaaacagtaaaactgttttccattattctcttttccattcatctcatccattatgctctatgtattttgggccatttgaagctgataaacctaaaatctttggatttttcaccttttgatcattatattcaccttaaacccagtccaaattttgcagatatatttatagtgctcatcgtccctatgttctagacatggaaagctccttttccctagctccaagaaaagctggaagaatgtcattctttacacaacttaaattgttcagaagatatttttgtgatcacaaaggtgtatttaattcatttttgttttattttgtttttgagacagggtctcactctgtcgcagtggcgtgaccacgaatcactgcaacctcctcctcccaggcccaagcctccctcctcagccttccaggtagctgggactacaggctcacgtcaccactcctggctaatttttttgtatttttggtagagacagggtcttgctacattgcccaggctggtcttgcactcctactcaagtgatatgccttccttggcttcccaaagtgctgggattacaggcatgagccgccgcgcctggctaacatttaattcactttttacaagctctttcagctactttctgtgtctgaagacacagacatgtaaagcattttgatacattttcaccaaaaaaatcaccttacataaaaggacgtgtcttaaacagaaagcttatcataaaatctctatatcaattgttttcctaaattgatgactgttacgtcttccccttttgtgaaacagtgagttatactgatattttgtgatatgtactggcttgccctttataatatctaaattacctaaattcttagtgttgtcacccctccagtgccccccaaaaaaggtcaacaggtcagagttaaattagcatttactcaggaatgggggttgcaacctggctagcagtcagagattgtaccacccgagaagggcaagggggctatttaaaagaacttatttagattacataaattgcttgtcacattatttcattggtgtattaaacaagtctttaatcagtagtagaagggtacatttgtatcagttattcaggaaaaacctatatacagagtgtttgtaaagattaggaccagttttacttgtattgtgtagtgctgagagcacggttgtttgtgaaggaatgtttttcacagttccttttcgggtctcaaagttcatcagcagtttaatatggagtagtagcccaagatggagttactgatataaagcctggaacattgctaagctcatagtgtccagtaaaactgtgtctactggttgctgctgtgaatgattcaggtgaacgtaggcattttctgtaggcgctttccacatgattatggtagaataatttgattgtttcctaagcgtatcattcagttgtatcttcatgacattttgtcaatctgtattcatgtttactgactatataagggttcaccagcaaaacagaaccaacatgatatgtagatacatgagagggatttattatgggaattggctcatgtgattatggagactaaatcctgcaatatgctttctgcaagctggagaatcaggaaacccggtggtgtaatacagtccaagtccaaaggcctgaggccccggggagctgctggtgtaagccccaaccccaaagtctcaagaatttggaattctgatgtccaagggcaggagaagatggaagtcttgcttaagaaaagagagcaaatttgctttttgctcttcccaggccctcaagcgattggatgtctgctgccctcagatcttctttgctcagtctactgattcagatgctaatgtcttctggaaacaccctggcagacacacacagaaatattttaccagctatctgggtatcccttaacccagttaagttgacacataaaattaatcatcacactgacttaatttaaaactgaatcagtgtaccattttcttaaatggaaaaatcactattaattatcatgcaaaacaaaattaagtcctggatactcttgcctgagtaaatctgtgagcttgaggtttattctgcctttgttaaaacaggagattaacagataagtagtagatattctaacaataccctgagatttcctccttcactaaattagaatggaagaagaataaaatggatattttaatttggggattcagtgttcttaaggaccatggtattgtgaaatatgtatttcgtctccctgtttcctcacagaaaaaaaacctctaaaacccatgggatcatcagggtggtaactgtcttttctctgctacgagatgaccagtggctggggactcctatagcttcaggttggggactgttcaccagaaagaccaatgtatgcttagagggttgggactttcagctccagcctccttagaggggaaagggggtgaaggttaagtggatcaccaaaggccggtgatttaatcagtcatgcctatgtaatgaagcctccataaaaacccaacatcacagggtttgggaggattttcagacagctgaacatgtggtggttcctgaaagaggatgtgcctggagagggtatggaagctccaggctgcttctcccatacctcgacctatgtgtctcttccatctggctgttcatctgtatccttttaatacctttctaataaatggctaaacataagtaagtgtttccctgagttccgtgtgctgctctggcaaattagttgaatcacaggagggagttgtgggaaccctgatttatagctgataggttagaagcacaggactgtgcttgtgactggcatctgaagccagttgtgggaccgagccctcaacctgtgggatctgacgctatctccaggtagtgtcagaattgaattgaattagaggacacccagctggtgtccagtggagaatcatctgcagaatgggttgctggtagggagaaatccccacacattttggtaaccagaggtcacagaaatagtctgtgctgggtattttgaggtatatatataataggagaaactgtgtttgtttttttcctacatccttacaaggacacaagaatgtaccaactgtcttgttcaaaacatggcccttcccatacataatttgactatggaaatggttgacctttttctgagtaccaaggagttttctgcctgtaatggggtatttaattatattttagaaaaaggaaggtcatttgtttagagcagcactgagtcatctgttctgtgcccgatgttcagaaaggaggtagacatgttctttaagagaagcttttgaagtaatttagaaaatggtgcaataccatccgtcatcaggctgtgtggcacaagatcagtaggagcccagagacttcacatctcctagttttcccattctgagcacttgtgagaccccagaccagtcactagtcacttgatctcaacttcttcctcctcacacccacattttctcagttgcacagctgaggtaatatggtcctgggcatgattttaggttctgacgttctgtgcttctggtctcgttcccctctggttcattatctactgtggctatagtgacttttctaaagagcaaatctagcattgttcttcttcttaaaactcttcagtggctccttatggctcccaggataggtccctctgaagtcctgttcaggagtctgaagtgtcatctgtgtcctgctcagtgatctgctttcactctcacactctaaatgtgctctgagttgtagctgtgctagttatcctgacaccttgcaattatgccatacgtttcttgcctttcaagccttcgcaccatgctcttccctctctgtggaaattcccttctttccacttggtatttgattaatcaccactttatcagcttcatattttctcagagaggttacccttccctcatttagtgtgggttaaatgtccttccatgtgcaatgaaaattgcatgttgtgggagaggaacaacacacaccagggtctatggggcgggggtgggagagcatcaggacaaatggctaatgcatgtggggcttaaaatctaggtgacaggttgataggtgcaccgaaccaccatggcacatgtatacctatgtaacaaacctgcacgttctgcacatgtatcctggaacttaaagtaaaataaaaattaaaaaaataattgtgtgttgtacctctgtgaagtgtagtgctcggctcactgctatacaggcaccagtctccttgatggtatcctctagggtgggtataaagagaaggaccctgccattctatacttcattctgttgccagttcctagcctgtagtgggcatttaattgataattgttgaatgaatacatagcttctgtttctgttgatccttatgtatatttaaaagggggtcctatgcatatatttttgatgtattcatttctgcttaaaatacatcaccgatttctaaaagttaatgtagaatttaaagcacaccctcataaaattgtaagattgtaagtttaaaataaacttccttcattgtacaaatggctagcctaggtactattttaactcatttattactcacagcaaccctatgaacattattatccccattttacagatgaggaagctgaaacacagaggtggttacacagcttcagtggcagagtcaggattgaaaccacaccacctggtttcagagccagtaactgccagtagtttttaaccatgagtcctattgtcaccttatatatcaaaccaagacatacctaaaagctcttagtggtcaccaagaagacgcgaacactttagtagaaaaataagacaacaatatgaaaggcagtatttgaaagagcaagtggccaagatacgaatgcaaaaatcaaggaaatcagacagcaatatctgacatttttcattgtttagattggcagagatgaaaaggatagtaacattctgggttagcaagagtataagaacatggatccccgtttatggtgggagtgtaaactgttaaaacacttctggagatcagtagttctcttccctgtaattctgtttttaggaaactattcacagaatataaatgtataagtatgtacaacttaggtacaagattgttcactgtagtagttattgtggtgaaaaattgtaaacaacctcaataagggatgaggaagtaaatctgtatgtcaatattatgaaatctctacagctattttatctatagggcaatatttattgcagtagggaaacattcatgattattgccaaaatgaaaaaagccagccataaagcagatatgtaatatgtagtaagcctgatattgtaaaaatatagctatgatggtagctaaaatgcactgagaatttatagaccaggcgttatgctatattgttacagtaagattatttttttaatgaacatttgaacagtgattattcctggtcagtgggtttatgggtgagtagtgtttctatattttctttcttatctttggtaatttgatctattacaaaattttctttccacttcatcgtctttacttgtaaccccactttctcaggataagttgaaaacaaggaatcgaataattttaggagccatcacggggactaggaacaaacccagtttctagccaagttctagaactataaatatatgtcagtttgcttcattaggcatttagcttaaaactattggaacacctgccctgccctccatagagccctgaattaaattgtgctgcttgggtttcttctgaatgcatggctacttttctggtttcaccaagaagatgtgtacaaacattataagtaagcagctgctaatgacttttgctggcatttcttttaaatgaagatttttttttttcagttccctaagtcttatccctagtgtcatagcattgacactgttttttcgtaaagggaaagagggcagctaagacatgtatagggtattggagtgctcctgtaagatgttcttggtaatttggtgtgagctgttcagcctcattctccagcccttaggccacgagtctcctgggcatctgtcacttcttagcttctcagcaaaaagcctgtaggcagtgccattctagcaaaaaaagaatgaagtgagggagagatacctgagaagataggagacgttcccagtgatccctgttgaacttgaatgcggaacattgttaatagtctctggcaggcttctattttgaagacagaaaatacaaagtttaggaagccataaatggtaaaataatatattcttctcagcaacccaaacaaaatacataaaaatggaaaaaacactaccgtgaaacgtagcctcagtaatgagatgggcaggccacttttgcctttctcccaaagaggacacgtctagcaagatccactggactgctgacggtggtggattgctgggcacaagcatgcctttatggatggtctggctttctctggggcctgccactctttgatggcttcaatggcaagtgcttcgacctctgagataaataatttctgtgaaatcatttctagagtgaagctaacttttccaacctctgcagcatcttgtgatgtttctggggataatattaacttgtaagctgagaaacagttgagactgcttcaagagatttgttttcttgtgtagtaatctgctgaagcatataccaaattgatgtttttatttgctgcaaaacttcgggttttggtccttttaaagtagtttcagatttcagcatttaaaaataattgtcctggcacagtggctcacgcctgtaatcccagcactttgggaggctgaggcgggcagatcacttgagttcaggagttcaaagccagcctgaccaacatgccctgtctgtgctaaaatacaaaaaaattagctgggtatggtggcacatgcctgtaatgccagctactcgggaggccgaggcaggagaatcgctttaacccaggaggtggaggttgcagtgagccaagatcatgccactgcactccagcctgggcgacagagtgatactcagtctcaaaaaaaaaaaaaattactatataacaatgattttttgaatgaaggtagatgtagcataattgaactttgttacttatgtattctgtattatgtgcttgttaggtggttctcttaagagtaagggttttgcaagatgcttctttcataattggacacaacttgtagaaagtgaggtgtgagtttgtttgatttatatgtttttcttatcagattatggaactatccattaataagctactctagaaattatttggatttaaaaactctctttggagagttgcaagggcctgcctgatctgaccctggcctctccaccctgattgagggccagtttttcccctctttatgctctggtcctccatctttcttaacaaacagtaagcattcgcccattaaccgccaggctctgtgctgagttttaggtatagagagatggataaaatactcattccctgcccccgtggaactggcagtgcagtgtgggagacagaccaatgattatgcaaatatataattagaatttgtcacaggtgcagcaaagaacaatgctagggcactctcacgtggaggtcatacctgacattctgttgtggagagaggccatgttcttttcagtatgtagaaaggttaaggttgtctatgaggtgcagctggggaagctctcaccagctgacgtcattcaaaaagtgaacagggtactactatttgcacataaaaaagagcaggttatggtttcacagacactttagattcttattcagagaggatagccttgagggtaaagaactacttctcatgtcttactgaagctagggtcatggaacatctccagctggaatagtttctgttaaataagattgtatgatatgattttacatcattatctttcttaccaaagatcataactctgtctcacagaaatgtgtggtcatgcagtgtttccctgaggatgcgtctttaaactgagaaattgaggctgagaagaaaccaggcctttgcagagttgcgggccaaggggtttgagcccaccccccgacctgcccacttcatgtcatctgggagctagtccactcccactcatcctttaggccttgatccagatgatacttattggaatccctttctctgacctagtaggttggatcaggttccttttattacattcaccatggtttgtgattgtgcattaattttatggccattcgattaaatgcctgtctccttcagttggtctctaaattcctgaagggagggatcaagtttctgctgatctcttggggtagttaccattatgcccattttactgatgaggaaactaaggcacagggaagtgtagtgactcatccaaaataatacacggtattaatggtggaggcagagtttgacactggcagtccatcctttcaaagttggaatagactttaaatgaatcatttaattatttaattggtcaatggaacaaaatggaaagtccagcaataagtagtacattgtggtgatttggtatacaataaaggcagtatttaaaatcatcaaaaaagaatagattatttagtaaatggcatttggacaattagctattcgtttgagaaataaaatttaatcctttttgtcacatcttaaaataaattttaactagttggaaaatatgaaggtaaaagagtgtaaaaagaaaatatggtttcttttgaaatggggaatactttctaaacataacatatcatgcagagactgtgcactatggatgaaggctggtgaatttttgctacttgtaaaaatgaagaactgctgagtagcaaaggatcctaaagatggttgaagtgactaatgggattaagatttgcagcatacaaataaaaataaaatttacaaaacccagccttggcaagggtacagtgccaaatggcactgtatttccagcaggttcttctttctgggatccagttaggcaatatgtgtcaatatgcagattccctttgattaaggtacttcttgaaatttatcacaagtaggataattggggatgtgcaaagatgtatgttcaaaatttattgctgtgttaatggtagtgaaatattggtccagtcatatgatggagttttatgaggcaaatgatgtgatctacattcacatggaaacctttctttgacgtgcttacggttgggggacagattctagccaggcatttgtagcatgaacccatatgtaaaattgtgggtgtggcctgtgtatgttcttttggatgggtggtgatttggaactagggtcacaatgttaattatctctagatgtgggctttcaaacgttttctttttcttaaaattttttttgatatttcctttaaaaaatataaacggtgaatatatacctattgataataaacccatccaggaaacgggaataaatatctaagactgcctatcttttttttttttctaatctgaacagttattttgcttatgaaatataaaattaggacactttgtcattttgtatttaaattcttataacacttattttgggctcctatacatgctcttcctgcgtttggctttcctagccactgtagttgggatgtttgaaatattcagggtactgaacagcagtttagacacaaaaaagtacctgggtgcagaagcattttcattaaaattacatgaacgctggagtttattctacagcacaaagccttcctggatgaactggattaatgtttgatagaaacacagcctcttaagcatcaatgttcttaaactgtttgattattaattaaatgtcctatgttcttcagccttaaaaggtaggagaaactaagacaaaggagaaaaaaatcaagatgtcaaagacaggaatgtaatgtcgaagggagaatttcaaataacccacctccacacaagcctttctcagggagacggttaaacagcacagctggctccgattctgatgttttctcagttagatcttcagagaacagttttaataaagctttaattatggagcatccctacacacactgtagacagggatcattcagctgcataatgttgctgatgatatatttatggaatgctatttccatcctagtttaaggtatctgttgctcttagttactggagctatgctgatttcagaactacaaacagtttttaatattgaacatgctaactggttcaatgtatatgttgtactactttagtttttgtggggaatggactttaaagattagtttcatgctgatccacagtgtgggaacatgtttggtatttttaaaaactctttactcattgtctgaggtgagaaattgttggaagacagagcagaggggagaaagagatatgttatttatgtaggtgaaaaataccatgtgaatttagagtttagagtttagaatatggcaaccttaatgaattttggagctgcagtaggtaatggatctctaaatttttttctgcaatttttgttgttatccattagctcagtgacaatcactgtgatcccctcccttggtcagtgtgtccctcagcattcttaaccattgtgtatgtgcactaccaagcttttccctgggtgcctcatgtgtggtggtgtttctacagcttttttgcagtgctcaacgtcttcacctaataggtcacgtggtggctgtgcctgacctgcacatggtcatttctttttggttgctgaagcccaggttgtcttaagagataccgttgtttttctttttctttttttggaatcaatttttttttttactaaaggacatacagcaagatgggtgaaaggtggaaaaaataaacacagggcttaatgttgagagggtatttttagacttagaagcagcttgctgctttccatgaaatagttgagtgtaattcatgactcatgtttccgtttttggtggtttttctttaaaggatgaaggctggattaactgtgtgtttgtgcgtgcctctgcagtttggttctctggattcataggagtgggtttcttttatttagtaactatgtgcataatttccttttgtcctttgtaaaatatctttttagtcataaaaatcaaatcatcttcccatgtaagcttcagaaaaggtgaagttatatattgaaacaaaccatgacagtagttaaattttttgtagggatagcagaggaagccagtgagtggttcaataacattgttaattttcaagttctctggaatgcttaaatagagctgaagtacgttttaggtcattttgagttggtacacttttgttggtgacttgttgtgtcccaaaaacttggggtatggtcactggggaagagaatcctattggtgggaaatcttcatctgtctgtggtgggtttgatgctgccaaataggtaaaagtaattacaattctggtagtatgaaagagaaatggtcaagcttgggagtcatggattgtactttggggctgggaatcttatagattgttcatatatggaaagcattttaagggcattgcagaaagccttctggttgaacttcatgaaacttaactcttccttcccgactgtctctcccaccttctgaaaaccacagaaacagctctatttattgggttctatgacttaaaagaagaaaagactgaagagtgacaatcagacgtctttaaagttctcttttggacccaaggcaggatgctcgtggcatttcaacaccttcctcaggatcagagtagggagagacagaaatgatctttatttttgggatcacagcttgaaatggggctgctgggctgtattggatttgattctgtccaaaaggcgaaagtaatgatagctgctgggctcccatcctccatgaaaacccagtcagttcattgtcagtttaattgttgttttctgagctcttctgttttgaacatttttaaaaaagacttttgctttcctctttctaagtgttttgtatcataccccaatgcagaggccaccagccaccttgcctctttcacccccatctccaggagattggcaggtctaatggctgtcactgtagaacagaccttccaggtgactcttgacccctcaaatgaggagtaaccggatcccatgtagacctggcagtataaaaaaactttaatattattgatttgcaaaagaaggattataaacaaaacgctaacaagacagttgattgtcaaattttcctctttatttctccatttttggggaagatggagtgggaataaggtaggaaacatgcaccaaaatgaaaacatttcttgtaggtgagaataacaaggacttctatcactgaaacattctctttttaatgtttaactgcaggatgcttaaagaaatcctacaattattgtagacattgatgtgctatcaagaaaaatccatcttaaatcccctgcaaagttcattaaaatcttcctcattgtggtactttacttgagattaatttctttaggtagcatgtttttactttagttgtagcaaagagccacatttacaacaggagcttgggcccagtcatggaacagtgctgtgtgtgcacattctgtgggactgattctgaggacatgccactgagtcttttggtctgtgttggagaggtcaccttaattccagagcagcaaagagttttatttatgagaaatatcctgatatgttaaaatatgtttttgaacatattttggatcaatttgtcttattaaaaagccagcattatttgtatgccaatgttccttgcagcattattgaccatagtcaagaggtgggagcaacccaagtgtctgtggagagataaatagataaacaaaatatggtagatcctgccacatgctacaccatggatgagctgtaaggacattaagctaagttaaataacacagaaataaaaagccaaagactctgtgatcccacttataaggtacctagagtagtcaaattcatagacagaaagtagaacagtggttgagaggggagggcaactggggagttgtgtaacgggtacagagtttcagatgggagagatggaaagagttctagagatggacggtggtgatggttgcataaaacatgaatacacggctgggcgtggtggctcactcctgtaatcccagcactttgggaggtcaaagcccatgggtcacctgaggtcaggggttcgagaccagcctggccaacatggagaaaccccatctctattagaaatacaaaattagccgagtgtggtggtgcatgcctgtaatcccagctactcgggaggctgagacaggagaatcatttgaacccgggaggcggaggttgtggtgtggtgagctgagatcgtgccattgcactccagcctgggcaacaagagcgaaactccgtgtcaaaaaagaaacaaacaaaagcaaccatgaataaacttatgccactgaattatatatacacttacaagttaagatggtaaattttatgttacatatattttactacaaataaaagttaaaaaatagaaaaaagggtgagtcagtctccgatatgttgtttttagtttctggtcatggtggggtttggctgccctggtcctacgcttgttacaaaactgctggtgggaagggtccttagacctgtcatctgctccaacactttcacttcatacgtgagaaaactgggtctcagaagtgaggtatttaccccctcctgcgtgggcttcttccttcagtttcctggagaggctgtgcaaagtgcagcaagagctggacactggactctgctgcctgggctccactctgctctgctgcttactcgccaagtccacacagaccgttaacttttctaaacctgtttctgaatgtataaaatgggaataatgtcagtatcctatgaggttgttatggggattaactgagtgaatgcattttaggtgcttagcatagtattttcacacagtaagtaacacatgaatcttagccgtttgttattgctttgttattgctgttgttactggcatgtgctgcaaagagcctttagggacagaggtttgggattgaggctcagtggcaattacttgttagttctctgtccttagccatgctgcttaatttctccttgttacccagtgcatgaagtaaggatgggtgaagcacttgtcttggtgtggtgcttgtgaagagagagagtggagtacctgacagagcacttggtgaatggtaatgacccaggtcagttttagtgggtaagaggatgtcactgcagcctggagggctggcatctactaaggcgtggtcttcaagggcggtgctgagaacaggcatgctcagctctgaccttgggttagggtggaggtgtgttcttctaggcccgctttctagggcctcctgagaaaggggtcaccggacttctctaggtcagttgtccctaaaagtaggtcgaggacctgcaggtagagcctggtatagtttgagtcagggacagaggtattagtgttctttcacaagtcatttttttttttttttttgaaatggggtctttgtgtcccagactggagtgcagggggacagtcatggctcactgcaacctcaacttcctgggctcaagtgatcctctcaccttagcctcccgagtagctgggaatacaggcattcaccaccatgcccagctaacttttttagaaaaattttttgtagagatggggtctttctgtgttgcccaggcttgtcttgaacacctggcctcaaatgatcctcttgtcttggcctcccaaactactggcattacagacaagagctactgcagtaggctacagttacttttgtttccaatcccaggtaatagacatcccctcactactgactcatcctcttcctgactgtttttcactagcttagccttacctacttccagaggaagacttcatccgaaattgagatgaccagggaggtcatttgtgctcaagaaaaattcatctagcaggtatgtattgagaaccagtatatgataggggtaagaggctagaaatataaagggtaatgaaatgctgctgacatgcaggggctcagcactttcagtatatagtcctagtacctgagagctagcaaaaaacaagcagagatgtttctcttagcccaggcagctcctcagtgtgggggtctggtgccaacattgcaactgtattgtgtattatttaaatgtgtttgtatgtttgtgttcagtgtacatatgttttcagatttgtgaaaaatacataataaactgcatgtcataaaattcatggtgtgagatttgtcatagtctattacattcctaaagactctcaatattgtggacattcaaactaaatgattccagaatgactttaaaatgctagtgtcagagcaggcagtagggatgccttcctgtatgggtgtggccatattcacctgtatggggcccaggcagtaactgaactgatagtttcatcaaagtcaacacgttattttttgaactctgacactctatgcttggtatgcttgagcacatgatccctttcattaatggcttatttttttcaagtagtctcattctacccttgtcaaccttgacggcggggtcagcttcacttgcgtgaggtttgtttgtttgtttgtttgtttttgagatggagtctcactctgttgcccaggctggagtgcaatggcgtgatctcagctcactgcaacctctgccgcctgggttcaagcgattctcctgccttagcctcccgagtagctgggattacaggcacccaccaccacacccagctaatttttggagttttaatagagacgaggtttcaccatctcggtcaggctggtcttgaactcctgacctcatgatccgcccgccttggcctcctaaagtgctgggattacaggcgtaagccaccatgcccgctcagaccccacaactcccaaggccaattaaaccagaagcttcccaagtgttaccaagctgcagcctggcttgggaatcattagcctatccaaaagtttgactagtatctcccttcccttttgattgatatgaatgatgctaatcttgcttcgatggtccatggctgtaccagttcagtttcttctttgtatccatcatgagagatctgatataggaaacaaggctaaaatcaattttaaaagtttctacagatttacttgatgttctctgatgaagtgaagctggatatcctttaactacctgagctgcctgccaccttctgttttctttctctttgctaaattaggggagtaaaggtgaaacttaatgttagttgttccatatcctgcagtgctgaaaactaccacaaccaagaaataaaattacaaaattcaagatgtattttggctagcttcactctttgtccaggcagcttcagtgaagtggcaatttagaaatagacggtcagcagtagaaagtaagaccccacttgtgatttacccaagttctttggaaagatgcaagccctcctgtaaacacacagtgattcagaggagcatgtttactagctgaagccctttttttctcctcttctcataaggccggttatcgagggagtttgtgtgtctggggaaaggactactttatgatagttccttaaaattatgacatacagtcatgcatcaggtaacaatgggatatattctgagaaatgcatcattaggtgatttcataattgtgtgaacatcctagagtgtaatcacacagacctagatggtggagcctgctgcaaacctaggctatatgatgtagtccattgctccaaggtaatgaacctgtacagcatattaccatactgaatgttgtaggtaattataacaccatcatagcatttgtgtatcgaaacatatttaaatgtagaaaagatacagtaaaaatatggtataaacgattaaaaatagtataactgtacagggcactttccatgaatggggcttgtaggactggaagttgcttctgggtgaattggtgagtgagtggtgatgaaatcatctaatcagttatgacatagctgagtttttcaggtcttataatcttacaggactaccatcatgtatttgagccatcgttgaccaaaatgtctatgcggcacgtggctgtatttagctgaacgattaagtagaaataacctattaagacctttttccaaagtattttttacatggttcattgttcacattctgtatatatttacatcatactgtatggtctgcaattgtatttttgactttttcttcaaattttgaatggctaaaaattccagcagggttcaagagcttgtcctttttgattgtgttttgtttcatccgtagcagaattgcctagattgaaatgaaatgaaaataatgaatggtatgacacttggtatcatcacaaactgatcattcaaatgaatgggttaaatactgttcatgtcatgatttatggaatgctttcctgtcccaaatacttgtgcttggtgctaggcatacaattatatgaaatgtttattatggtgaagaaattcaagattttccttcaccttacctcatctgttcaaatgaaaatgggatctttgtgtttggggggctgttttgcacttgtatatataaacaagtgaggaagctggatatttaggaataaaatctctttttgaatttagaatttgtaagctttcctcttttttttttttttttttgagatggagtcttgctctgttgcccaggctggagtgcagtggcacaatctcagctcactgcaagctctgcctcccaggttcacgccattctcctgcctcagcctcccgagtatctgggactacaggcgcccaccaccacacctggctaaattttgtacttttagtagagacagggtttcaccgtgttagccgggatggtctcgatctcctgacctcgtgatctgcccgccttggcctcccaaagtgtaaactttcctcttaacggtcaaatcttactgaagaaatctgttaatggaaactttgataaatacaatgaacagatttggttcttcctcatccacataggttggaagcaacaagtattttgattgttgactcatacttctccagtgaagtgacaatgtgttgatggattaaacacagttatttttaagctgctttgacattctctaggcaaagtattatcaggaacagagccctgagatttgagagttgcagatgctttcatgattcttcactgtctgtctctccttacataagtgtttccagaaagctaataaaattattcctgaaggttaaaaacaaggaagttatgaaccggatttgaggttgaaattaggtagggggaacatgaattattttctgtaacgtacaagtggaaacaatttaatcaatcctttttatttttattgaatgtagacagaaaattcagtgcaggtggctgcattgcatttcatttacaataattaaaaaatgtttgagtaaaacagctctgttttggtggacagagatccaggacacccactttcacttacaggtgatccgctctttcactgatcccagcatctgctgcttctgtgtcacaccgctgggggaatgggggatccagagctgatgaaggcatggtcctggctctgctttgtccagctagtgacaatgttagtaacccgcattattgagcacttaataaacaataattctcacagcccgataaagtagttttttatggcatcctcatttttagatgaggaaatagaaatgcagagatgtgatagcttgcccaagatcagtctgtaagaggtataattagagtttgaagccaggtagtcagagtttttttttttctggatattttgcagagaaagtttgagacttaaggaaagagcaaagatgctcttgtgtttaagcagatccattgagcactttttgggtcatggtctctgtacccataaaactctgaaaagtacaggggttgcaaatcatatgcgtgcgtaagccaagcaggtagaatagaggcatgaagttggccagatggtctgtggtgagcaggggagctctccgtggggccacctccctgcagctgtagccagtgagaaagtgagcccagtatggctgatctctagaagggaagctaatgaaaggtttaacaaaacatctctgggtcataaaaattgatctttacatcacatcaggtttgtgaatatacaacgtgaaacgtttagatatgtacttgatacggctttggggaatttattgagaatgtgggaaaacatttgttctctaaaagaaagttgcagatcatactgcaaagtgacagctgagcaaaggctcccccttgagaagggcatgtgctactcagctcatggcatctgggctctcattgataatggggggtaggttggaagattcttggaagccacagcaagacacaccacacctgggctctcataatcattttgccaccctagagagctccagacacacgattggccctctaacagaggaacattttaatacaagtgtgtactgctcaaggactcatttgctaagttaggggcagactccttggtaccaccaaatcctatttttcctaaatcggtcaatgtattgtcatatcccctgtgtgcagttttaactctgtgagtctggatttgaatggaggcccagctttattctagctgtgcaactgtgggcaagttccatcttctccaaagttagcttcctcagggtattgcaagaattaaatagcaaaatgcacataagtgtctggcgtagagtaagtgatagcttcctttcttttcctcattttaatcaattacccagttggtggatgtgataacaaatgaacttcctgaagatcagagctgtgtgttagtgtagggctcagatcctctttatgtattcagtgaacactatgttctgtctaacaggcacctgctctaggttattagggccattaaaggcatgttatattctcaaagagtatacaatttagtaagagacacagaaaaaactgatgttcgattgttaggttggtttaagttgttgatacatacttggaatgactaagatcattgtttaacattggtgagtgcacactgcaatgggaactttgtaatgctggagaaaccctcaactgttaaacatatacttaaaaaaatcagggtgtaaggatccctggctgaatagtgttgaatttttttcattttcctttttttgacgaagaagtttaacacaaaattattaagcaaagccattcaagaagtacagcaagttttctaaagttttttttttaataaaagcgaatatcttctcctataaactagcttgctgacccagaaattgaactgtgattaaaaaatagggcagtgccccctcaaaatgagagttgtcttatgttatgggacgcttttttggtgaatactttatatttagtaatctcgtttttaaggttgtaggctctgtatggtaaaattaatacagtgaaaaattacagtctgaatatagagaagatgtgagtgccaaagtgttaaataaaacccttatttcttcttagtgaaggttctttcaattgacaattaactggatttttctatatttctctgagagttattcattgtgacagattttgtttcatgacagatgtaaagaacttctttaatttttgatgttcatagagtagacgtcatacaataataaccttgcaaataggaagtatcgatcattggttttttttatttcataaagcctaacaattattttactatagggaaatatacaggttgaataactttatagttttcatgatcatgaagtaacttccaagttatttcatagggtaaacgtgggtacgtgatagacatataggacattttggtttctttttttttcatttttgcttttggttgaaattgttcgtggaagctaaaatgcattctaaggtgaaataaattttcacttatccttggggcattacaatttaatagaaagagaagctcatttagaactttattggcttcagttccttctggctacagcataatcagagaccttgactttccatgtcatcgcattggtgtgtttgagatgtgtgtgacctgtatatgggatgtatctgagactctgtgactggtaactgaggctccctgttactgagttcatgatcttacattactgttttcatgagaagccagtggatccctgagacatggactaaagcttttaatgcctctcagaatatgtctggttaactt

SEQ ID NO: 925 - DNA, 32742 bp, Homo sapiens
  source 1..32742: mol_type = other DNA
ggccggccgggggcggggaggctggcgggtcggcgcgggcccagccgtgcgtgctcacgtgacgggtccgcgaggcccagctcgcgcagtcgttcgggtgagcgaagatggcggccgagagggaacctcctccgctgggggacgggaagcccaccgactttgaggatctggaggacggagaggacctgttcaccagcactgtctccaccctagaggtgagaccgcgtcgctgcgggtgctgcgctgcgtagctgccgcgcgtctcacctttcccctgccccgacttgtccctccccatcccccgtgtttgcaaggaccgtcttggggtgacacctgtgacgcgagccccacctccggtgcctgtcagagggatgtgcttgggctgagcgcagggcctcctcaggagagcagcctgcggcccgcgggtgccgacctaatcctcagaggggccagaaccgaaccgagcattgcagcggcgctttcccagctcagctggccttcctcggtgtctcttgcacgtcctcctcttcaagccggagaagggcttgctctgcatcccagtaaacctccaccgagctcttttgaaggggtgctcgcttttcctttccagagggagggtgtgccgctgccaggggagcgcaatgaagtgagcgctgaggggccgagggtctgtggggaacgaatgggtgcactttcccaggaatggcccttcacggactgctggttcctcttgagggagctgcttctgatttggactgttaaataggtaaatgcatttgcctctttttgtttgtctttagttcctagacttttaaaaggtcatagtatttataaaatgtaaagctgaaggcaggattagtccaggaaactgctgttgtgtgtgtgtgtgttttcgaagttaccaagggagaaatagaaacagatctccactcctttttcctcttttctcgcttgatcagcgatctctgaagctgtgtgttcctgtttttgtcaaaggaagcaccctctataaacttaactgtattgggccctccttatatccagttccatttgaattgctttgcgtttgatgagagcacccacacctcacagcctaattttaagtgtgtgtatgtgaattaaaatgtatgaaatttcccagaggattgtttactgtgggctatacttgcttttaaagtattttcaataagctttcttggcttgtttaactctgcaccaaatcaattggaaattactgtaaaatatccattatctgaaattcagttacctgaaactggaaacccggaaacagttttcagcactgatcacattctgctaattgtatatgcagtgtcccacccaaaccccacctcccctcaggttataggttttctgcagcttagtgttaatttcctgatcatctttgtgtctctcacaaaatcttgaacatgtgtatttattaggttggtgcaaaagtaattgtggtttttgccatcccttttaatagccaaaagccgcaattacttttgcacaaacctaatagtaaatgtttgcctgagttaaaaccagcacctcctaaaattaataaaaattatcttgcagaatatattttcggggattagtatccttttagccctttctacttactatacagctactttaacatgtacatgtgttgaaagtgtctgcaggatcctaagacctgtattccttttggaggatacagtttttctaccagcgagaatcagaacaaacttgattgaccctagtgtgaactagaatactgtgaaggctaagcattctgttgggggtcgtttagagttgagtagaaagaactataatctgtatttcccatgtgaataaaactttaaaaaacagagtgttacaaccttttttcagtaagtctgcaaagtttgatcatgaataatttatcttggttaacgcactgtaaaagttgtaaacacatttgtttttgattattcatctcagcaccttatttaatgtactcatttaggttactaattttcagaaggtggtgtggctatgagatttgtaaagtcagattttttttttctttttaaatttgggaaggatatatagcagtatttcctagtataccaaaactgctttaaaggaatgttctttcagtacttcacttttcttttaaacagtgcttctcaaactgtggtgtgctggagtatccacagtattcatctttaaaatgcagatgcctgtgcctcactggaaacttcatgtttaataagtgttctagatccgtgttttgcaatctttgtaaatagggatcttgttgaagtgcaaattcggattctgtaggactgggtagaacccagtattctgcatttttaacacgctttcctgatatcagtgcttctggtccatagacaacattgagttgcaaggccctacgtgattctgatatagatcatcaggcttgaatagttattacctaagaaaatatatactacttaaaccataaaatcaaaagtcagtcatataaattaatgtcttttaacttaaagtaagtcagagtttattatattattcatataggaactttttcatttaagagcatttaatttgcagggggatcaattgaaatttaagtgaaaatcaaattatagaaagcttcaatggcataattgttaagcttgtaatgcctatgcattactatatctgtacacttatgtgtatatttttacttttattatttttaattgacacataatgtacatacttatggagtacagtgtgatgtttcagtacctgtgtacaatgtgtaatgatcaaatcaggataattagcttatccattacctcaaacgtttatcagttctttgtgttggaacattcaaaatctgctcatctagccctttgaaaatatacaataaattgttaattttagtcaatgtatggtgttctagaacactagaatttattcctcctatttggctgtaatattgtatgttaacccatttttgactattggcctcttcccagactcttgtaatcactagtctactttctacttctgttagatgaacttttttaacttttacatatgagtaggaacatgcagtatttgtctttctgtgcctggcttattttacttaacataatgtcctccaagctcatccatgttgttgcaaatgacaggatttcattcctttttatagttgaatagtattccatcatgcatatataccacatgctcttgattcattcatctgttggtggatatctagattgcttccaaatcttgtctattgtgaatagtgctgcagtaaacatgggggcacagatatcgccaacatatttatttcctttcctttggatatttacccagtagtgggattgctgaatcatccggtagttgtattttcagttttctgagtaaactccatactgttttccataatggctatactaattacgttcccatcagcagcagtgtataagataactcctttctccacatctttgctagcatttgttattttttgactttttatttatttttgtttttatttttttgagacagagtctcgctctgtcacccagggtggagtgcagtggtttgatcttggctcactgcagtctccacctcccaggttcaagcagttctcctgcctcagcctcctgagtagctgggactacaggcgtgcaccaccatgccctattttttgactttttaatagctattctgactgcagtcagataatatcttattgtggttttgatttgcatttccttgatgattagtgatgttgagaatttttttcttatgtgtatattttttaacccaatattaaactcctcccctttcaaaattaataacagccacataaagctatatcagtaaataaaacatttcaaactcctactgtatgtttcttttgtgactgtgaaacaaaaaagggatggagacagagaagggaatgagaagggaaaaaaatctggcaaaagcctgttcttctatggtacctgagaggcaaggctttaacttgtttatgaatactgttttattccttaaatggtgcaaccctaagcttaatggtgcttgacctttaaatacagttttgcatggagtagtagatagtacgttttaaaaaaaaggtcaggaatttatattaactacctggttcttttttaaaaacatctgtgttgagatatgatttatatatcatataatttacccatttagtatgtacaatttaatggtttctagtgtattcacagatatgcccaacatcacctcagttttagagcgttttcatcacctcagaaagataccctgtaccctttagctatcatcccacgccttaattccctcatcccctctgccctcaactgtaagcaaccactaatctactttctgtctctagatttccctattctagactttatatgaatggatcgtataatacatggtcttttgtgacgggcttttttcctttagtacaatggtttctaggtctgtagcacgtatcaatacttcattcctttttatgaccaaataatattctatagtatggctgtaccacagtttgtttaaccatttgttgatggacatttaggtggttatgaatatgaccatgagtattcagctattgtgaataatgccgttaacattcgtgtacaagtggaattgctgggttatgtggtaactccatgtttaatcatttgaagagttgccagactggtttcccaaaatgggatgagttggaggcacttttttaaaaaattattttattttttcaagttctggggtacatgtggaggattcgcaggtttgttaataggtaaatgtgtgccatggtggtttgctgctcctatcaacccatcacctaggtattaagcccagcatgcattaggtcttttccctaatgctctcctgtcctccccttacaggccccagtttgtgttgtttcaagttggaggcactttaaacagtctgaggttaaaggcctaaagaaagaaagtgcaaataataaaggagaaaagagaacttatgtaataacagattaaaagataatattcagaagtcttataatgcctcccttcagatgattcttaggggagggaataataagtttatttcacttgaggttatgttatatcagtgaagatagcattaggcagctaggactgctggatgggctagagatgtagctttgggagtctatcttaaacttattgaaaacactaaaccgggatctttgtggaaatctagtcttcctctagtggagtgtatgaaccaacagaagtcaatataataaatacaatcgtgtgaataaatacctgccataccaggtgatatatgtgtaattaaaaatctgcacaaggtacagaaacaggtgatatatgtgtaattaaaatagaaatagtatagaagactggggtgacttgattgcatagagatgatctttgaggccctgaaagtggttgagaattatcaagagaaagtagaataagacaggagacacttttgataaagaggaactgcgagcaagtttagtatctgctgttctaacataacaggtaataaaagtatatataacttgttttcttttcttttcttttctttttttttttttgagacagagtcttgcgctgtcccaggctggagtgcagtggcgcaacctcagctcactgcagcctctgcctcccaggttcaagcgattctcctgcctcagccttccacgtagctgggattacaggtgcacgccaccatgcccggctaatttttgtatttttagtggagacgaggtttcaccatgttgaccaagcaggtctcgaactcctgaccttgtgatctgtccacctcggccccctagagtgctgggattacaggcctgagccaccacgcacagccttgttttcttaattctgttttctaatccttgggcctccaactttaaatgtgtgaattttttgaaaatttcattacgaattatctatgtttcagagggaaaaatttgtgaacaggtatttaaatgcattaagcatggaaaattagtagaaagagatttatgaagaagcgtgattcaagttgaccactttctcttgaaaccattaaatttaaggagttttgaatgaattatttttagatcctataaaaataagttattttatgaagttgcttgcgacagggatgctcagcttttcttgaagagattttcttagcctcttcccagcctctggcaaccactgatctgttttctgcctaaagttttgtcttttctagaatgtcatataggtggaatcatagattatgaaacttttagagtttgactttctttaacttaacataaagcatttgagagtcattaagtttgttctatgtatcaattgttaatgacttgtttattattgatttagtattccattgtttgtatgtaacagtttgttgatcagctgaaggacatttcagttgtttccagtttggggtatttatgaataaagcaatataaacatgtatttacaggcttttgtgtgagcatgagttttcagttttgcagcgtacatacctacaaagtagggtggctgggttgtgtggtaaatataagcttaattttaaataaactgccaaactattttcaaaagtggctgtaccattttgcattgcatcaataatgactaagaatgacagtttttccatatccttgtcagcacttgttattatcaattttaattttaggcagtggtgagctgaaggctggtcttgctagcaagaactgtatgttacatttttaggaattttatgaactagttaataaacagccattattaaaaattaaatgcaatgaatttaaaattaaatatatacctatgtaaagattatacataattttataaaatttttattaatgttataaatatgtaaaaataataaatatataaagctccttgctttctaattcctttactacatttcactattacctatgctcttgagattaattatgtctgttgtgtctgtatggtggaaggtacgtgtcttcgcaactctaccacagaaatcagcaaaagctaaaaatctggatcttctcctctgcagatctgattgctaaacatttaccagcacaacactgatttttagccattctaagaggtgtttagtgttacctcatccctttaatatatattcactaatgcctaatgttgctgagtatctttttatgtacataccatctgaatattatcttttttggttatgtgtccttttacatcttttgcttatttttttattttattttatttgagacagagtcttgctctgttgcccaggcttggagtgcggtggtgtgatctcggttcactgcaacctccacctcccgggttcaaaagattctcctgcctcggcctcctgaatagctgggattacaggcacctacccccacgcccagctaatttttgtatttttagtagagacaaggtttcaccatgttatccaggttgttctcgaactcctaacctcaggcagttcgcccttctcagcctcccaaagtgctgagattacaggcgtgagccatcacgcccggcctattttattttatttgagatggagtctcactctgctgcccaggctagagagcagttggcacaatctctgctcactgcaacctccacctccccagttcaagcgattctcctgcctcagcctccctagtagctgggattacaggtgcccaccaccatgcccagctaatttttgtatttttagtagagatagggtttcgccatgttagccaggctggtcttgaactcctgacctgaagtgatctgcctgccttggcctcccaaagtgttgggattacaggcgtgagctattgcacctgacctgttttgctcatttaaaatattgaattttgagaattatttatgttgtgaatattttttttcccagtcggtgacttgtgttttttgttttgtttctttgtttttgttttttgtttttgttgagatggagtctcgctctgtcactaggttggagtgcagtggcgtgatctcggctcactgcaacctccacctccccagttcaagcgattctcctgcctcaacctcctgaatagctgggactacacacacgtgccaccatgcccagctaatttttttttttttttgtatttttagcagagacaaggtttcataatgttagccaggatggtctcgatctcttgacctcgtgatccacccatctcggcctcccagactgctgggattataggcgtgagccaccgcgcctgcccagtgacttgtttttttgtttgattaaccgtatctttctcagagcagatgtttaacattaacatttaaaggaaagctatcttttctttttttattgatagtattttagatgtcacatatatgaaatcctttgctaactttaacccatggtcacaaagattttgcttatagtttcttccaaaagaatttggaattttacattgtacatttaggattcatgttgagttaatttttgtgtgagatatgggttgacattctttttttaaaatacagatacttagttattccagcaccatttgttgaaagtctagcctttctttattgggctgtctttttcagaaatgaactgaccatatatatgtgggttgacctatttctgttttgtttcattgatctattgagaatcctttcccagtctacactgtcttgattatttaatctgaatcttgaaatcaagtcgaatgactcctctaactttgttattttaaaaattgccttggctattctagttcttttgctttttcttataattttagaatcaatttgttgatttctactgaaaaatcctgctgagattttaattgggattgtgttgaattcagaaattagtttcaggagaattaacccattaacaatattgagccttcaagctataagcataatctctctatttatttagttagatcttgattttctttcactaatgtttgtagctttcagcatacagatctagcacatattttgttatgtgctagatctgtatgctgagtatttcatagtttttagtgcttttatttcttttattactttttatatttcccctttggttgcatgttgaccctgtatgatagcaactgttctaaacacttactaggtttagtaggtttttgtagagtccgatgattttctgtgtagataatcatattgtttgtgattggagttttatttccttctctcagtctttataccttttttttttttctcttgtcctaatggctgggtaggaccaccagtataatattgaataaaagtggtgatagtgaatattctttcctttttcatgatctcaggatataagatgttatctgtaaggttttttgttttttttaatgagcttaatcaaatgaagttctcctctgtttctagttttctgagtttttatccatgaacggatgttaattttgacaaatgctttttctgcattcattatgataatcatatagttttcttctttagtttattgataagttagattatattgatttttttttctttttttttaagccccaccctcagaatgattttcaaactgattcaaaaaagttgaatcagcgttgcattcttgggataaaccccacacaatcataatgtatttatcctttttatatattgctggatgcaatttgctagattttgtttaggcttttgtgtctgtgttcacgacagatatttgtgttttctttttcatgtatctttggttttcatatgagaaatgctagcttcgttaagtgatttggcgagtgtttcctcttatttcatattcttgaagaggttgtgtggaattagtcttacgtcttccctaaatgttgatagaatttactaatgaagtcatctgaattgtagttttgtttgttggaaggcttttaacgacaaattcaattttttaaatacaggactgcttcatggtgaactttggaagtatgtatcttttaaggaatttatccattcagtctcagttgtgaaatttatgggcatactgttttttgtagtacttatcatcctgttaacatgtttgtggagtctgtggatggtaaacttttcttttttttcctgatactggtaatttacatcttctgtttatttatgtattttgatttggtagaggtttgatatcctcttaggatcttctcaaacaattaccttttgctttcattgatttttttcctcctgttgtttctgttgtgaatttcattgatttctgctctgttttctttcttctgcttgctttgtgtttaatttgctcttctagtttttttttgttgttgttgttaattttagtttttatttttatttttattttttttgtagagacagggagtcacactatgttgcccaggctgctcttgaactcctggccccaagtgagccacttaccttggcctcccaaaatgctggaattacaagtgtgagccactgcaccgagcctggttttctagtttcttattaaagtagaagcttggatcattgatttgagacttttctccctactcttgctgtttagctatgtatttccctctaagcatgactttggctgcattccacaaattttgataaatgtggttttgttttcattcaatttaaaataatttctagtttctcttgtgacctcttatttgatctatgagttatttagaagtacattatttaatttccaaaatttgaggatattccagatagctattactgatttctggtttcatttggtaatggtaagagaatgttttatgctttccatttttttaatttgttaaagtttgttttatggcccagaacatgttctattatgctaagtgttctgtgtgcacttttgaaaagaatgtatatatagtctgttttgttgggtggagtgtcgtacaaatgttaggtcaagttggttgatatttttctgtctttccctgttacctatttacttgttttatcaattactgagagaaaagtgttgaagtctccaagataattgtatatttttaatttttatttcttgttttagttcacttaggttttcctttatgtattttgaagctattttgttacatagatgcttaggattgttttgtcttcttggtaaattgacccttttatcatataatgtccctttttattgatgataatatttcttattctgaagtttacaccctctgatgtttagcacaacagctttcttgtagattgtctgcatgacatatcttttttattgttttacttttaactaatttgtctttcaagcaggttttttttaggcaacatgtgtgtagttatttttatatccagtctagccatctctgtttcctaatgggtatatttaggctatttatttaattattgatgtggctagattagatctaccgttttatttgcttactgtttttctcttcagtttttttccttttctcctttcttgtggattactttatgtttattagtatttcattttatctactatgtatttgtttaatatcattatatttaaatatatattttagtggttgctctgcagcttaaaatatacatacctgagttaatattatacttcacgtaaaatgccaagctttacaaccacataggttcatttaccttccctcctttacgcttggaagtcattgctgcgcacaccaatagcatagttttgcagttggcaccatcctcaggaaaagttaagacagaataaaaaaaaaaatggcaaaatggatccttgtaaggacgggccattttttacattttggctccctccttagtcggcctgctattttttatttttatattgttgctttttgtattctatccagaacttttagtgtcagtctgttggggagggaggctttagtggtccttgttgatcttgtttggaatccaaagtgccactttttaattgaagagatactagcaaaaaaatcttaaaattttttatcctgcatactaccaggtgatggtgtgggggaataaaggaatattcatttattaagaatacagatgtctactcagttgtatatcttggacaactgtagttctgatcatgaagaacctgtgtcacaggcagagaagccatcagtattcttttccaccataactttctcatttggcagtcactgtccacactcctttccatccactagaaaatagctcttttcctatttagtaggaacctggaagaggcatggagaggcaggacaaagataagtaggtttttgcaacctttaaagattaacagctcccttggctgggtgtggtggctcacgcctgtaatcctagcactttgggaggccaaagcaggtggatcacttgaggtcaggagttcgagaccagcctagccaacatggtgaagccctgtctctacaaaaaataaaaaaattagctagacatggtggtgcatgcctgtagttccagctatttgggaggctgaggtaggagaattgcttgaacctgagaggcagaggttgcagtgagccaagattgcaccactgcacaccagcctgggggacagagcaagactgtccccccccaaaaaaaaaagaaagaaagaaaaagagtgatagctccctggcagttgagcggggtactccaagctgctgatggttggacacctgaaggaagtggattcctcatagcctctccatagtgatatgactgctccccagcagcctctacttgagttgcccactgccccacatcattcccattgtgcggtccactcttgggctctggactatgaggtgaaaaggttgtttttgttatataaacatgtttgtttttctttccttgtttctggtgttaaaactacgagtacccaaggtattagcaatatgaactttcagttatgataagaatacattatatgttgcaaatagtttacatgtattatagctgtatactgtattataatctttacttcaacagtcatgtctattttaaagaacttaagaggaaaaaataatctgttttatttattcagatatttaccatttttgttgcttttcctttacccaaggtttgctcttgtaatttttctttttagcataaagaatttccttcagcatttctttttgagcagatctgttggtgatgaatattcttaatttgtacttcatctgaaaactttatttcaccttcaatcctggaggatattttcactgttcataggtttctgcatcaataggtctttcaacactttcagagtgttattccactgttttgtagcctttgtggtttctgatgagaaatccacagttgtttgaattggtattcccctgtaaaaatacgttgtttttctctagctgcttatattttttccctatagcttccattttcagcagtttgaatctaatgtgtgtaggcatagtattctttgattttatcctcaatgaggtttgccaggcttcttgaatctgtaagtttatatcgttcaccaaattctggaaatttcagctactgtttctttaaatacttctgcagcaatctttcatccttccttctggaacattttggtattgtcccataggtccttgaggctttgttcattttttcaacttcttttctcaggagaagttatctttgttattcagatcagatattttctatggatttattttcagttgcactaacactttgctcttcaatagcaataacaacccattattctctttggtaacagctcattctgttattgagcttatgtgaatgttttgtttcaggtaatttttttttcagttctaacattttgttttctttcttctttttgtagcagctttctttttttgcagcagcttctgtttctttgctgagagctgtcatttcattcacttcaaatatgtttacctttacttcatacaacatagttagaaatgcttttaaaagttttaaaaaataatgcattcaacatctgggttatttctaggttgacatctgttgactgtcttttctcttatttggtcacattttttggactctttatgacaaataattttggactatatcttaaacatcccaaatgttatattgtgtaggctctgcatcctgttataatcctctggagactattgggattttttgtttatttttttgtttggtcaggcaatcaatttgcttaggttcagattccaaatttctgttttgccttctgtgggcagtggttctaatctcagttcagttttcaaagcttttgcctcttcaggtctgtctcatgcaggcaccactcaggtcttagtctgggactttgacagtgacctaagtatcaattgagttttccagtctgtgagaattgctgtgctgtttggctacacatgtgctgctcagggttgaccctgagatttgcacacattcattcacagaattaggggatccccttctccagttttttctctgggattttccccacattcttcagtttacaagaccgccccaccttccccaccacacacacacatacacacacacacacacacacagacacacacggacacacacacacacacacacacacacacactcttcctctagcccgaaagatgaggtttcttttggcgttttatctacccgtgctgtagctcctgtagtgcagctccatgcctgggacttgctttcagcaaatctgcaagagaaaagagggggaaaaaaacagggatttattcatatacacatactccttagctcatatgacccctttgtctgattcatctggccataaagatgagatttctaccagagtttagctgtctctgtctctataccattgcacaggtctgtgactgaggcccactttcaggacaaaactattagagaaaagaggaaaggaatagactctctaccttttatgatctgtcagaatttgtttactttttagattcctcaagtacctttttaattttatctataggctttagttataatcagagagagaggctctagttggcttaccacttgtatgagttatctgttgctgtgtaacgcattagcaacttaaaataataaacattatatcacagtttttaagggttggaaatccaagagcagcttagctagctaggtattctcatccaaggtctctcatacaattgtagtcaggatttcagccagtgctgcagtcatctgacagctgaggaggatccactttttctttttctcaaagagtcttactctgttgcccaggttggagtgcagtggtgcgatctcagctcactgcaacctccgcctcctgggttcaagctatcctcctgcttcagcctcccaagtagctgggactacaggtatgcgccactatgcctggctaatttttttgtatatttaatagagacggggtttctccatgttggccaggctggtcttgaacttctgacctcaggtgatccacccacctcagcctcccaaagtgctgagattacaggcgtgagccaccgtgcctggccgaggaggatccacttctaagctcactctcatggccattaagaggaaccttcatatccttgccacgtgacctctctatagactgctcagcatctgacaacccatttttcccaatgagtggtcaaagagaaagggtaagcacaagaccaaccaagatggaagccacagtcatttataacctaatgtcagaagtgggggaggaagatagtaagacagttcactttggttgggcagaaaaaaaatggttttgggttgtcgcagcagaaatacatataagtgagagaaagggtagaagataggggaattggctagttatggaagatttgggtggtaagagagaagtaggactttgggaaaatatctggatttctgaattgggtcacctaccaagaaaagcagttgttccttcttcccagtctttctgccttttacttccttttcttgtctttttgcatgcagctagaactttcagtatgatgttgaaaagaagtggtaaaaggggacaaccttgtcttgttcctgatcttactggggaagcttcaaatttctcaccattaagtatgatgttagttgtaggctttttgtagatattctttatcaagatatcctctattactagcttactgaaagttttttatcattaatagatattggagccactctgccatatttttaggtggatgcactataggctatttcaattttttttttttttttttttttgagaggagttttgttcttgttgcccaggctagagtgcgatggcatgatcttggctcaccacaacctctgcctcccaggttcaagcaattctcttgcctcagcctcctgaatagctgggattacagacatgcgccaccatgcccggctactttttttttgagatggagtcttgccctgtcgcccaggctggagtgtagtggtgcagtatcagctcactgcagcctctgcctcccgggttccaaagattctcctgcctcagcctcctgggtagctgggattacaggcgcctgccaccacgcccggctaatttttgtatttttagtagagacggggtttcaccacattggccaggctggtctcgaactcttgacctcaagtggtacgcctgccttggcctcccaaagtgctgggattataggcatgggccactgcgcccagcctaatgttgtatttttagtagagacgagatttttccatgttggtcaggctggtctcgaactcctgacctcaggtgatctgcctgccttggcctcccagagtgctgggattacaggcgtaagccaccgcgcctggccctcaatttttatagtaatatagaacatctgattgacaaacttgtggttaattctttgacatatccatcattattttcttaaaactcagttaaatgatagtcattgagtgttttactgctagatactgagtaaagagtagtgaacaagatgagatactcttcctttctatgtacagcgtgcagtctataaaacagataatacttataatgtggtaagagaaattatgacacaagtaggtactctatggaagtatataggccaatcacccaatcagactcttctagagttacagttaaggttgtcaggagtactttcagaggaaataatacacaaacttgttctttaaattccttcaagtgaaagttgctaagttaaagagaggcccacttttgtgagaatttgggactttaagaattagttctcgagagaaaagaaagcctctttaaattttcctataagagtttgaaactacttttgaatgttctaaagagatttttgtgccattgagggtagtttacttaaaaagctgatgagaaaatcttattaattaggagtggcatcaaaagactattgatcctacaaaatgcttagtaactgttgggcgcagtggctcacgcctgtaatcccaacactttgggaggctgaggcgggtggatcacctgaggtcaggatttcaagatcagcctcaccaacatggtgaaaccccttctctactaaaaatacaaaaaaaattagctgggtgtggtggcgggtgcctgtggtcccggctacttgggaggctgaggcaggagaatcgcttgaacccgggaggtggaggttacagtgagccgagatcgtgccattgcaccccagcctgggcaacaagagtgaaacttcatctcaaaaaaaaaaaaaaaattgcttagtaactatacaagaaaatattgatacaatttgcctttaattaagaaattccattgcaaaatctaccattaagaaagtaaaaaggtaagccaaagattgggagactgaattattaatacatatctgacaaagaatttttatccagaatatataaggaacttctgcaaatcaataggaacaatagaaaaatgaacaaaatatttgaagagactcttcacaaaaggatatctaaattccctttaaacatatgaaaaattgctcaccatcattacttatcatggaaatgcaaattcagaacacaatgatacatactctacatgctagagtagcgaaagtgaaaaaaatggaatatatcaaaatgttggcaaagaattggagcaacaaagtttcatatgctgctggtgggagtgtaaaattatacaaccactttagaagatagtttactaataacttctaaagctgaacattcatctaccctgtgagccagctattccattcttaggtttatacaaacatttgtttacatgttcactaaaagatgaactagaaaattcatagcagcactattgatagtattaatagtaaaaaattgataaacatctaagtgcttattaacactagagtggttcaagtatggtattcacacaatgaaatattatacacttatgataatgagtggtctactactacacagaacaatatggaagaatcttacatacatagtaacattagggccaaaaaccaaacacaaaaaataagtaccatatggctctattttatgaagagcaaaaataggaataattgatccatactggtagaagcccgcatggtaaagaatgggagggagcataagtggaacttctaggtttgatggtaatggtctttcatgatccaagtgcatttgcataggtatgttgagtttttgaaactatctagctgtacacttttgatatatacagtttttttgtgttatacttcaataaaaaggtttttaaaagacctagttttggccaggcacagtggctcacgcctataatcccagcactttgggaggccaaggcgggcggatcacctgaggtcaggagttcgagaccagcctggccaacatggtgaaccccatctctactaaaaatacaaaaaaaaattagctgggcgtgatggcagacacctgtaatcccagctactcaggaggctgaggcagaagaatcgcttgaacccgggaagcagaggttgcagtgagctgagatcacgccattgcactccagcctgggcaagaagagcaaaattctgtccccccaaaaaaaaaaaaaaagacctggttttaactattgtaatacgaaaaccataataaagataaaagctacacaatctaggtttcattgtgttactcattatacgttagggttaaagaagtacaagagtggctcattcctgtgatcccagcactttgggaggctgaggcgggtggatcacctgaggtcaggagttcgagaccagcctgaccaacatggtgaaaccctgtctctactaaaaatacaaaaattagccgggcatggtggtgcatgcctgtaatcccagttatttgggaggctgaggcaggagaatcacttgaacccaggaggtggaggttgcagtgagccaagattgcaccattgcactccagcctgggcaatagaatgagactgtgtctcaaaacaaacaaacaaacaaaaaaaacaagaatagtcattagcttagatgaaatataaatgtcttgagaggtcacatttttagtttgaagcgatagaaattttagaataattggtcttaattcaactagtagtaagttttcctcttacagtaaaacagtgctttgaacttcttggacatgcaacatgttttcaggatctgttgagtcacgtggaattttggtgtttgggcatatctgcccccaccaggaaaaacaaacaaacaaacatggcaataacaaaaacaaaattagggatttttgaaaatcaaggacatgatgtcgttttggttctattgtatatgactgtaaaatattaaatttggtttttgttaattataactcagtatgacaaactagtacctccaaaaaggatgactagaaaaggttttctggccaggggtgttggcacacacctgtaatcccagcactttgggaggctgaagtgggaggatcacttgaactcaggagttcaagctgggcaacatggtgaaaccccatctctacaaaaaataaataaataaataaataaccaggtgtggtgacgtgcatttttagtcccagctaccctggaggctgaggtggaaggatcatttgagcctgggaggtcaaggctgcagtgaaccaagctcacatcgctacactccagcctgggccatagagtgagaccctgtctcaaaaataaaaagaaaaaaaaggttttcttttttaaatcttaagtgactttttgttaagaaagatgatgagttaaaagtgtgttattagttcattcttactctcagaggaggatatataaatagctgttcttgttctttcctccattcttttcaagagaatgttctatttctgtagtacatggtgacagaattacaacaggtaaacatgccaatccattacctattattgttcttttttaacagtcaagtccatcatctccagaaccagctagtcttcctgcagaagatattagtgcaaactccaatggcccaaaacccacagaagttgtattagatgatgacagagaagatctttttgcaggtaattgtcatgtatttattttttaataatggtcaattgcagtatattttctattagatagaaaatatctaaaacaaaactgaaattctgtgtaaagtgttagtggcagctcttgtaacaacttagaaggatggggaatttccagtcacatcactctatgaaaaatgtggactgtccagagaagcaaaaatgtggttctttctggctgtaagcatttgagaataaattgtatattataatttgattgggggcagtatttagatgcaaaagactaatcattgtgatgttcatactttgagaaatagcagtgattatacctttttattgcttagaagttgtcccaaagcaaaattaaactatggatttaaaaattattctatatttatgtttgaaagctgttttaataaattgctgtactatttaccatctgttccatttgacccacttttaggtgaataaattgatgcttaaggaatttgtttttgatacaggggcaggatttggtgtagttcatcctaacttaagaaggactctgtttaacaattatctgctttaaaattaaaattaatgttttaatattaaaaagcaacatcttccttaaaattaatgacacaaaaaatgaaaatggtaaattttattttgtgtgtttaatagcctaatttacctgaactggctttcattgagttaaaacttaatatggatggattcttttgtggctcataagcttgggattttcacactaaacatttttaactcatgaggttgggacttcacattaatctctaatctttgagattgcctccctcaaaccttgctacagtattggcacattacccatctcacatgaaaaaggaaaaagaaaaaaagataaaaaatgaataattatgttctcatctttcatagtggttcaatattcaaaccattctgtgtttttgtacaaacatgtttgaagacagcaatcctccatcacaaaactccatataatttacaccttgattcattccatgagaagttgtcactggagatgaattcacatattttattatgtcacaaaattaaaaatatgataccaaataccaatcatcttctctttaaaattttaagccacctaacaacttagagtcaaaatcaccgttaaccaaagttgtaatatttcagtatttgttattgtgtcctttcatggacttttttccaggcaatctttcaaagttgtttcatggtatttgtatcttatgctaaaagatgacacaagttctttctctacttaacaagtactaatctaaaattctgtgtattcctttaatggtatagggtcatacatagaggttttaaattatccatttttttaaagactccttcaccctatagtctcagatttctatgtagatgagtatgtttaaaccttactgtaacaacagaactgtgtctgtgtgtgtttgtgtacatgcaaggttttttttttcttaacagtatgcacagctgatcaaagagttagccaagtgaggactatacaatgatatttgcccacttagcttggttagaaaaaaaattaaaaacagtttttagacaggtctcactctgtcacccaagctggagtatagccatgccatcatagctcacagcagctttgaactcttgggcacaaataattctccaacccttgcttctcaagtagctaagacttcagacatgtgccactatacctggctaatttattcatgttttgttgagatgggatcttgctatgttgcccaggctggtcttgaactcctggcctcaaacagtcctcccacctgggtctcccaaagtattgggattacaggcgtgagccactgagcccagccagaaaaatcttcatagtgttttattctacctagcagtctatactaaattctgtgaatcaaatatggtgaatatcagtgtttgttttaaaaaaagagagagatgggaactaaagaacaataaacatagtcatctgtctcctttgttaacccaaaaatagaaacattttttatgctttagctttcatcttaaactcagctgtatttcataatgacatcattaagtgactgaagacctaatctgatcatttttgtatgaatgaatgagtattacacttggttcttatttataatacattttaacaggtgtagcattcctccttctatggaggagtatggttctaggaaactataatagggagcagcgtatgttactgggatggtgaaaactattgtccagtaatgagaaacctatactcgatttgtccctcctataccagaggagagaatatagatattgctgtagtgacattgacataatcagttcatacatgtctcaaagtatgtctccaaggaaaaattaatctttacagttagcacctatgaagcatcttcctgaacctttaggtctgctttaaattaaaccttatgaatttgtaatatattggtttacttaagctaaaaggtgtcatgaagaaaatttaagacagattatatatatatgttgaatctaaatcctacaatttttgaatgaagcagcctgttagtgtaaataacacaaaactcagtatcagtaaagtaaaatgtgattaaaaagtttaaatgactttatctgtactgatttcttaataaagttactatctctcacaatattttgcctgtgagtctgttgccaaagaacagtgcctctttcagattctggggtttttgttttgtttggtgcttgttgttttgcttattgttgtaaatatctcacacttgtagctttgatatactgctttttttttactttatcatattactcattggtttcatttctttacaaaaagagtaataaataccagcaatcatcacagcctgaattgcatataagcttttattttgttacggtaggcttatctatagcctgtttcaacatatatagtccattttccttcctctggttaccacagtttgaaagatttttagttattgatcattttcgcttttaatatgaaaaagtgaagagatcatctataccaagtaaggatctcatcaacatgagataaccagtaagaatagcttgataaaatgttgacgtgtataaccttatttcaggtaaatatgctattactgctataccttgaggtattaaaattaaaatggttcactgactatcattaccaccatcttgaacctctaagaatctaaggacctcaggttagaaaccactggcctggtcctgtgttttccttgaggtcctgccttcctttcctagtatcagttctacagactagcaaagttgtagtttacattatggccaccacttgtgattttccctttcctggctctgctttttgcatatgctattattccattatcatggaattctttcttcattttttctctacccatttcagtcttctcagatccattttgtaaactgttcctgatttttgtctcccagctcaactcaaattgtagtgtttgttctgtagctcatgtagcaattaaatgtcttgtaacattcttttcattgtttgcctgggtattatttaagtcttttattattatttaacatcccacatgcttttgtcttgttttccccaactaaattataaactctctgagggcaggtatgatattttacatttttgtgtgtttttctgttgcacttagcacaatgttatgtagcctgtagacattcagtttattgatttggtttgattttttaaaattattagtattagatttttcaagtgagtgggcattttaatttaaaacctaaacacctatttgttttgtgtcatatttgtgtatccaactaattaatatccagtaatctttaccaattaattgctttatattactaactttgtagcttttcctaaccagtttttaatccaagttaaaatagttgtggacagacttccaccataaaatttgtctttatatgtataaaataatcataatattagtgtaaataaatatttgaaaggtaagttaccacaagtataagttgttacaaatccaaacatgaatgtggaatcatctgcatcattgcttttctttcagcctgatccctaccactagtataattaagctaacttaataggattctttctaaaatcaacaaagttacagttagttttaaagttgtgataaataaggatgcataaaattcctttgtgataattatttttaaatgacattatttttatatttgtgggtaatataaaaatattttttataatccattaactgctatgtagaatattgggggtttgcttgccagtgttcttaactaacttgtttaatctatgtctagaagccacagaagaagtttctttggacagccctgaaagggaacctatcctatcctcggaaccttctcctgcagtcacacctgtcactcctactacactcattgctcctagaattgaatcaaagagtatgtctgctcccgtgatctttgatagatccagggaagaggtacaggaaaatgtattctaaattaatatgtaaatatataccttttttccccacccaacatcactctgctgttagtcatttctaatcaaagccttttagacattttgggaaaagaatattggactaaattagttatgggatctggcttctatcttccccactctacccagtgacctgggcatatcatttaccttgttaagtgaaggagtttgtcatttctgattttatgataatagtgtgcatttcctagggtttctctgttggtcagatgatatataaaagtgctttgaaaacttaatcacaataaagtgatattttgagtaaatttatttgataaaatttgtaataaatactgttaatacttaaaggttgatattgaaaaagaagggaggatgtatatcagttaaaggtacattctcatgatttggcagtaatttctgacaaggtgaatttggaaaagaaaaattatacagagattattttaatggcaaaattatgtatttaaaagtcattcatggaaatatgtcgttaaaatgaccatgattaagtaacaaccacataaaaaatataaacaatctcgcaaacataatattaagggaaataagtaagacataaaagaatacttacataattctaatatatgaactttaaaaacagataaaagtaaagtacagggctagatgtcagggtagtggttatgttggcaggtaaagaatgggtagtaactggaggggaagcaaaagagggcctcctgagctgtagtgatgatgcttatttctgatttaggttctgattacaaacgtgttcactttgtaaaggtttattgaactgtacacttaaaatttatatactttttatgtaatgatttttaaaagttttactttaaaaatatctgtacaagaagacaaccttgaaataaaacaattatggttcaaaacactttgcatttagatagtgttagactattaataattgccttgaaaattttgcaaagttgaataatctctgaactttgtgcttgagaataacaaagctttcctgcagagctaatgtttggattgcttatttttaatggcatttacaagggcttctctgaagtctcgacatagggttgtcatttttcccacttactgctttttcactgaggtttatagtgctttccttcgcgtccagaagaacgtgtttattagataattagagaaatcttgatactaaagttgcttttcagtataatcacttctgctggtaagtaaggttctactggtaaaagtaatgactacctacctccttggtattaaagggtagagagagaactttgaaaaatgctagtattaaaattaattaaggaggtaattttttaataatctgaatctgaagattcagtatatagaacaaaaaattccacaatatttgtacaaaaagacgaaaacattttttctacatctgaggaattaacatgagattttgggctgggcgcagtggttcacgcctgtaatcccagcactttgggagaccgaggtgggcagatcacctgaggtcaggagttcaaaaccagcctggccaacatggtgaaaccccgtctctagtaaaaatacaaaaatcacctgggtgtggtggcagacacctgtaatcccagctacttgagaggccaaggcatgagaattgcttgaacccaggaggtggaggttgcagtgagctgagattgagccactgcactcctgcctgggcagcagagcaagactctatctttaaaaaaaaaaaaaaaaaaaattgttacttctccaaatggtctttttcgtgtgtgtgtgtgtgtgtgtgtgtgtgtgtgtgtgtgttttatttataaagtcaggaaatgtgaaagtttttattgtttttcaaaaatgaagtgctgggtggctaaattatttgttgtgacagtgactcttacagaaaatagatgataaaaattagtgtcatgacaataatttaaattataatttttaatgccaaaaaataatttatactttctagattgaagaagaagcaaatggagacatttttgacatagaaattggtgtatcagatccagaaaaagttggtgagtcaatacttattatattttgtatttactttttattagtttgttggttttgtatggtttttcttcatacatcaatatagtattaaatgagttttatttttatgcatgtgattttaatagtagtgtttgactttttttgcaggtgatggcatgaatgcctatatggcatatagagtaacaacaaaggtgagctttttgtgcttttaaaaaaactatcgagccctcattatgtgtagtatgaggatatggctatgattaaggtagaagtgatccctgtctttataaaggttaccacctaataaagattgccaagaagtaggtgcaatgagttgtgagtggtttgatatgtagtgttcagtgagagtatgcaggatgggacctgatttagacctctggatgcctaagccaagacataggtgagggaaatgatggggaggagggggggaagaagaagaatgcttgtgccaggtgaggaatttgcttgtgcaaaagccaaaagtgaagaaagcattgtgctttctagaatctccaagaagtgatgcatgattgaaacgtttggcagtaagcctttgtgtattatgagcagccacattttaaggagtttggcttcatgctgagtataatggagagccattaaagaagttcaaagaagagtgtggcacaagtaggtttttgttttagaaatatttctttggcctcagtatgaattgggagggtcaaagtagaggtcaggatttccagttaaagggacactgcaatgattaaaggattgtatgcctttaaatattaaaagagcatgtctgtcacagcagttctagctgtaagcagtaatactttatactaagaaaatggttctggagatgagcaaaataagtggcttcttgagttatgtaggcggtagaattgacaggacttggatgtaatgggtgaggaaggagaaggatgcctaggttattgactagagggactttgcagctgtgagagtgatccatggagaaaggcaacacgggcaggaacacagtgaggatgaggatgacagttgttaattcattggataaatattcattaaacacctaccatggtgtcaagctttgttgcaagccctggggtatagtagtaaacaatacagacaagggtggcatcttatagaacttatgttccagcagggggaaatagggtaagtttgaagtgctggtgagatttaagtggaggggtatttggatatattggactgaagctttgtaagatatctgggccagatgtaaagatttaagaattattagcgtaaatagagtgaataagaccagttaagatagaataatgcaaatacttttttgtcctattaagattctgtaaaatacatctatggtttaggttttttttttagttagaaacctatataccacattagttagatactctgcattcttttgcaaagtagatacatgtatgtgttcacaattatgtataacattaacttgtggaataattgcttgctattcaaaatttgaaacacctcttcttcacttgtagacatctctttccatgttcagtaagagtgaattttcagtgaaaagaagattcagcgactttcttggtttgcacagcaaattagcaagcaaatatttacatgttggttatattgtgccaccagctccagaaaagagtatagtaggtaagcacaaatttttcaaaaattaatttttgttactgttactagttcagttttaactgtatagatttgtggatttcttagtcattcactgtcaacattttataatgtgtagacataactgaatttaagtatttcatttatactaatcatgcatggattgaagaatgtattggtaatagttttattttctaacacttgaggatttttgtttatgtaatacagtaatgttaaatattgggtagaggccgtgtgtggtggctcacacctgtaattccagcacttagggaggccagggtaggaagatcacttgaggttaggagttcaagaccagcctagccaacatggtgaaacccctgtctctagtaaaatacaaaaagtagccaggcatggtggcacgtgcctgtaattccagctactcggtgggctgaggcaggagaatcacttgaactcagaaggcggaggttgcagtgagctgagatcacgcctgggcaacagagtgagactccgtctcaaaaaaaaaattgggttgaaatttatgaagttaaaagcagttggaagccctaaccttttagggtcactagattaccattttactgagtcacaatcagagaatacttaatattattaatatgttaacatttttctaagggatggaggtgttagaccctcactagccttggctcatataagagctatttaaattcatcttagttcatttcgtacctcaatttaaagtttaaaaacatttctacttttttttttttttttttgagatggagtctcactctgtcatccaggctggagtgcagtggtgcaatcttggctcactgcaacctccgcctcctgggtttaagtgattcccctgccccagccttccgagtagctaggactgcaggcacacaccaccatgcctggctaatcctttttgtatccttagtatagacggggtttcaccatattggcctgtctggtcttgaactcctgaccttgtgatctgcctgctttggcgtcccaaagtgctgggattagacgtgagccactgtgcccggccacatttgtacttccataagcaataaagacttagttaagaaactgcagaaaattacaaaagaggaggaaacctccataggcctaccattaaaagacatctgtcatctcaaaattttgtagtattttattcaatgctttttcagtcataggtttttatttacctttttcttttttttcctttaaagtaattatcttctctgtattgttcacagttttagtatatgtgctgctgaagtgagcactaccattacttttctttatacttagattaatctgaaagtttttttgttttttgagacggagtctcgctttgctgcccaggctggagtgcagtggtgtgagctcggctccatcatggtggctcatgcctgtaatctcggcactttgggagaccgagatgggcggatcacctgaggtcaggagttcgagaccagcctggccaacacggtgaaaccctgtctctacaaaaatacaaaaattagccaggcatggtggctcctgcctgtaatcccagctacttgggaggctgagatgggagaattgcttgaactggggaggcagaggttgcagtgagccaagattgtgccattgcactccaggctgggcagaagagcgagactccatctcaaaaaaaaaaaaaaaaagaattttgctgatttattttttcccccaagctggtctcaaactcctggccccaagcagtcctctcatctggcctcccaaagtggtgggattacagactggagccaccatgctcagccaaattttgctgatttttaaattattgtttttacttttttaaacattaggtttataaagcaatgttattggtaccctttacagtttcagaacctaatgtatttagatgaatttgttatattctttctttttttaaattcaaaaattgagtttagtggttctttaactttttggtctttcaagacccctttgtagggatggttcaatccaaagtgttgaaatctgtagggatggttctatagggacggttcaatccaaagtgttgaatcagggatggttcaatccaaagtgttgaaattacaggcatgagtcaccacacccaactgaaatacatttaatgtggattaaattgtttaaaacttttttgctttttcttgagatggagtcttgctctgttgcccaggctggagtgcagtggtgctatcttggctcactgcaagctctgtctcccgggttcatgctattctcctgcctcagcctcctgagtagctgggactacaggcgcccgccaccacgcacagctaatgttttgtatttttagtagagatggggtttcaccatgttagccaggatggtctcgatctcctgagctcatgattcgcccgtctcagcctcccaaaatgctgggattacaggcgtgagccaccgcgcctggcctgtttaaaacttttatgtgtgtgtgtgtgtgtgcgtgtgtgtatatatatacacacgcgcgcgcacacacacacacacacacacacacagcccaccattccaaaaaggatttcaggcaactacagataatacagtttatatatagagaaattatcaggaaaaaaataaatgtagtcaaatagtaatatgaagccaagcaaaacaatttcttcaaagtatggtgaagtcttgaataattattaaaggtgggtgacaaattaatctttgaacttctaattacatagctggtggttttcaggtaacttacacttatagcagggagcatggaaaaagagtcataacttctcctgtttgctgggaagctttataactgccactgaagggagagtcttcattagcacgtaactctctactttggtaggaccttagttgacctaagaagactattccatttaaactgttagaacaacaaagttgaaaagtattaaaagttaactagttacggtaggttgtttggggttttatttatttatttatttatttatttatttattggtcacaatgtcccttaacaattaacctctaaaaagtagaatggatagaaggtttttaacttcagtgaagaactacccagtggtgagattttttttcagggaaatagagtttgtgaaacaattcacatcccaattccggtagttcagtcagaggtagttgtagttttaggtgtcttattttccttttgaagccattgtattccattggaattttaaataaaacattaataggtgattaataagttaattaatgtgccaaactgaagatgtaccaaactgaagaattgtatggttttacataatccatttttaaaaggctttattggaatataatttacataccatataattcatccatttaaagtgtctaggtcgggtgtggtagcacatgcctgtaatcctagcactttgggaggctgaggcagttggattgcttgagctcaggggtttgagaccagcctgggcaacacagcaaaatcttgtctctacaaaaaattagctgggtgtggtggtgcgtgctggtggtcccagctactcaggattgcttgagcctgggatataggggctgcagtgaaccgtgatcatgccactgcactccagcctaggtgacagagtgagaccgtgtttcgaaaaagaaaaaaaaaagggtatccagttcactggcttttaatatattaagagttgtgcatacattaccacagtcaattttagaatatttttattaccccaaaatggaatctgggatcccttagccatcatcccctaatgtcctcattttccccagccctaggcagtcactaatttactttctttctctaagtatttacctattctggacatttcatgtaaaaaggatcatgcagtagatgatttttttgtgtgtgacaaattccttccacttagcatcatatgttcaaggttatttcatgttgtagcatatatcaataccttgtttccacagaatacatttttgaaaggaaaaagaacaggagaataaaagagaaaaatctgcagcctgaaattaaattgcccttacagaagtaattaacatgacttattttttaaatctgaagttataaatgactctgtgaaagagctttttctt

SEQ ID NO: 926 - DNA, 32742 bp, Homo sapiens; identical to SEQ ID NO: 338
  source 1..32742: mol_type = other DNA

SEQ ID NO: 927 - DNA, 32744 bp, Homo sapiens
  source 1..32744: mol_type = other DNA
aggtcgaccgggtcaggtggttgggtgacgccccaggaaagcgctccaggccgagggcgggcggcgccgccgcgcccgacgcctctgggggtggggacttcgcgggagtcgccggcggaggcgaggaggagctctgcgcggcgcggcgggcgatccgagccgggacgggctgcaggcgggggtgctgcagaggacacgaggcggcgggctggagacatggaccgcggcgagcaaggtgagggcgcggacccagcgggcttgggctcgggcttggactcgggcttggactcgggctttggctcggcgcggggctgagcgcggcccggcggctcgagcaggtgccgagcctcctgggccggcgccgcaagttgcatctcccggatccggatctggcatcctggggccctggaaggagcggctctggcgggggcagatgggactgcatgtgtgagtgtgagtgtgcgtgtgtgggggagagggagagaaggttctgggaggtggcgaaggggctagcgtcaggggctggcggccgtgatgcgctttgggtggaaagccgcgtgaagggagcacggcgcagccagctcctgtaagtgactggaaccaggaacagaggacagtgagtcgctctcgtccctccaggtgggaaacccctctctccctcataaattaagactttctgccttcttctaagttcaggtggttaggatttttggtggcgtatgacccatggggggtttgggaggcagatatttatcatactagaaacccccagattgtggagtggtgtctgtgggtttgagggaagagagcttttcgtaggaagggtgaaatcccacaacacaaaaccttcagtctaatttaccatagcgttgggtgcacttgcttctgaaaacagctcaagtgaaattacccccaaatagagcaatagtaggccatggttttcagatttaaatagtttcatcctagagatctctgctgatcataagcctgtgactgtacgcagatgtgtgtggcacgcttttaaaaagatacataaatgctgaaaaaagaaaacaaggtaggtaatcttgggaagtgaggataggaatcactcctgttttgagccctgacacaagttttcatgtattgcttattttcctccagtatgtgccgtcatgtgtgcatttttatgtaaatcaaaccatattccaaatatactatcttgtactttatttttttcagactctggtgttttttttgtttgtttttttgagtctccacctgtagcccaggctggagtgcagtggcgggatctcagctcactgcaacctctgcctccctggttcaagtgattctcctgcctcagcctcccaagtagctgggattacaggtgtgcgccaccacagcccggctaattttgtatttttagtagagacagaggtttctccatgttgaccaggctggtctccaagtcctgacctcaggtgatccacccgcctcagcctcccaaagtgctgggattacaggtgtgagccactgggccaggcctgtactttactttcatttacttgtaagatagactctttggagtctttcagctctttcctcgctccccttcagattaatttcagacttaacacaagtgcttacaaacattacatacaatatgctttatatgtgttacctatgtgtatatatatattatacattacctgtataacgtatatatacacatacatattattatctaaattttaagcttcttgaggttagaaacatttcatctttggttgtcctgagtgggataacatgatgacttgtacatagtagacatgcaaatgtttgagttagaaagcttgtcacatgtcttgtatatattgttagccggcttaggggccaccatgtaagtcagcattatgtctgtctggctttcaatgggggcgacgcaggacgggggagacatgacgacaaacgtgcccatgtgtatttgtatactaatctgttacacactgtcgtttgacataatgatgtttttagaataactatgtttggtacttgtcaaagtaaattaaacggctgtgttttacttacgtgagtggagtaactagttttagtagtgtttgtgttctagcttgggtggtaagaatcaacagtcattggtagcactgcagtattccaacttcttgtgtagtttttataggactagtttaagtgtctaattctaagacatatttttttcaaatctttatcttgtaagatgagtcttttcgtgtctataattttcccatatgttctttgggtgaggtggaggactctgctccgaatgaaagaagaggcactgccttgggagggtcagttcatttactccaaagctttgctgtgttagaacaacgtggccaaggctgggtgcggtggctcacacctgtaatcccagcactttgggaagctgaggcaggcagatcacttgaggccaggagtttgacccctgtccaacaaggtggaaccctgtctctactaaaaatacaaaaattagctcggcgcggtggcaccggcctgtagtcccagctattcaggaggctgaggcaggagaatcactagaaactgggaggcagaggttgcagtgagcttagatcaaaccactgcactccagcctgggcgacagagcgagactctatctcaaaaaacaaacaaacacaaaacaaaaccacctggccattccttactcttgcttccacctgcctacctgccttttcatctttatgttaccagtgcacacagtaggtgcttagaaatatgtgttgactgcctaagatgagtgaggaaagtgtccaagagcaggccccagccatagtaacctctgtgtccctccaaatccatctcttgtttcccactttctcctgttctgttttccctgtctattctcaagaagcagaacttagccagagagttgctgataaggcagtgctgggcttggaggataactttacatggaagatcttagaactagtagagtggatgactcagtcttaagtgaatctggagcaagactcctgccttaaactggaaaaggcacaacctgggattttaaacctggtgttcactagcaaactgtgttggctgaaataaggtttatcaaactctgtgattgtctcctgaattgtgattttggcaacatacttaaaaccaaagcagaaaattttaggatttgttgaacttttaatagtttttaatgtacatggagttttcttatatttgtcccttaaaaaatccctaatgaaactctagttgtaaaattaaatgccctacctcttgtcttacatgcatttatctattgaaaatccctcttccaaccttcttatgtgaagttatcaaaaaatctgttcttgctactgattgtacttaacagagctgtaaatttttaaaataaacactgagttttccttatgttttcaaccacgagtattctaatgctctgtagtatcaggcccagattctgttgtttttctactttctctcatacctagggcttgaatacaatactctgcttacagtgagagttcagtgaacatcaaatgatttaaaatacgttaaattgcatcatgcctttcaagagtttccaagcattaagctcagcgcagcacatttactgtgtgtggtatttcctactttgatagagcagtgttgctaactagagcatacattgtgtagaaaaccctcctgactaccttttatggagctgaataaatatgtatacttgagtgctctcatgttagtcataacctttagtttagcactgttatatagaagtgacagtcacgtagcccactacacattatactagtttgaatttaaacaaagcaaaacaactttataattttaaggggaagaggaatggttcctgaggccaaaaaactagagaggaaaggcttcaaaaaaagaataacacaataatatgtcactatcattttaacattgtaattgtgccttagaaataaataacagaaatgtggggtatcatttatttaaaaataaagcaaatgtagagaataatggataataattttgagggtctactcccaagtctctgggtgtgacccaccccatccaggctgttaatttatttggtcaacagtttcgtgatttccatatggtgctgatgtctttgttagctcttcttcacttcctgcatttatttttatgtggcaggctgcctagtccctaggggaatagctgagtggtaggaggggttgtgatcttttagcaagatttcaaaacagaataatgtatgcatgtaataaaaacaaatacgctcactcacagtgcaaaaccaaaaagaacacccaaatccctggaacttctgtgctactaagtcttttgttgtaggctaagattattttccttttggggttaattatttctgccttaattattgactgttgtgaaatctctcttctgagacattcccaaattttatttaaactagtgggtaccagctgtactgaaaccataattttagccatgtatttttattagaaaaatgtttccaggggattaaggaattttaatatttagtggaagttttaaaaaagaatgtaaaaatgccttttggaacctaagaatagttgtctattttagaaaaatcagaaatattgatggagaaaaaagaaaattacccataatcctgtgcgagaatgagaaatcatagttagcatattaatttatacctgttcatgtatctatgctttaaacaaatcacaattttattattattttttttaacagtgtctcgctctgccacccagggtggagtgcagtggcgtgatctcggctcactgcaacctctgcctcctgggttcaagcaattctcctgtctcagcctcccaagtagctgggactacaggcgcatgccacgacacccagctaatttttttgtatttttagtagagatggggtttcatcatgttggtcaggctggtctcgaactcctgacctcaggtgatctgccctcattggcctcccaaagtgctgggattacaggcgtgagccactgtgcccggccaacaaatcacaaaatttcttattgaatattgcattttataacttgcccttttaaaaaaaccctaaatgtatttaaaaaatacactttaatggccgcatgtggtggctcatgcctgtaatctcagcactttgggaggccaaggcgggcggatcacctgaggtcgggagttggagacccgcctgaccaacatggagaaaccctgtctctactaaaaatacaaaattagccgggtgtggtggcatatgcctgtaatcccagctactagggaagctgaggcgggagaatcgcttcaacctgggaggcggaggttgcagtgagtctctctctcttgcccaggctggagtgcaatggcaccaatttggctcactgcaacctccacctcctgggttcgagtgattctcctgcctcagcctcttgagtagctgtgactacaggcgtgtgcctccacgccataatttttctatttttgtagagatgggtttcatcatgtagtccaggctggtctcgaactcctggcctcaagtgatcctcccgcctcagcctcccaaagtgctgagattacaggtgtgagccactgcgcctggcctagagcagctccatttttaatggccatttgtatgtatttatttatagatgtaacattttatatactgttatagacaatatttaacttgttccctgttgatgaacatttacattttgccttgtaggggaggaaaaatttctccctacccttttagggtttctggcgaggcctaggaattaaaccaacatgagatagattaacaggagaaaagcatgcaaattttatttagtgctttttatgtattacataccttttaccctcacaagaggaatgaagactcaaggaagtggcttggcctgatcgattatatactaggtcaaaaaaagagtggcagttgtggaaaagtaactaggaaggtaaggtttagtttagcaaggtttctttatgcagatttctttgggcttggacttcctgtgataagaatgtttctttcttcctggtagagggaggacatctttcatatgggagcttcatcttctgctttcaggaaaaagagaggaggtttgggtgcccttcttaacacctgctgtttttcaagtgcctttagcccaaaataatcagcatgctaaagtggaatgttttgggatgctgtgtcctgaactccttcaccctgatattttgctgttaaaacaaagctgcagcaaatgtatgtgtatgcaagtcattccataaaaatgccagtgtgtctgtaggaagaattcttagaagaatgtggctgttcaattttgatagtgccaaattctgctccatagaagtggtgccagttatacttccaccagcatgtgcgagcgtttgctttcccttgccatgtggccaggatgttgccacacttttccattgttgcttgtcttataggggaaaaatggtttctcagtataagtcttactatatatatttaatataaaggtagtttacttcttttgatatgtttacaatctacatggcattttctgtgaaatatctggccatatcttttgccaatttttctattgtattttatagaatgtaccccgtttatgagatgagttgttaattttttttctagtttgtcataccttttttgactttatagtgattttttttaaccaagaagaaatactaatagctctttttttttttttttttttttttttttttgagacattgtctccctctgccacccaggctggagtgctggagtgctggagtgcagtggcatgatctctgctcactgcaacctctgcctcccaggctcgagcagttcttgttcagcctcccaagtagctgggattacaggtgcgtgccagcatgcctggctaattttttgtattttttagtagagatggggttttgccatgttggccaggctggtctcgaacttgtggcctcaagtgatctgcccacctgggcgtcccaagctgctgggattacaggagtgggccaccatacccagcctaactaatggctcttttcatttatggattctagcttttgaatcatttttagaaatgcctccctcactttgagtttatgcttttatggttttattttttatgtttaaatctttcctcaatctggagtttgttttgataatgagatgtgaggtataaatcttaacacctccacctccaattggccacccaactgcctaacaccattcattgactaatggcttcttcctctattgatttgaaataccactgttgtcatgtactaaattcttacattcttttcttttctctttatctgtatgttcattgccagcagctaaacctagtttaagttattgtagcttcataaaatgtaaaaatgtctggaagggctagtttgctctgattactctatttttttttctgtcagtttttttctaggtattcttgccagactatttccaaacgaacattagaatcaacttatctaggtgaaaattcaacaaaaatcatgctggcagatctttttctccttctctctcctcccccctttcccctttctgtctgtctgtctctctctctctctctctctctctctctctgtctctctctcacagttagaatttggtctgtttctttattcaataccccaatatatgttcattagggttatactgtatacactacacataacagttttgttttttgttttggatattatttgataataagaattttaccacatcattaaaaaaagtttccccaagctataatttttgataattgcactcttccactattcaaatgtttatttaactctttctctcctggagtaggtttacattccattttagctatgatactgctttaagagaaattgttttaagataaatttccatagacaggtcaaaggaggtgaatatatgtaagcttttcgatgcctgttactgaatctcattctggaaaacataactgtcaatgccctctttttctcatggtaaaaaaatacataacaaaatttaccatcttaatcgtttttaaatgtacagtacgatagtgttaactgtatgtaccttgtgcaacagatctctgaaactttttcatttttcaaaatgaaaactctgtactcattgaacagcagcttcccaacttccccattcctccatcccctacccctggtaacagtcatagaaaccgtgattttatgagtttgaccactttagatacctcatataggtggaatcatgcagtatttgtcttcttgtgatgcttattttatttagcatgatatcggggctcatgcgtgtgtagcacatgacccaatttccttcttaaggctgaataatattccattgtatgtatgtactacattttctttattatttatctatcagtggaaattaaggttgcttccacatcttggctgttgtgaataatgctgtaatgaacatgagtgtgcaaatatctctttgagagcctgtgttcacttcttttagaaatatactcagagatgggattgctggatcatatgataattctgttttaattttttcagaaccttcatactgttttccataatagctttaccaatttacatttgcaccaacagtacacaaggattccagtttctctccatctttatcaacactcgttatttcccgttttttttgtttgtttgtttgttttgttttgttgtgttttgagacacagtctcactctgtcacccaggctggagtgcagtggctcaatcatagattaccataaccttgaactcctgggctcaagtgatcctcctgcctcagactcccaagtgctggacttacaggttgagccattgtgccaggctgttttgcctgtttttgatcagattagttgttgagttgtacgacttttttatatatatgttctggatattaaccctttattggatgtttggtttgcaaatattttttcttattacgtaaattgcctttttattgtcttttttttcttttctctttttaagagattgagtctttctcttttgtccagactagagtgcagtgatgcaattctagctcattgtagccttgaactcctgggctcaaggagtccttctgcctcagtctctctagtcatttccttaaaaaaaaaattacagagcttataggcttcaatttgtctgtttcctagagaggttatagatgttattatccatttgtatttccctctagagattgttacttatctactttgggatcttagtgtgtcttgccttctcattgttctctgtcaccttccctccttggcaagtatttactttttctattttgcttatcattttggttatgttggatctttcaatgttatttttattagcaaaatacagtattaggagcaaatattttccaggtgacattttgggggtaatttgcatggctttctgtggctttcagtacttccttcttggtgtcttttctgtttagacacttgtaattggtactaaaaatagtgatttcagacaggctattaatttacatgccttggctcataatcatggtgagtgtgttttatgttacagctatacaaatgtaaatgtcagttttaaaaattatttaaggccaggtgcggtggctcacacttgtaatcccagcactttgggaggctgaagtgggcggatcacttggggtcaggagttcgaggccagcctggccaacatagcgaaaccctgtctctacaaaaaatataaaattagcccggcgtggtggtgcatgtctgtagtcccagctactcaggaggctgaggcaagagaatcgcttgaacccaggaggtggaggttgcagtgagccaagatcatgcctctgcactccagtctgggtgacagagcgagactctgtctcagaaaaaaaaaaaaatatatatatatatatatataaatgtgttcttgataaaagttttggattgggaacttattaacaggatgaaatttcacccattgtatccttagtttatttggaggcattgtggtgtggaaaaggagcttatggtccaatcaggagggcttaagaaataaagatgatagtttatccaacccactagaatgtgtacttggctagaaatagtgtcactagaataggagactgccttacattttattcccagcttgcagttcaagtatgaatgtagtaggtactccataaatatttctcatattgcacatacatcaatcaaaaagacttctagcattaatagagtcagatggatttggatagaaaagactaagaattaaagaaggaacatggtttggcagggagataggaatatatgttctaaatatgcttatagtcttacatataatcactgaaaatctgtctgtgaatataagttaaattggtactttgctcctaaggcaggtatgtaagaatgtgtgtgtatacataggtagaagagacggtgttggttaaatttttattcttgaaaggatattggatatagtgctcaataaatacttcataaacacattttcagtgctgttctattgaagttagttatttacttctttttttctttttcttttttttgagacagagtctcgctctgttgcccaggctggagtgcagtggagtgcagtgattgaggctcactgcaacttctgcctcccaggctcaagcaattctcgtgcctcagcctcccaagtagctgggactacaggcatgtgccaccatgccgggctattttttttttttttttttttttttgtatttttagtagagatggtgttttgcctcgtttcccaggctggtctcgaactcctgagctcaggcaatccaccctccttggcctcccaaagtgctagaattacaggcatgagccaccgcccgtgtccagccagttatttacttctaatgcattctgagcctaggagacatggatggccttagcacatgttagtagtagtttttaaaaaacacatttcagaagggcaagcagtatgttgacagtagtggaaagtgcttgctactagtaaaccagaacaaaaattctgtaaagagggaaaaatgcaaacattttgcctgcctgagacatttggcaaatggatgattaatcttccatttcagtatggaagttggaatattccatatggaagttggaatattaagtatggaatattattttatgagaacccagaatgagaatgatgacgatgataccacatggcctttgagaactcttactaattttctacatattatcttgtttcagtctttcagtgctgcaggaaggtaggactggtacattttcattttatatatgaggaaacataatctgaatgatcacgacttccccagatgtactctgctggatgtggagagctctacaaaagcttcgttccaaatctgttgtctctaagagaataatctggagtccaagaaaaatttaaactactttttttttttgagatggggtcttgctctgtcacccaggctggagtgcagtggtgcaatcatggctcactgcagccctgaccttatgggctcaagcaatcttcctacctaagcctcctgagtagctggggccacaggcgcacaccaccatgcctggctaatttttttattgtttgtaaaggcaaggtcttactatgttgcccagactggtctcgaacccctgggctcaagtgatcctcctccctcggcctaccgaagtgctgggattacaggtatgagccactgcctggcctaaactacattttctaatcagtttatagggctaggaacatctcatactttttaaagaaatgttttctttccaaataattgaaacaaaattggaatcggaagtaacagagcttcagctttgcattacaattaagttttccagctggggttttactgggtcatttttagtaatacaactactgtggttaccagcaacaacatttattgttttctgtatgtcaggttctgtctaaatgcttttcatgttttatttttgaaaaatttcagaacataccctatgagcagatgctaacagtatccctacgttacaaatgaaacagggcatgaagggacagagtaataactttttcaggggcacacagcttggcgcagacaggtctgggattttgatctgtgatgtctggctagagagtacgtgtccttacccagcctatacctatactacataaaagttgcagacaatcttccttttccttgcaaaggtgttgttcaaaagcacagtacagctgtggtaggagccatggaaaggagcaccaagcagtgtatctataccagagtctggccagtgtgtctgatcttatgcatcagaattgattgtaaattagttcagaatactgaacctgaagtcatatcgaggttcaaaatttggcttcatcattttctggttgtgagacattggataagtcactaaacttctctaaggctgatatctcacatatgcatgaaaattaggtacaaatctgttactagtactggtgctcaatagatactgatttttgaaactgaatattagatacttctgtaaaatgctaactcagtggttcccagtttaaacgaaacattttatttctttagagacaagtgtgatattggacatagtgctcaataagtacttcataaacacattttcgatgcggttctattgaagttagttatttacttttttttttttttttttttttttttttgagacggagtctcgctctgtcgcccaggctggagtgcagtggcgggatctcggctcactgcaagctccgcctcccgggttcacgccattctcctgcctcagcctcccaagtagctgggactacaggcgcccgccactacgcccggctaattttttgtatttttagtagagacggggtttcatcgttttagccgggatggtctcgatctcctcctgacctcgtgatcagcccgcctcggcctcccaaagtgctgggattacaggcgtgagccaccgcgcccggcctacttctttttttttttgagacagggtttcgctctgttgcccagcctggagtgcagtgatgcgatctaggctttgagcctgctctcaggctcataggccattctgaagaaacaaacatacaaataggctgctgtagtagagtagatgttgtgaaaagtttataaccctggctgaggaggaagtgagcaacgctggctggggtcttcagaaaagaattcccaaagtaggtgacctttgaacttggacttgaaagctgctattgactgaatgtttgcatctccctcacccccattatccaccactctggcagtggtagataatgctgaaagatttgggttccatggatgggggtggggggtggagttgaggagaattgggttggggttgaagaggagtggggtggggaggaggagaatgggagggctggtacaatggattgcaggcctgtgggaatgggggaatggtaaagggaaggcaaccggaaagggaaactgctctttggagaagtcatgggtgttttaaagggaaatttggattaagtgatgggaatttgcttggctattcccaagcaaatattcccaagcaaatagactatagatattaaatttgaatgtcgtttttagttcctcagtagagaggatgagtagtttggcatttgtgtgtgtttgtaaaatgagagcagaaactagaggcatgggagaataactggatttgctatgcctgtggatgccactggttttagttaagatgcttttaatgcaaaatgtattttaatagtgatatcgtagagtttgaccttcaagaagctcaagtctgtaagcaataattcactttaatgtgtaagagccttgcagagaataagaacatattaaatatttgcagaatgaaagtattatactttccctgggtggtatgatagccagagaagcagtttagtctagaggtgacatttgggtgaaattgtagtaatgctgtgattttagaattttaaccagtgatttctaagggccaacctgaagcttgttttcatcgtggagtgccttggctatgggactgatttgtgcagcttctagatttgttaactattctcgctcgggtttttttgagaaatgattttcattccagaacagcagttcctcgacctgagagtcggtcagtgcttttcttcaggtcattgttgagggggaaacctatcggccaagcctgcctctcctggtgactttatagtgctgtgactttatagtgactttacactgctgattgtgtcagggattcaatgaaaatcctgactgatggtaaagagggcatggcagatttctcttggtttaggagttttatttttcccagcattaccatcctttcccaaacttatttccttttttttttttagccttcaagaggggcctctggttccaggagccctgtcttcgccttggttgggctctgtctggggctgtggtcactgcagatgacattctcttgactggattattaatttcatgatgatgactatagatactaaatttgaaaagtagtgaagtctgatgaggcaaccagcttttcaaagtgcattttgtgaattccctccaatccaaagtggagcgggaacctcaaatcactggttagacttggtattattaaataatcagctccattttggcaaagagcagtctccctttctggttgccttccctttaccattcccccattcctgcaggcctggaatccattgtaccagccctcccattcttctccaccccaccccactcctcttcaacccgaccccaattctcttctactctaccccaatccacagagcccaaatctctcagcattatccaccactgcttcttatcaccaaatccagtatctactcttccctctcaacctacttggcatccccacagccttggaaagtccagcactgcatttcttaattcgtaccttcctttccccctgagatgttcacattccatgctcatttctccttgtttctcctattctttttcctgggccatctaaacagcttaatagcttcaaatatcacacgtcctcaggtctcctaaaccttgatatcctgcccagctctttctcttagaaatccatatgtcactcctgaatctacccacatcaacatcccacaaagacttggtgatggttttaaaacatgttcacacattcgttgatactcctccctccaaaaggtgttctgattcccctctccttgaatatgggctggcctttgtgacacatttctaactaatagaatgagacggaagtgacaccatgtgacttctaaggctaggccataaaaagccacacagcttgtacctgcctctcttggaactgctgccttgagaaccctgagcgaacatgtaagaagcctggacaccctgagtctgcatgctggaggccaggcagacagagacaggtgccaggaaacctcagttgctaggtcttcctggtgtcagtagcccctcatgtgagcgggtgcaccttcagatgcccctagcctcagtcttcaagtccccccaactgaggctgagtggagcagagaatagctgtcctgaccaagccatgcccaaactacagtagtgtgaccataataaatgctgttgtttaaaaccactaagttctggggtggcttgttatgcagtattggataactggagcagaccttaaatatgatgtaccccccaaacaaatgcatcatctccatcccttcatctgctcttctttctatattttcttttcttttctttctttttttttttttgagatgaagttttcctcttgttgtccaggctagagtgcaatggcacaatcttggctcactgcaacctctgcctcccgggttcaagcgattctcctgcctcagcctctcgagtcgctgggattacaggcacacgccaccatgcctggctaattttgtatttttagtagagacagagtttctccatgttggtcaggctgatcttgaactcccgacctcaagtgatctgcccgcctcggcctctcaaagtgctgagattacaggcgtgagccaccgcgcctggccctttccgtattttctatctcagtaacttctccattcaatctgaaagattttctctacttttccttttcctcagatgcctcgagtccccctccactgctcaacgtctgactattccaaccctgagccttgcagaaatccagcactcacaccccatgacaccccctacctggtttgaggattcataaatgcctttttgccctctcatacctctgcattgttgcacttgctgaatcttcttcgtaaatttctttccttgctgttctctttattctctcaccacctcaaatcactggaatagggagacccaaggaaagggagagagatggaggaacggccagtcagtggagcagtcagaacacacacaacatttattgattaaatttgctgttttatacaagcatggttatggtgcatgaaagcaattacaatagtaacatcaggcctggagcagttgtttatgcctgtaatcctagctacttgggaggctgaggcaggaggatcgcttgagccctggaagcggaggtgtcagtgagccaagactgtgccactgcactccagcctgggtgactgagtgaaaccttgtctcaaaaaaaaaaaaaacaaaaaaccaaaaacacaaaaagccaaccaaccaaccaaacaaacaaaacaaccccaaaaaacaattataatagtagcctcaaaggtctctcatcacagatcatcatatacataatttatgtatgatttatgtattatataacattttgttctgcaggaataatagaaaaaaaaccctgaaatggatttcctactttgtttatttattagttaatttcattgctacttcaaagctaatgtaggtgttttgtgtgtgtgtgtgtgtgtgtgtgtgtgtgtgtgtgtgtgtgtgtgtatgtcatgattcaaagcatagaagaaacattttgaattattaattgagaatttaaaaatcatacttcattagtttagctatttgagtttctctgtatgaattttgggctgaggagaaacatagaagccacagcagctttcccttttcttgattcaaaggtgtcataatttaaaaactttttagaagatgaagaggacatttgattttttgttatcacttaaggggagagggaagtaagcagtgagtcaattgcaattcaaatccggtgccatcccaggacatagacctctgtagtattgtcacgtccaccttgggctttgcgcacattggccaccagggagggttcgactccagagagcctcacctgtgtctagagcttggggaggctgcgggctgggcctgcctcttccacaggagtcctgggagccctcctgatactccccatgggggacaacagggcccgttgcttctctgtctctcttccttctcctgaccaagttgcctgcccatgcagtcaccctttagcttttgatgataatattattttttagaattttaaaggtgtgttcattttcccaccaacactcctacttcataaccttattttgtgcagtgaacaaaagaagatgtgattgtgtccttcacagtggggcaggttctgctcatcctttttgtagaggttggaaaaggtgagtgaaagggcgcatagggagggatggggatggtttgggcctttctgctgttgaagagtttgaaattcttagttcttttcaaccagttctatgtggaaagaaaggtattttatttgacagtgatactaacattgaaggagtgtttcctagggcctggctcccgccaagcatctatgggcagcaaatgccctgtttgtccctcacatcagccctgggcagatgtattttcccttttcctgttttactgatgagggagcttaaaatttagggagattaaggacctccccaagatcatagagtttatcaccaatattttactgactctccataatatagagagctcttatcttaaatgaattggttacagatgtaaatttgccaaaatggaggtgatttatttaataataccaagtctcaaatgttggaggttttaactttgaattattgacttaacctctagtagaatgttatgatgccagtgtagccaaaaaagaaaagagaaaaagtcttgcttttgttgattttaaaagtgcctgggacctaggaggggagagggcaatgatgagatgtggaaagtgctggaagggaagcattctgcttacccctgtccagccttcttgagggatcattgctccctttgaggaaatagtttttccttccaaggcaatatactctgcttattccaagggaagccaatggacagctcaccgtgcgggccccgtgtcttggaagcacctgtggtgccattaacttccttcagttcctggagcattgcagtcaaagcagctgtacttaatgtagttcgtattttcctgcacttgaagtaattctttatcattttttgcataagttatacataaccttagtggagaaacctgtgaaagcatagaagtaagacatttctttgtaataaaatcctagtaacctcagcactctcctcccacatttgttagtgcctaagagtcttcttttatttaatatacatataaattcagggtcaaatatgctatcagaaacaattctaatgaaggtaaaaactaattttattcacaaatgtttttgtgtaccctctctttctcccctccccagcacacaccccgtcaagttgatattcaggttcttaatcacaagcatttacttgccacataggctgtctttggcaggcctatcagtttcctcaattcgaaggaaacctgagatctgcttgtgcctggcattttttttttttttttttgagacggagtctcacactttcgcccaggctggagtgaagtggcgcaatctcggctactacaacatctgccccccaagattcaagtgattctcttgcctcagcctcccgagtagctgggattataggcttgcaccaccatgccctgctaatttttgtatttttagtagagatggggtttcaccatgttgacccggctggtctcggactcctgacctcaggtgatctacctgccttggcctcccaaagtgctaggattacaggcatgagccaccgctcccggctgcctgacatctttcatgtgagagatctttggagctagatgcaccagttactcttttggatattaaatggtagtgggtgttttttgttgttgggaatgagtgtttaggaggaagggtgttttcatcacagcatttcacacctcctttggtgctgccattcgagtttgcttctgcccatgtgattctgtcaggtactatcaagggttggcctggcttcttcatcctcctgctgaggatatggctggcctctctccccggtcagctctctacctgtgggtaggaaaaggtattcaagattcacctcctgctcctggggtcgggggggcatgaaaggcaggtctgatcttctccctttctcgagctgttactggctatttagaaaagtctgttctggaaggtgcgtctaaagcctgggtgttgcctttctagcgttgcagtattctatttttgaagtgatagagaggtgcagggctcttgtttatattgaaagctgcttaccaggaagtacttaggtctcttctgacaaaaatcaacataagcgcaattaacattgtcttgcttttaacttaatttgctttctaattcatttagcaatggatgtattactaaatgaccttgtaatatatcttacacctgtcaaaagacaaaattacaacaaatttagttatagatctaattggcatttattcattatttggtaagtgggcagcctccattctataaaagagactgagcttccactgggcaatgtcagaacagtgccttttataagggaacaaagaaacagaacaatagaaaaaaaaagctgattggttaacaacaagttacttcaggttacttcttttaaaggttaaagcagaagagactttcttattatgctgattctggtagtttggaatctcctgtttccagaaaaaactgatctttttttggggatctactgcttctttaaagtttcaatatgattatgtggcagtaagcatgagtgactcactttggtgtggtctggcttttgggtcctagtgcaggagcttagtccaaaaacagtggcctcccataatttttgtttaatatactttaacaatcacttcggctgtttcttcaagttttaagcctattctttttagaggtaaaatatacttttgttatttctctttcccattgtaatagtctgttctcacattgctaataaagacatgcctgagacagggtaatgtataaaggcaagaggtttaattgacttacaacttcacatggctggggaggcctcacaatcatggcagaaggtgaatgaggagctaagtcatgtcttacatggtgacaggcaagagagagcatatgcaggagaacttccctttataaaaccatcagatttcatgaaacttattcaccatcacaagaacagcacgagaaagacctgcccccgtgattcagttacctcccaccaggtccctcccacgacacatgggaattatgggagctacaattcaagatgagatttgggtggggacacagccaaaccatacctttcttcccctggcacctcccaaatctcatgtcctcacattgcaaagccaataatggcttcccaacagtcccccaaagtcttaactcatttcatcattaactcaaaagtccacggtctaaagtctcatctgagacaaggcaagtcctttccacctatgagcctgtaaaatcaaaagcaagttagttacttcctagatacaatgaaggtacaggcattgggtaaatacagccattccaaatgggagaaattggccaatatggaggggctacaggctccatgcaagtccgaaatccagtggggcagtcagatcttaaagctacaaaatgatctccatgtctcacatccaggtcacgctgatgcaagaggtgggttcccatggtcttgggcagctccacccctgtggctttgcaggtacagcttccctcccagctgctttcacgggctggcgttgagtgtctgtggcttttccaggtacacagtgcaagctattggtggatctgccattttgggatctggaggatgatggccctcttctcacagctccactaggcagtgtcccagtggggactctggtaggggctccatacccacatttcgctcctgcactgccctagcagaggttctccatgacagccctgcctctgcagctaacttctgcctggacatccaggcgtttccacacatcctctgaaatctaggcggaggttcccaaatcacaattcttgacttctgcatacccacaggctcaacaccaggtggaagctgccaaggcttggggcttgcaccctctgaagccacagttggagctgtaccttggccccttttagccatgactggagaagctgggacacaggacaccaagtccctaggctgcacacagcaggagggccctggacctggcccaggaaaccatttctccctcctaggcctccaggcctgtgatgggaggggctgccttgaaagtctcttgacattcccaggagacattttccccattgtctttatgtttgtctaacgtttgtctcctcattacttatacaaatttctgcagctagcttgactttcttcctagaaaatgggtttttcttttctactgcaaattttccaaacttttatactctgcttcctcttgagtgctttgccacttagaaatttcttctgccagataccccaaatcatctctctcaagttcaaagttctaccattatctctagggcaaaaagccaccagtctgtttgctaaagcacagcaagagtcacctttgctccagttcccaagttcctcacctccatctgaaaccacgtcagcctggactttattgtccatatcactatcagcatttagattaaaggcattcaacaaactttcccacattttcctgtcttcttctgagccctccaaactcttccaacctctgcctgttacccaattccaaagttacttccacattcttgggtatctttacaagcagcacctcactataccagtgccaatttattagtcttttctcacactgctaatgaggagacatactggaaagtgggtaatttataaaagaaagaggcttaattgactcatagttccacatggctggggaggcctcacaatcatggtggaaggcgaatgagaagcaaagtcatgtcttacatggcaacaggcaaggagagcgtgtgcaggggaacgggcctttataaaacctttataaaaccatcagatctcatgagacttactatcacaagaacagcattggaaaaatccgcccccatgatttaattacctcccactgggtccctcccacaacacacgggaattatgggagctgcaattcaagatgaaattcgggtggggacacagccaaactatatcacctatgtagtggcaaatctttttttttgtttggttttgttttaataattggatatttcttttatatgaggctgtaacaacactttttgcttcatcttctctgtgtaaataacttaagctttttaatggatacagctaaaaatttggccttgttaaaggaggaaaaaaataggctgaatagtgggaagtgagcagaactgtgtttgcttttaggttaaaaaaagaaatgatttttctctgtacaacagagaaacatggcccagaaagtggaatggcatacagctgtttctttgtagttcttcagtcttcaagcatgggcttttgcttgtatcaaaatataagtgggttatgatgacctcctagaatccaagagaataaagcttgaaattggagtaactgatgttccccaaaccccagagtgagaatgtgcttttatttagcattttctcttcagcaaaatctgaagagtgcttgttacagagagcaaaacttttacttgatcttttgtcagaaagttaaagaattaaaaaaaggctgttttagatattggctttaaaactgttgttttatgttgttatgtcaagggtgatgccacacactgttgacatcaaatccaccaaaatctcacttaaaaacaatttagggccaggtgtggtggctcttgcgtgtaatcccagcattttgggaggctgaggcaggaggattgcttgatcccaggagtttaagaccagcctgggccacataggaagattctctctgtacacacacacacacacacacacacacacttagccaggaatggtggtgcacttgtaatctcagttacttgggaggctgaggcaggaggatcacttgagcccgggaggttgaagcttcagtgagctgtgattgtgccactgttttccagccggggtgacaaaatgagaccttgtctcaaaaaaaaaaaatttagaagtggaaaatttgtaagttttaataaaataccacttactttttagctctggtttggaacctgacttacagcaatagtagggagattaataaggttacctcttaaggcagtctctcaaatgaaaattgagtatagttatcttatttttagatttatagatgtctctaaaccttattttaaagtgagttcctgactactcttgtggcgtttattttatctttacaagcattggcagtaatggttgatttcacttctgattatgaagttagtaggaaataaagtacagggggtgtggggggtgtgtgtgtgtgtgtgcgtgtgtgtgtgtatgtatgtgtgtgtgcacattttccaggccccactgtcttgaagaggcttgattagggattagaatggtagtggctagagggcctcactaaggtttgttccataggtctcagagctcccttttttgtcgcctttgccctgctgccctgctcaacaacccctgcaaatgtaaggatgatggtgggggctgggagctggggtggccgctgccacatgtagtgctaaagaatcaacaaaacaggacagcaaaagactatgcaaatagtttagctttctcaaacaaggtcttcattgttcattctttttcatcctttggtagctagctgtccttcctactagtgttgactgtttgtcatgtactctctccaccggagtcaccagtaagaccagctgaactctgttgagagttttggagtaaaattctgattggacgtggttttttgtgctttttgtgatcggcagtgtttcagtagctcttagttcccggaacctcattctcctatcccgtcagcgaggtctcccttatttttgctgagatgcatggttaaccatttccccaggctcctccctagcacctgcagtatcttaaaaatggtacttttaacttccaggagcaatacatgaacacaagagtatagataaagataggcaagagtgtagataaagagagttgtgcagagacttcatctggtgcaagtctggccaaccttttcttagtgatttttatgcctgcccatgtaggccagtggttctcaagcttgttaaaacaagacctcacaccctcagagggcttgttaaaacagactgctgaccccacccacagagttctggttcagtaggtctgcggtgaggcctgagaatttgcatttttagcaagttcacaggtgatgctgatactgctggttcagggaccacatttgggaatgctatatagcatgggatttttttgtgtgtgccttttagaaaatcaaatgctgtcatgcttgtgtttctgtatttttcatcagctccatgtcatggagcactttctgtgctagtacatattgatcacttcattatttttaactgctacatagtgtacccacatataaatgtgccttaattctattaatggatacttgattctttccagtattttttgttaactattataaataaatcctgcattgaacatctttgtttattcctcctttatgcagctatgtttgtctagggtaatatggagaagtgaaattgatgaacatgtgcactttttgttctatttttgttttaatagataatgggaccatcactctatgatgctcaccacattaatgcccggccttaggtagtttgttttattctctgcctaagctgaggctaacctggagttgctaggaaaatcataaatgtgcttactagaccctttataaactgaacctgaaatgggctttgggctgctagccagtttttctaagtctttttgtagactaactaaaagcagtgatagtcaactgtttttttcccctaccagcacacctggtaaataagaattgcccttagcaacaatggctcacttaggtgaacttccaggggctatacatccaagtatatttttttgcacgacttcagtgctagacttttccaatctggatgttcttacctcatgttagattccgtgtatgtatagccaaatacagcattctttgtcccctctgccttctaaaccagtttgtcctgtttctgttctgcacagtgatgtgtgttaggtgagttgggctgtaggcagggcaagtgggtgttacgtcctagcattaccctttttaattttttggaattcataaattaaaattgggtgggggagagctcacactgagttgtctactccttgttttgccaagttattaaaatcaactaacaaaaagccaccatgtttttatagatatgagatttttaacactcctcctccccttccaaaaaatcaggaaaaacattatctcagaataaagggcattacttttaaatttagtttcaggaacactgtgggttttttccctcctcctttcatctcggacaagtgaaaatgctgctattgtctagagttgccctaggttgtagagaaactgagtcatttcttgaagaaaagatttgatgtctatattacatattcctaattagttccctattagtttgtcatactgctgatgatgttcctgtctaatagtaacttctggggcatgaagtgggcccggaatgtgcagtactcctgaaagaagaaaaattcttatgattcctacagtcacccattcccattcccggagcacctgctatgtgcccagcactgagctgagtcctggatacagagaagtaggggaaggtgttcttgcatttcggctgctccttcatagtctagcttcttcagtagcacataggcaactttcccgtgaaaatgtgttcgaccttttgtggtgcaactgccatgcccgctcaaagatcacctgccatcaaaatcttcacatagattcatcacttctggccacatgctaggattaaacaagattactgttatatctttgagccttgtgggagaatctgcttttcacttagctgttcatgcagggcagggtgaagcaaagaaatcctttctcttgtaaggaaactttgatatctcttacctacttctgtgcttctgctttgggatgtgaaaatactctactaagtggcaacaaaatttgcaccagtttttaacaccagtgcttcccagataaagagtgaccctccaggagttcttcagctgagcctgagttagttgctcattttgaacctcatgtggtgtgtagaaatgaattaaaaaataacccacagagtaactcattataatcttaatcctttccacacaaccaggatataagggcttattaggctttgaatagatactatgcttattaggtttttttttttggttgttataacttactggacaaggtgctacagggaatgagatgacctacaaatttagacaatccttgagtttggttagaatgcacaccgaataccatgtaaaaaatgcacacaaaaagccatgtcaaggagacagtccaacacctgtctgccccaaagaactggttgtggtctccctttctgggtgtatttcagtgactctgatagaaaaggtgtttttgaaggagggatgggtggctgtgagttgtgtgtgcctcccatgaacttccctgggaagaccactattcagaaacctaataaatatttaatgtaagaggaggcacctatctgttatctttcatagcgctgaagggcatgctgcagttgctatggagaggcaggtgctggctcagctgtgtgacaaagacaggccctcaggaacaggagcaggagcaaaaggtcatttaacctcagctggaagtgcctagttggttctgatgagtattgattagtttttttatgggctgtcccatattctaatatatgtaacatttttaattgttcagtgttttttaaggcactgttttattttgtcagaatttggcttctaattgcaaaatcctagccttgtatgttggtaatattaagatgtaatttatgtactaattggaatattgtgatattcttcatagtaggaaaaagaacaaaatattatgatatatgtaatattacaaaatattacacaaatttttcctgacagagattactttcatttgaagaaggtgaaagttctggttgattctgattataccttcaacatttttagaagctgattacagaatttgtcatataaaattaaaatttttgttgtataagaggtatcctttggggaaaaaatttaaattttagagtattttacatggatttcaccttacagattcatcaacaaacaaactaatgtgacttttatgattgtttaaaatgttaatttttatgtttcatgaacattacaagaacataaatggcatttttctgtaaagtgttttgcatatttgtctgctttgatgtttaatatggtggaatgtactaaaatcttaataaatgtttagcttcctgttgcaatggaactatcaaatcattagtaagtttttcattgtttctactttcttagttccctaagttagggttatgtgatactaagttctagaaatgataatttttgattgatcagttggtcgcttttaaaatgatggacattttgttaaactatgaagcttaaaaaaagagagaaatgaatccatggctcctgcacgtaaggaaggtgtagacaggtggtggatgctagcatatgagttagctacagtaagctattaatatatagggtggtgctgtgtataattagctcactgtgggtggcttcctgccaagttttaatgagttttggtcaaagagaaatgtatgtcccaaaggagccaaacttttaattggggttatacgtaagtctatcagtgaagttgagggttatgttttcaaccctggaccctcattcgggatttgtagcagtaaaggcaaataaagatgacttgactttgggtccttatgttagggtttagaccttctcattctggatacaacttctcgaagcctggctccagagaggggaaaagaagtgagtgatttgacaagcattgttcttggtggtatatacaaactcctagattgatcatatttcatcttttcagcagttgccttaataatttgtagtaattttcagatgggagatgtgagagtccatgaagtaggtactttcctcctagttcatatggttcatagtggagtcaagatccagaccccatctatttaattcccaagttcatgctttgtgaccatggtcaccagatacttaagacatggcagctgatttggagggtgttgctctgttgattggtgaactacctacttttacctcacttcccctgagtgtgtgcatccttacatgcacatgaggaaatacatgaatgtgtgtgcgaggtcctagctcttgctggattctgggcacaacagtcagcagtgtcgtcaagtcagagtttctatagattattcctccttccctattctcttttaatgggactgtaagggagagtgtaggggtaaggaagggaaggttgagttctgcccaggaccagtctgattgtgctttctttttgtgacagagcctcactccgttgcccagggtggagtacagtgacatgatctccactcacttcaacctccacctcctgggttcaagcaattcttgtgcctcagcctcctgagtagctgggactacagttgtgcggcacaacacctggctcatttttgtacttcaggctggtctcgaactcttggcctcccaaagtaatccaaagggattataggcatgagccactgtacccagcctgattgtaatttttgtcttcccctttttgctgacctgctttattttccagttgtggtccttgactagagacagcgtcttcacagttaagcctttattactgtggaccagcccaaccttaatttaatgtccaacaggatcacttcccagtttttcctgtacacaggtacggggtagatgagaatctctgatatgactaggctaactgctctccatgagaagatacagacccgatttgtgcctttgggagctcatggttagtatggaatgcaggcatatgagccttaattgcaacacatgacagaataacgtcactgttagagactgacccatgccatttaagagaaagaagtgatgctggtgagtgagattccaaagcattttcataaaagacaagccactttccttggatctcaacttttcagaattttgatagacctagggaagaacattccagatgaagatggtgtggctattatcttagtatctattgctacatattatcccaaaacttagcagcttaataaaatatttttttatttttatttttattgtttttttgagccagagtctggctctgtcgcccaggctggagtgcagtggtgcgatctcagctcactgcaacctctgcctcctgggttcaagtgattctcctgcctcagcttcccaagtagctgggacaacaggcccgcaccaccatgcccagctaatttttgtatttttagtagagacgggatttcaccatgttggccaggatggtctcgatctcctgaccttgtgttctgcccacctcagcctcccaaagtgctggcattacaggcgtgagcccccgcgcccagccacatttatatctcacagtttctgcaggtcagaaatctggggctggccaagaaagtggttctggctctgggtcttccatgaggtcgcagtagagttgttggctggggcatcagtcatctcagggctggaggatctgcttccaagcttacttgggtggtcattgacagcaggtgccagttcctcaccccagggacctctccataaggctgttcacaacgtggcttccctcagagcaaatgatgcaagagaaagagaacccaagagctgtattattctgttggtcacacagaccaaccctggtgccacgtggaaggggcctacccagaggtgtgaatgccagtgatattgggggtcatagagatgacccactgggtaatgagtaaggaaaggtacagggcgtctgtagctggaatttaggggattaggagtgatgtctgggaggtgaggctgatgtgtcgtgagttgcatggagtatgaatgtgatgtggaattaaccttcaaacagcttagtctagtagtggagttacattttgtatgtaactgtggaaagtgacacatgcacagagccacagatgatccacgtgttgctaacactgggtggtgtggttcatccatgcctcataatgtcatgattgatactctttctacacacacacacacacacacacacacacacacacgagttgtattgcccctgaaaatgctcctcttggtctgttcttcctgccggtatgacagaacttcctgagattgttgagtttagggttaaatcaaatctgaggtgacccactcgttagtttggtagtgtttccccatcgttttcctgttgctaagtggtgcaggagtagaagctggtgcaatagtttcctagagtgcggtgcagctaacccttttacgtacatcatattgtttagaatttgttaccaccttcaaccaattcatataaaaatagattacatgtgggagttgtatttgtttgtgtgtggtgtgcatccaagtcagtgttaattttaagtgagtgtcctgcactctgggtgtttttcgtagctacaaggaagccttaaccgttgttacttacaatggattacttttcaaaagttgtttaatctctttcaggtcattaatggcttggagactaataagcaaaaccattaaatactactttatgtctgaaaaaagagttaatgttcctggaaaaagcgagctgttttctttagttaacaaggtggagctggtgttcccagtggttccggttctaataagacttgatgagttggaaatgatgttattctggagacaactgtggagtaattagaattttacctcattttaattaaaagattctaactctaacctaccttcccaggcatttgggaaaggcacaggtaggtctccttgccagtgaggctccactactcacttgtggggttgacatcaggagaacccaggacttgggccttagtgaggtctcacgttctcaccactaaacaaagagaaagcatttatgcaggcatcgaaccagcgtctgtgtgtcacagctggactggtgctgaaaaaatcaccagggccttagcataaaacaaaggctgctttattatgttgagagcataaataggcttcttttcttttttcagtcagatatgaaattagagttgcttactgctaacatggagcctgctggattgagctgttttgctcacttctgccagataatcagaagagccgggtggggtcccctagctgggtgactgggagtcaggcatccatcccccgaacatcaggctccccatttgtaaatgtcttgtattcctgtcaagatggttaggaggattgaaaaacgccgttgtattttatttgattttgataatacacttaacatgagatctaacctcttaacaaatttttaagtgtataatgcagtattgttagctatagtgttcaagtgcattgggaggcgctatccaaatgcaaccccttccccgccctcacccccaccccccgtttattgctacttgttattttcatggttgtgctgaatttttccccaaggcaaatctttacctctgcccttgaagttgcatatgccccagagtgggtaattattaactgtattaatctggaccatatactgtacagtctttggataacctggacagtttataattttaaatgttttaaaagtttgcaagtctgaaactctgaaaaaattttttttttcataaaaatactagcctaggctgctgatggatgtgggtttctttttggggtatgaaaattagattgcggtgatgtttgcataactctgtgaatatactaaaaaccagtgaaccatactctttataaaaaaatagtggattttatagtatgcgaattatttctcaagctgctattagaaacaaaacactgtcctaattgttactgtaaaaatacccttattttctcccctccctgccagtgtcttaggcagagcagccattcagtaaatacaggtggctgagtgttgaataatatagttgaaataatccaagtggcacaaatagatgagagtggaagtgggggctgcagtgtcagttgtagaaatctcacgggaggcagactcatggggtggctgagacggtggctcctttgtcagtggaggcactggaggaagaagaccccactagcaggagaggctctgggtcggaggggctgccatgatcctggaaacaggtcatc

SEQ ID NO: 928 - DNA, 32742 bp, Homo sapiens
  source 1..32742: mol_type = other DNA
agcttggtttgggccaggtggactggaaggggcggaggtaaccagaagcggctagtggcggctgcctgcgtccccaaccccctccgcgcagcgctcgcgacacgcgtgccaggagtgggagcgagcggcggggccagctgcgttctgagcctgggcgcagctgccatctgctctgggaagcaccagggtgtccccgccgccctcagctcgaagtcagccaccatggaggcgcaggcacaaggtgagtggtcgccgatcgccccgagagtcaggtcctggggcgcgcataaaggctcttttcctgcaccacctaacttcgctctcggacagaacagattggtgccgtgttgcacatccagaactccactcccacccgcgcctttggtataatgcctgctgcccaaactcaggatttgctgtgggtctggggatcaataaagtgacaggggatccgtaagtggagaggcccctcctcaggaaatgcgcccgtggaatgctctaccctcttccgcagccagtcgcccctggccttcccaacctcgcggctgcccgaaggacctgttgtgccgggtccggaaagcgtgtttcgctccctttcccttgagggagtggggagggaatgtgactcttttcgcccagcgccgtggactcgcggcttgtggctcccaagttagggagtgagaggatcgcccgccgagggggtggctccgcagcccggctgcgcgagacgcttcccgctcggggacccgccttccgaggccaggtgaacgttaccggccccctgacctccagcagatccacacgtgagtcccggtttccgcgatcggggagcgacctctgcctcccgtggcgcgcggggcccccggccgcccagctccctgctcccggggctgcctgctggaggagcctgcggtggcttcaggaagggcggcctcatatcttggggtcacacttggaacagggttggggaattccgatggaatcgttcaagaatgggggtaaacggaccgtggaaaggggcagaggtgggcggatgtggagcgagagacaagtgggaaggaaacggactcagtgatctaccttggggagcaacgcccagaagggatggcttgcggagttcagcctttaaggcaatcaaagccaccattcttttacacagtaggaaactctgtgttggctcttagtatagataaaatctcattaaaaagaaaaaaaaaaaggttcatgacctgatgcgctcgccctctaggggcagaacgccctgaatgagagtgggttggcgattgcgtgggcctggagtcgcccaacaggtttgctgccaggattacaattgtctgaacagcacgaaccttactcgtttgttccatcctcctaagtcctgcccgtaaagctgccgcttcccatattttttcctctattatgtagataggaaatgataattcaaccaagggtgagggcagttggtcaaattcaaaagcagaggtcaggttggaggccttcacgccagaactgaagctggtgggagcagcaccggagctttccaacctgacttgcatattagaattatttagagagtcttcattactggccttggccaaccccatcccagtcaaactggaatctttggaacctgaacatgggtatatttgaaagcttatattagtgaggatggagaagaactatagcagataggaaacattcatacaacttctgaagacatccgaaactacagactggtaaccactggtgtcactggtttgctttattgctttgctttacttccaagatttacttaacaaatatttcagtgctttcctttgccaagcactgtgctaagaagagcaaagacagacttggtatctgcttcataaaatttacagtagaggaagagacaaatattaatttgatagctatttgaaaaataacatgtaaaatcactgccatgctgatgctaagaaagggcctcatagtgcagcgagagcctgaaaaactataaccctagtatgcaataatcagaagagcagattgtttattgtgtccctgtctctgttcttcgtgctttgcatgtattgatggactcatttcctgtgcgcagcagtcccatgaggtagttcatattctcattcccattctacagagaggaaacaagcatggaaggtattaggttggtgcaaaagtaattgcaatttttgccatgactttttaataagttccttgtttacagccagataggtaaaaagtagcaaagtggatgctgtgagggacccattctcactcaaagcctatgacttttggaggaaaggtaaaacttcagtccccacctgaatctccagctgtcctgtggtgctcttcctttcccctcatgactggatggaaactttaggtgtaaagaggactagtaaaaaggcaaatggatatgagaaaagtgaacagatttaataaatacttaagaggccaggtgcagtggcttacacttgtaatcccagcacttcgggaggccaaggtaggaggatcacttagagcccaggagttcgagaccagcctggacaacatagagagacctcatctctacaaaaaataaacagaattagctgagtgtggtggcatgtgcctgtaggcctagctacttggaaggctggagtgggaggattgcttgaggtcagaagtttgtggctacagtgagccaaaatcccagcattgcactctagtctggacaagagtgagaccttgtctcaaaaaaaaaaaaaaaaagagagagatacaaaaaaggccagccacacctgtaattccagcactttgggaggctggaggagacagattttttgagcccaggagtttgagatcagcctgggcaacatggtgaaacgctgtctccacaaaaaatacaaaaattagctgggtgtggtggtgcgtgcctgtatcccagctatttgggaggttgaggtgggaggatcacctgagcccagcaggtggaggcagccgtgagctgtgattacatcactgcaccccagcttgggcgagagggcaagactctgtctcaaaaacagataaacaaaaagagaataacaacaaaaaaacttaagaaaagtcaaaattggattgaatgtgaaggagggcagtgtcaaggatgaccagcttcctacttgtacaatcaaatggaggataattacctcttaaatctttatttgcctagcattttaagattttcattttcagactttttgttatttataaagcagagatattgagttatttaagaaaaaacttctcacaaactgtttatagcatatattaaagggaaatcttttttccacttgcacattttttctggctaaatgaatgatttgcctcttagattctagataagacagttctgtgatttttaaagtgtaagtttccaccttcagcacagtttattttagaattacctagagtggagatggcttgtctttctgcctgctaatctagagacaggtaaagataagtgagattaagcaggcagttgctgatgagttgtacctcatattgtccaggaagacaccaaggtgttatggacatgattcgcccatatagctcagtaagtgcagcaacttactgcactagaaactttcccataagtgaaattatgcaaatatgttctttgactttgtaaaataatagattacttccagcaaaacaagaggactctcaggggaggtggtaggacactaaacaggaagtgggattatgggtggagctgttcactgaggagggctggagaacaacgtggagagagatgtccacaggagaatggcattcctatttgctttcctctggtaccagataattttgctttaagacaactgatatgttagagagggaattgggttggaaatgtagcattttcccgaaacatacagtagtcctttaaaataaaaacttcctgatccttttaaactacccttcaatattttattattctaaatggaaataactttgttgttttcacctttcccaacgtctttaatgttacaaggaaaactgtctccttttaacatttgcatatattcaaattaataactatgttagtttctcaaggccactgtaaaaattaccacaaacttcgtggcctaaaacaattaacatgtgctgtctcattgtttggcggttagaattccaaaggcactatcactaggctgaaatcaaggtgtcggcagcgctgtccttcctctggaggctctaagaaagaaatcgtctttccctctttcagttcctggtggctgccgacattcttgggctgcatcactccaatctctctgtctccgtggttatgctgctttctgttctgttcgcatcaaacctccctctgcctctctcttataaggacacttgtgatttcatttagcacctacctagataatccaggataatctctctctctctcaagacctttaacttaatcacacctgcaaaaggtaacatttccaggttccaggaattaggatatatttaggggccatcattcagtttactataataactattttttatatccactcaagaagagtctcagatgtccatgaatgaaataaagcaataaatatcagattaaccctactgtttgcaaagtcctttaaatgaaaatgtcattatactttacattatactttatacttacattataagtatacattctacattatacattatactttacattatactttataccttacattatactttgctcacagaacatttatataattttatcttgtttcaggaagtacataaggcagtttatatggatacttgaaatgcaacaagataatgtaaattaaaaatagatgaaagaaaataaatgaggataagaagagaaaaggaagcaagggatgaagctctagaaaaatgaatataatcacattacttttattgatattgcatggaagataaattcttactttataaaggaagtatggcattttgttataaaatgataaaagaaccattcttccttctgtcaaacagcagcaggtccagtctcttatacaggcataccttggagatagtgtgggttcagttccagatcaccccaaagaagtgaatattggaatacagcgagtcacacacgttttttggttttctagtgcatataaaagttatgtttatactatactgtagtttgttaaatgtgcaatagcatgctatctaagaaaaggtacatacctttatgtaaaagatactttttgctaaaaattgctaacgatcatttgtgccttcactgagtggtaagtgttttactggtggagggtcttgcctggatgtcgatggctgctgactgatccgaatggtggttgccgaaggctgaggtggctgtggcaatttattaaagtaagacaacgaggaagtttgtcacatagattgactattcctttcaagaagatttatatatagcctgtaatgctgtttggtagcattttgtctgcgatagaacttctttcaatattggaatcaatcctctcaagccctgccactgctttatcgactaaatttatataattctaaatcctttgttgtcatttacacagtgctgtgaacatcttcactgggagtagattccatctcaagaaaccactctttgctcatccataagaagcaacacctcattcattcaagttttagcatgagattaaaatgtcataaatttagttacatcttcaggctccacttctgcttcttttgctgtttctaccacatctgcacttcatttcctccactgacatcttggacacctcaaactcattcaggagggttggagtccacatcttccaaactcctgttaatgttgatattttgaccacctcccatgaattacgaatgttcttaatgacatctagaatggtgaatcctttccagaatgttttcaatttattttgcctagttccaacaaaaaaatcactatctatggcagctgttttcttatgagatgtatttcttaaataatacgacttgaaagtcaaaattactccctgatccacaagctgaagagtggatgttgtgttagtagacgtgtgagcaatgttaatctctttgtacatctccatcagaactcttgggtgaccacgtatgatattgtttggctgtgtccccacccaaatctcatcttgaattgtagctcccataattcccacatgtcatgggagggagccattgggaggtaattgaatcataggtgccggtctttcccatgctgttctcatgatagcaagtctcacgagacatgatggttttataaaggggagttcccctgagtatgtcctcttgcctgccaccatgtgagatgtgccttccatcatgattgtgaggcctccccagccatgcggaactgtgagtccattaaacctctttttctttacaaatttcctagtctcgggtatgtctttattagcagcataagaatggactaatacaggtgtgttatcaaccagaagtaatattcagaaagaaatattttttttctgagcagtagttcttaatagtggacttaaaatattcaagaaaccatattgtaaacagttacccaggctttgttattctatttatagagcacattttctaaatctatagatttagaataattatttatttatttgtatttgcattttcatagatgaaaggtcttgctcggttgcctaggctgaagtacagtgggatcatcatagctcactgacaccttgaactcctgggctcaagcaatcctcctgccttggcctcacaaagtgttgggattacagtcatgagccactgcatctggttacagttagaataattcataagggccttagaactttttgaatagtaagtgagcatgtaacttaaagtcaccagctacattagcccctaacaagagagtcagcctgtactttgaagttttgaagccaagcatcgactcctcctctctagctataaaagtcctagctgacatcttcttccagtgtaaggctgtttcatctatatgaaaatgtgttgtttagtttagccactttcatcaactatcttagccagatcttctggagagcttgctgcagctttggcaacagcccttgctgcttcaccttgcacttttatgttacagagatgactttttttttttttttttttgagatggagtcttgctctgtcacccaggctggagtgcagtggcacgatcttggctcactgcaaccttcacctcctgggttcaagcaaattctcctgcctccgcttcctgaatagcagggattacaggtgcgtgccaccacgccctgctaatttttgtgtttttagtagagatggggtttcaccatgttgtccaggctggtctggaactcctgacctaaggtgatccacctgcctcagcctcccaaagtgctgggattacaggcatgagccaccatgccaggcctgagatgacttctttccttaaacctcatgaacaaatctctgctagcttccaacttttgttgcacagctttctcatttctctcagccttcataaattgaagagacttaggaccttctctggattagattttcacttaaagaaatgttgtggctggtttgatctatccagaccactcaaactttctccctatcagcaattagtctatttcactttcttatcatttgtgtgttcagtggaatagcatgctacgtttctttcaagaacttttccttcacattcacaacttgaatcaagaggcctgcttttgatctatcttggctttcactgtgccttccttgctaagtttaatcatttctagcttttgacttaaggtgagagatttgtgtctctatgtttcacttgaatacttagagactattatagggttaattggcatactatcaatattgttgtgtctcagagagtggagagggccagggacagggagagagatagggaaatgggtggctggtggagcagtcagaacacacacaggatttactggttaaggtcaccatcttatatgggcatagttcatggttctccaaaacaattctgatggtaacatcaaagatcaccaatcacagatcaccataaccgatttaataataatggaaaagtttgaaatattgtgagagttactaaaatgtgacacagagacatgacatgagcccatgttggaaaaatggcaccaatagacttgcacaacctggggttgccacaaaccttcaatttgtaaaaataatatctgtgaggtacaataaagtgaagtgcagtgaggtatgtctctaactattaaattatccaaggaaaaaattattttgcattttatgtttcatatttaaaattttgtattgaagtttaggcaatataataataaacctcaaactatggaagcaagctgttatatattttgatttatgatttttaagagtattattaagactattcatacaattttcaaagttacctcctgtagttttgtttcctgtttaagtaaaggttttgaaataggtgatgatgcatattttaggtgaagtcagtcatttgcaacaaatcatataccactgttttattttaaattattttaaaatctaattatacaaatggcagctgttgtagtagatgggaacatattttgaattgccttccctgttatacaccttattaattatctgggtaggcagaatctgagaatttcttcaaaaacttataagcaaaggagtccatttttgtggcctataagaagatgtgctacttagtaatttatagtaaataataaacaaatacttcagcagatattgattcattaaatattttaataaatacttattgattactgcagtaatagcaaatatttgacaagcacatactattgggagggaaaagggcatagtgattaagatcccaggatgaaggtaaactgcctggattttaattctgacatgttacttaccattaatatgaccatgaacaagttattcatttcactcaatcttggtttctacatatgcaaagtgaagatagtaatagctccaatatcataggattgttatggggatttaacatgttaatacaagcaaagtgcttaaagcagggcctagcacatggtaagtagtatataaatgtttgctgttgcttttattagcatatgctgaaaactttgcatccattattttatcaaaaccttataataacatcatgaggtagatacctttacttttaactcattttataaacagggaactacgagtcagaaaaattaaatgaagaagacaggattcaactccaagtttaattgagtccagagaatgagcttaactactatactgcactgtgccttaatgtgtgctgtgccacacgtgcaaaggggaagctaagatgaacttgacatggtgtcatcttttcaggaggataggcaaaaaagagttgagagtcgttcctgtgggttaacacctagaactaatgagaggacatatttccatcccaatgggattttttgagtgctaatgtgctaattagagctaattcacattgagggtgataatagcaataacattttagtgtttttacaaatgtcaaataccatggcatgcacttttttaaaaagcatgttatttagtcaggtgcagtggctcctggtactttgggaggccaagacgggaggatcacttgagcccaggagttcaagaccagcccagacaacatagcaaaaccctgcttctacaaaaaataaagaagtaaattgggcatggtgatgcatgcatgtattcccagctacttgggaggctgaggtgggaggattgcttgagcccaggagtttgaggttgcagtgagctatgattgcatcattgcactctagcctgggctggacaaagtgacaccctgtctaaaaaaaaaaaaaaagaacaaaaacaaaaaactccaaacatgttatttaataagtacaacaggccgggcgtggtggcttatacctgtaatctcagcattttgggagcctgaggtgggcggatcacctgaggtcaggagctcaagaccagcctgatcaacatcgtgaaaccccctctctactaaaaatacaaaaattagctggcgggcacctgtaatcccagctacttgggaggctgaagcaggagaatcacttgaacttgggaggcagaagttgcagtgagccgagatcatgtcattacactccagcctgggtgacagagtgacactctgtctcaaaaaaaaaaaaaaagaaaacaaaagaaaaaaaccaataataataacaaactcacaaggaaggtaacattttggttttacagatgatgaaactgaatgacagactagttacacaacattctccaactcatacaacttggaagtgttggagttgggatttgaaatcagaaagtttgacttcatatcttgagatttcaattaccattctataggtactttgtatgcacaagcagtcagtgtgcaaagttttaaataatggttttgctttattttctatatgatcaaagaggctttaaacgggcagaatttaattgtacagttcatttcatatgtgggcagggtctaagtctgggaatatgaatgggactggagatctttaagagtaagccttgcgacatgtcaagttgcgggtggaggatgctcatttatcaacagcttgctatttttgttctgttttcaagatgaagaattctataaaaatcacatgacatgtgattcttaaaccaatacagaattttatcaccagctcaaacaaaagtctgttcagatatgttattccacttggtgttcatccatattcagtcatctcaggactttaaaataaataaaagtcacaggctctgcatgcttctttccagaaagtagaatctgtattctttagatgctggctgaaagggctaatttcaatgagtaccccaaaaaagaaagcattttattgcctcatgaacattataattacttgtttacacgaatatgttttattcatttaaccatctcccaaccatactagcagaataactactttaagaaaatacctagtaaaactgttgaaaaaaatgagccatcaatggatttgtccttaagcgactctagccatctctgtgttgaattttcacggtttgaagcagcaactgcagaaaagagggcatctgcctcagtcattgatcagctggcatgctctccatgcaggcagaggttcaccattacttctgttgcgaaatgtccccaacaacaccgtaaagccagtcacttcttcaatttactgagttaagctgatcatggtggtgagtgcttatagtcccagctaatcaaggtgctgaggcagtgggaccacttgagctccagagttcaaacccaggctaagcaaaacccctgtctcttaaaaaaaagatatatatatatattttaactgtatatatatagttttgtatacatatataaaactaaaagaaaaaagtaaaacaagaaaaaatttactgagttactacacagttaagaacacataaaaggtgacctcaaaatgtggatattcacatctgtcatcctacttttcattgaatatttaagcaataaagtgtaatgatttgaaatatatgcattaaattgagaagcattgttaatgtaccagggaaggcaggagaatattttaatgaatttgaaatggctaaaaggaagctttgggtcctcaaggaaagatgaattttaagcaatttctcacagtgtgaatcgtttataagtgatgcattttgatgcagaggaagtgaagttcccagaataaaaccacaaatctccaagaatacccttagtcaccaacatattgcttctttctcaaaaggcaaaaatctagcactttgctgtagccagatcatgtaccacacatgaaaaatgcatgtatatgttacacctcatctccaaacttacctatggttatttgtatcttatacaaattacagtttccctgacatatatctaaaatatggaaaactcttcaactccttggaaatacatttttcttataattagacatttcttttgtccattaatagcaagagcgtcttgtcaaggatcatggaagcagaactgattcaagattaaaaagatccgtaaaagtcacatgagatgtaattcttagaaccagtatagagttttatcaccagctgctaggaaaagtcagttcaaatatggaatggttcaaatatgttattctacttggtgttcgtccatacccagtaatctcagtattttaaaataaataagtcataggatctgcgtgcttgtttccagaaagtaggatttgtatcctttagatgttggctgaaaggactaatttcaatgagtacccaaaaaaagaaagctttttattgcctcatgagtattataattacttgtttacatggatatgttttattcatttaaccatctcccaagcatattcacggaagcagaactgattcattcaaaagaaaaagccaatttgggatgggggtagtgggaggagatctcttcagatctctcagttttaaagtctctgatggttggatatttgtagtttttcactgatttttctctctgcataaagagctaatagctcattgtctataaatattttccaacattttgttttccaaaatggactcatttctacataaagacgtcatggaaagatggtttttcttcctgaagggttaggtcagccctgggaagaagtatagaccttggctcctgttattcctctttagatatcccagggttccaacaggaagttacaagatacctgcactacctgtaaagtttatttaaaatgattggaaggctctcataagcattggaggggaagaaaaactttttttctaccctcttaggtgaagtgcctaggagcctgtgaattaaacttacagcagacagactagcaggagaaaaagcttacaaagttatttattttaaattttgcttgcacaagggtgtcatagaaagaaatgaataccccaaggagtgatgagatttgattttctgtatcattttactacaggaaagggaggtggagaaaaggcaatattgagagagcaaatgacttctttaaaaaaaaaaaaaaaagataaatgggtccttaggagaatagatgggagatatgacagtttgtgacaatgtctagaagagaagaaagagttgctcccagtgggaggaatttgtgacagctgagttcttttgggaacctctgcttttagtcagataaaggatttcgggaactcaaatgccttcagctcaaaataactcttatgggctgggtagggtggctcatgcctgtaattccagcacttttggaggccgaggcaggaggactgcttgaacccaggagctcaagaccagcccaggcaacatagcaagacctcgtctctactaaaaataataatttttaaaaattagccaggcgtggtagtgcatgcctgtagtcccactactcaagaggctgaggtgggagggtgacttgagcttaggaggtgtttgtcccactgcactccagcctgggtgacagagcaagaccctgtctcaaaaaacacaaataaaacaaaaaacaaaaaaacacctcttatggcaaagtggcatattttggggtggaaaacgctgattcctttcagcacgcatcatttgctcatgttttacccaatatatgaagggcattaccggaaaggaaaatacctgtttactcttggcctactgtgtatctggtgtggcttcattcatttataagatgttccaccaggctcttgtagcccattctcaacaacagtagccttcaaagaaggaagtatattctgagattaggacttgtaattttcacgtgacaatttagagaatatgtagaaataagaatacacattcagaacgtgtttgaaatattgttacaaatgtttctgaatttttacaattttcaaagaaacctgcatgtagaaaatatgagggtgctattcatcagtcagaagacatgtgattacatcgtgcagtgcttaacacatgcactttacaggtcctcctaccagtaggagaagacaccaagactccaggtcctcctttacagaagtcattgtggcatccacagggtaggaaagccccatactcagcagtgagcaattttatacatttgcaaagcaaatcttgtactaaaaaaaaaaacaaaaaaatggggtgggttgagtaacagtaaactatcataaaatatacatctgaaaagagattcagacatactttagaaaagaattaaagtcacaatatatttgccacctcaaattaaattcatttgattatggggttggtgacttctttcattaagtgatggggaaatagatcagttctatcaagcactgccagtttatcacttactatctcaaatctttcagttagacacaaatagaactttgtatgacctttgctaatggagagcaacagtagaaaattattcatcccacgttttgggtacttactattaaatatgcttgtttgcaatgacctaggaattcacaacatatgcaagtacaaaacctaccttattgtgacatctggcctcaggaagagaaagaacttggtgccagtgttctttgactcttgacccatcataacgggctcagtaacctctcccctcagatgattccctgagacccaccacagggatatcttctcttcttagtaccctcttctctgagtaccctcacccctcaaatgatatcctgagactcacctcaagggggatcctctcttctcagtcccctctcctctcaaatggtgtcctacacctgcctctgtagaacttgcttctgtccttctcagatttttttttttttttttgagacggagtctcgctctgttgcccaggctggagtgcagtggcacaattttggctcactgcaagctccgcctccctggtgtacaccattctcccaccccagcctcccaagtagctgggactacaggcgcccgccaccacgcccagctaatttttgtatttttagtagagatggggtttcaccatgttggccaggatggtctcgatctcttgacctcatgatccgcccacctcggcctcctaaagtgctgggattaaggccttctgagatttttatttgttctttttatcccttctcccatactgagggaaaataaatgttttggtttatgtagtaggacctgttatgtatgtttcaaacataatggccccatataatagctttgaatttggattccgttagagttggaaaaagagaaagtcagcactcacttgcatgtgggcgctttcttgctccctctttctttgtgccctccccttcctctctctacccctgctttccacctccctttctctctctctctcaaagtaccaagtccagtgctgtattctcagtgctcatcttcactgacctattagcatatcttggcggggttgcccactatctgctccttaaagcactttgttcacttggttttcaggatactgaacagttctcctccttcttctcagtctcctttgctagctgctggcctgccccaaggatccgtccttggcctgcttcttctttctatctacactagcactgtttgccatctcatgactcatgattttgaattggatccatgtgctaacaactccaaaatttatttttcctgcctggacctcacttctcaacttcagactgcctacatgatacgtctgcatgggtgtctgatcaacatcttgaactcaacatgtctaacactgatctcctgagctccctcctccaaaatatccctagtcctcctaagttcatcctcatttcagttaatgacaactccatttcaaatgcagaagcccaaaacctatcatccacggtttagctttgttttccctccattataccccatttccagtctgtcatgccagctctactttcaagatgtagccagaatgggacagcttcctaccacctctgctggtattgccttggtcccagccttccttatctcccatgcgcattactgcaggagcctcctagcaggcctccctgccttggtcctggactgccttcactccattctcaacatagtaaccagagtgatcctttcactcatggtgtatcatgacactccttcctttgaagttctccggtagttcttcaattcacacagaataaagggcaaagaccttacagtggcctttccttcttcctcttttatttcctggacctcatttcctaatgctctctcccttaattcccttcgcttcctcttaggaacctttgagtttattaatccctcttcttcaagacgcttcctcagatatcttctgggcctgcttcctcactttctttggttttttacctaaatattgcttgtcagtactacccttagatctggcaactggacccagatctgttgggacagacagttatctctgggtttgtcaagtttctgcacaacacgtattctgatcaaaggtatgaacagctcattttccctggactctcttttccaggtatttgcatgtcactcacagcaatagcagtagccacaataacatcattctaccagttctctgaggctcaattccaaaaggatgtgacaaggggcaggtattgcctattaatgcagtcaggtgtgttacaggagagtaacactgaggttaggaaacaccgagattaggttgtgtaggggctattatgtagcctagaaaaatagaaatttttctcttaggggcagatttatttactatccaggataataaaggtgataaagaccagatgttgggcagatttgctggtagctctcatataaatcggagtttcctaatctcagtgttactctccagtaacacaccagcctgcattaacaagtaatacccagcccttgttacatcatccttttggaactggggctcagagaactagtacaaggatgtttctctggctactgctattgctgtgagtaataaattgtcttttgtctatgacccagaagtcttgtgtcttctgccaatatccatgaaactggcaggccaatgtcttggcttgcaagtagggtaaaattctgacccttcttatttctaacacctgttcagagcctttggttttagagagccccactttagccctcttctagctgagcctttgtttagagtgagcagctcgtaggctcacctataacctgtgcctcctcttctagaccatgttctggtatctgagactccagaatcccctttccaaacagccctgagagtgttaccaggcatccatgagcctttcgtgggtagactatgctgccagaatgtgtattcctcatcccaagagatgaccaagggctggctgattttgggggtggcaatgagagtagcttgaacacacaggctaggaaactagttctcaggtgtgattcctcgaccagcatcattagcttcacctgggaacttgttagaaatgcagattcttaggccccacccatttctgtttctaccaaatcggaaactttgagaatgagccatttgtgttttaacatgcactctaggagattctgatgcccacttatgtttgatgatatgatgtacactcaacagactaggttatccacatacatgtgcataaggcgcctatcaatgcttgtggcagacagaccctaaggtgacccccagtgatttccagcttctgttattgatattcttgtataatttccctagttagagcatgggcaagacagtaacttgcttccaaacaacagaatatgacaaactgatgggatgtaactcccatgattacattacattaataagacttcgttttagcagactggagctgaggccctccttgtgggtcgatgaagtaaacagtcgagttggagaaacccacatggccaggaactgtgggcagcttctagaaactgggtgtcttttaggacataaggaaggcaacaaaaacctggttctttagttttgtgcctccagaaagtgagttctgccaacagtctgcatgagccttgaaacagttctcctctggtccagcctctagatgagagtgcagtatggccgacactttgactgcagcttcatgagaccctgggcagaggacccagctaagctgtgcctggatttctgatccacagaaactctgagataataaatatgtgttgttttaagcagctaactctgtggtcatttgttatgctgcatttgaaagctaacacagggcagggctccgtgtgagaggagaggatgggatgtatatttttttttgtgctcttgccttgccttgggttctgcaagtgttggtgatggtctgtcacggcccttctatttaaaacggtacccttcccctactgcctccttccctccctccctcccaccttctttctcttctttctttctttctttctctttctttctttctttccctttctttctttctttctttctttctttctttctttctttctttctttctttctttcttttctttctttctttctttctttctttctttctttctttctttctttcttctttctttctttccttccttcctctttccttcctttcttcctttcttttccttccttctatccatccatccttccttctttctttctttcctttttctttctttcttagacagagtctttctcgtcacccagactagagtgcagtggtgcaatcctgctagtgttaaacttctggcctcatatgatcctcccatggcagcctcccaaagtattgggattataggcattagccaccacacctggcctggatttttgtgtgtgtgtgtgtgtgttttttttttagcagctatttccctctttcatgctatatatatatatatatatatatatatatatatatatataatatatatactatatggcatgaaattaggtatatatatacaattatatatataaatatatataattatatatatataactatataataaactatataataaattaggtatatatatatatttattttcttcattgtctcttcccactccttctaaatgtaagttctacaggcccaagatattttgctgttggtcactgcttactctccagcacctagaacagggcttgacacacagtagaggttcaatcagaatttattgaataaataaagtaagctataatgtttttgaaagtctactggctcctggtaaatgctccactgaaatcaacaggtttttcctactgtctttccttattattaggtaattgcatgaatgataaaaataaatgagaaggaaataatttcaacaaaggagtaagcaaatgaaaaaatgtacttcattccctgcccttcccccattaaaaataatacattgactctgggtttgctgtttttacaagaccaattggtttatcgatcaatattgcaattgaatgtaacccttaatttctatcagcctgtctcttctcactccctggtggcctggctgctgtgtgtttgtgtgtgtgtgagcacatgttcacagaaggaatccaagaggaagaaaagtccaacttcctataaatctgtgccccattttcctttctctcttttcttaattacaaggctgtttctggctcaatcatttaagccaaagaactttccgctttgagtcaggcacacggtccaaggaatggtttatagagcagcttggttgtcctccctattgtaaatctaaatttttgtctgggtaattgttttctgttgttctctgccatttttctcttgattaaaccctttggagaggcagcctgatgcagagagtgccctggcccaagagccaggaggtgcagcttctgatcttggtttcaccaccactctgccactcccttctcaggtcctctgtttgctcacctctttcttacccaagagggttggattagtcgcccttggagatcctgcccagctcgttcttaagaagcctgtttaaactccttcaataggtgatgctttttaaatatatatatatgcgtacatacatatatacaaatacatgtattaagctattccttaaactatgtttgcttttttatttcctatgaggaaagtctgcagtcaagttagatattttcatttttttaagtaagtcctaaaatgctattctagatgctgatacttctcgtttaaagaatgactctgcatactcacataagtaatttctccaatctgagatgactgtggtcatacagaaggaagtcaggatgaagaacacagaagaaagcaaactaaagggcctgtcacataaagggatcctagtctagtgacaaagagcctacatgttgtcacaaagatttggattcatttcccagtgcagtcccttattagcgatgtgacctttaacttcctcaagtctcagtttgctcatctacaaaatggtggaaatggggggccctcgatggatcttgtgatgattgagtggcatgatgcagatgaattgcttatgactgtgcttgggtactattatggcaatgaaagagaaaagcgagattcatttatcaatttctcatgaaatatgcatttaatatcccctgtgctgggccctaaagtaggcactagtgaaacagacacgaaagaaccaaagtcctttcctttgtgagtttaccaccctattttcgttatagcagttaggtgtcaagtaactatttttaatgcattcttttacccaaaaatttgttgtacttttgtatgctacctaccacaaagttaaaaatagctttctggagctaaggaaagatgagtaggttgaagatagaaataaatatgtaagttgacggaatttggctatctggcctgcatgcaaatctgaagcatcaattgtacctactaaaaaagaccgaaattttgctaatgagacaataaatgttttaaatggttgctgcttttggtccttctttatttactaggatgaaagcttaaagatttgcatagcagatatacaaagcaatgttcattgtttggttacattttgaggaagaacaggttaaatgttttgcttacatttgcattgctgctttcaaaataacttagtagagcattggggaaaatgccagcagtgcttacctcttcagttagcagatcctatttccggtctcttgtggcttggatgttgatgataacaagacaggcttgctgaaaggagtgcaaagtgcatggggaagggtgcatgtcctccatggcaggactttgacaatcctggtgtctgttgcttaacaccatgcttcagacctctaactgatctgatttcagctcttgccattttaggtatttcaaaaaataaggcacaaaatgaaagcttttaatatgtttgtgtttatttacatatatatgtgtgtgtgtgtgtatcctatcattatctatcacctttactctgccttatttttcttcacaaactatgacattttatattatgcataatcatttactttttctcctagctagcatttaagctccttgagggcaggggctttgattgttttctttattgccgtatccccatatctaaaacaatgactgttcatggagagcactctataaatacatgcggggaaaacaatgaatgaatgaataaatgaatgaatagtattgagtgcatatagcattatatccaaccaagcaggtggtagcagcatggacgtttcaacttttataagaaatgaatagtttaaaaattttataaattattttaaaagctcctaaaattaaagaaatgctagggtgatagaattttcagtactctaccactggtattaaatgttgttcccaacactgaaatcctgaagacaattttaagcttaagagtccaagtgtgtcaacataaagatagaatctagggtagaactaagttacccttcttaagaaagagaggaaggggaaaatatgggaactggggaggaaattattcacaaagagtgagctccagaaggaaaaataaatagggagagaggacaatatgcctggaggctggagagataaacataggacaagagatgcttctaatgttttcccaggaaatgctataaaccaactcctagcttcccctatgaaatgattagtaaattctgcattgctcattcaaacttttatgggattagagttttgttatgggagaggttaaaaggaaagaggtcactggacagctgatgtatattttacaaagaaataggtattcattttctccctgtctccactaaacaaatattgaggaaattcttacagactatcagcatgagatatgcagctgagccatatgttttgagtgtccctgttcttctgctgtcttgatttggaggttccaacatactagaagagatgaaaggggacaatgtagccgaatcccatggggatgatctcttagattgccatggactcttaagcttaaaattgccttcagggtgattttcagggtgatcacagaccttggattggcaacacctgttcaaattattttaacctggcaaatcaaagcctcatttatagaaataaaaatgacaataatttggtggcattttcttttataatgcacatgtggcctgctctacttagctagttcatcgagatttatgagaaaacatgtccgtattcttgttgcttaaaaacattattctgcatgttgcaagtagtcactgaactcaacttgtaaaaggctgatttccttccctgaatgtgccatctccccaagtcctcacttatagcctgctagggtttgaaatattgatgagtacaaatccattcatctccaaatttcagtggcctttcaatggagagtatttttagctttgttgagaatttggggcagaggaaatcactttcagaaatagcagattattcttttagttttgtagaactcgagatggaatctgtaaaatgaatctttgagtccttgctggccttatactaatacagtagtataagatcatttctgtgtaagtaactgagagagtaatttaagagcgtatcctttctgcagaatctaatcttaatacaaatagatgttaaaattccgataatcaactgtttaggtcctgtgtgaatactatcatatattattaaactatctctggcagcctgatgtggtgactcacacctgtaatcccagcaactatgggaagctgaggtaggtggatcacttgagcccagaagttcgagaccagcctgggcaatgtggtgaaaccccatctctacaaaaaaataaaaaaattagctgggtgtgatggtgtgtgcctgaagtcccagctgcctgggaggctgaggtgggaggatcacttgagcctaggagaatgaggctgcagtgagctgtgattgtgctgctgcactccagcctgggagacagagccagaccttgtctcataaataaataaataaatgtaaaaatgaaaaaagaatctctgtcatcttaatggatacagtaacggctgctacttagctttttgagttttgagatacattcacccgtacattggtgaagtccactcttgatcagacttgatggctagctcatcattggccattttctcagatttctaatcttccaaacccgttttctacgttccctaatttagagcacttgctcagctggttttgtccacctgcactgctgttaccctcatttcagcttgtcagatctcacccatattgttgacagtgaactcctgatttttcccctggaagtcatcctccttttttttctcaactctcacagcatttttaatctttttaatgtccttaaaaagcagcatcataatttagagttggagaggacttaatgaatgttctaatacaatctccacattttgtagctgtaagcacttgagggatgaggagattggcctgagctagtatcttatacatgggaaaaccagaaaaagaactgaggttttcttactacagccctgtgatcctttctctgtattatcagcccttcaccttctgcagcacattgcagttattcatccatatgtcttattgaagagactgtttagaggcttatttttaattaaaaagttaacatttttaaattaaagtttcaggtttagaaaatttccacttttaagtgaagcttgcaagtgttatactatttataaaattaacaaaccattacttttaaagcgactttgataaatatgatatttaaatagtatgatattaactgatatacacattcaattaatatactcaatttcatatttaagcacttcaattttctatttgactagccttcctaagtacttaaatcttataaatttaaaagctaagtatataaaaagtgaatctaaaaattctctttagctgtttcaatattacttacaaatttagtaacatttccacttaaaaatcccaagtttaagccattaaccaaattaaacatttaaaattataattataagcctgatagtctctcaatagaccatattctttcgatcataatataaaataacaaatattcaagtgccttgtcacaaaacgactagttctatgattttgctttatttatttcttcattcaataattatctaaaatatacctgtgtgccaggcaatactctaggctctagataaacattagcaaacaaaataaaaatttctattcttgtgaggctcaaattctaaggaaggggcaaatagtaagcaacataaattagtaaaaaacataggccaggtgtggtggctcatgcctgtaatcccaccactttgggaggctgaggtaggaggatcacaaggtcaggagttcaagaccaacctggccaatatggtgaaaccttgtctctactaaaaatacaaaacttagccaggcgtggtggcacatgcctgtggtcccagctactcaggaggctgaggcaggagaatcgcttcaacccgggaagtggaggttgtggtgagccaagatcacaccactgcactcccgcctgggcgacagagtgagactccatctaaaaacaaaacaaaacaaaacaaaacaaaacaaaacaaaatatatatatatatatatttgggtaaatgttaaagaaaaaatcaatgaaggcaggatgtgaaatgtgagggatgggtggaatggtggttgcagatgatgctacctttttctaggattaatactctgcacaaagaccttattaattaatttaggctacttcccaatagagaggtgttacattctgagtacacttgaggttgtacaaggactggagatttggcttgttatgttgactggattcccactggtgactctggtgaatactctgaacttattattgtttgtccacaactccctgacttccaaagggaaacttgtagccctacattatttgattggattttgtatgtctttggctcttaaaataatgtaaacagacttcccacccaagtggaactacctttgacacagccctgaagtccttcagattcttcagaccactcagtcttaacagacatatctggctgaattctgggcatccctcttggttttgtcctgaaatgtggacacaattttcccagtcactttcctgattaattttagctctccaagaggatggagaacttcaagaggacaaatactattatgtcttagctctgttttgtttctcatttattactgtgtcctgcagaacacaatgggtttacccaagtagtccctcaatacatgttgtttaaagcagaatagtgcagctcaatgacatagggtcatgtcccactcagcctcttgattgcaggcaactgctcaaaaactggacttcctcaagtgtgaaaaggaattataagaatccctatgtgtcccaaagcactgtctaaactaagaaccactctatgaatgctagttttccttactattaatggtttaatgcttattttaaaaatccctcaaagcatttcacaagcagatagtccctttccctttgtatttaggcttcaggataatatgagcggtaccactgttttatttttacaatactgatcattttatcatgcctgttgtatattcaggtgtaagttctttttcacaggatagcttcaatatgtcaggatgaactttcatttatttattttcattcaatagaactaactaaattctttttctgttcattcagttatcccactctaaataccagggttctctttatagatggaaatgtgaagaaggcagctcttacttaaagggagtttttttctgctctcatgcactataccattatttgggcattctaaggaaaattcaggagtggttttttaagagggctgtgttgctctggggagcatcatcttgacaatcttgttaagggagggtgtttgaaagccacttcaactagaaaacttactttctacctggagtctgagtgcacctgtatccatcactggacggaactctgatgctgtcctgacaatgccctttcatgaccttaacctgtggctctggtcatcactgttcctcagttctcactctatcacatgggtaactgttgtactcagaggctttgggagtcctcaaatgtctcactttccctctgtcattttaaaaactgctgcacagcccttgtttatttctatgtaattattacttcatcatatatgatgttataagccaatttgattcttttttggggagaaggtggaagcgaaggaagataggaaaagaaagtcaggctcgtactattacattttcacagatttatttgaaattgagtctttcccagaattatctaccacctcttatggtcagtttgacacagttaatgccaagcacagtttataactttttaaaattgatcaaaaattaccctaactttgaaggtcctgaaattactgacacatataagaatttgcaaattaaatgtggcacacagtttttaaatatacatttaccatacacacacacacatatattatatatacacacacacacacacacacacacactcacacacacacagagagggagagctatttagccttttcttgatagaggacgtaaaggagagtgttaattaccccattctggagaattcaacttacaatggaaaacatgaaggagagctgtttaacatctgcataaaacacttgtttcctggtccttctaatgatgcattcaggtatgaaaaatgttttctatttacttgttcagaattattttaaataaaggaagaaaatcacagcagcttcctgcttcggaggcccacagagttgcagccaaatgacttgctattatcataggtctttatgtttgctgaatgcttttcagtatatctgattgtattcacagccctttctggtggcatgaaggaggctggtgttgctcttgtgcagattacaaagctagaaccagaggaaggggaagaaatgatggcttaaggcattcttagaagttgggttcgagcctacagtttgtttttctctttaagatctggaaaggtgaagaatctgatggcagtgaacccagtaatgaatacgatgttaatattataatgttatttattttatttacttatatactatagtaattaatttgtagtaattaagtagtaaacctgataatatctgatctaaatgattagcataaagaactatgtcaagatcaaaattcaggatgactaagaggtcagaacataagatactcacgcagaaggatgtaggaataaccaagagaactgaatgacctctctaagagcaccaagaaacatttacgccaggatacacaaagaactaagacatttgaggggtttggcgatggtgtcaagaggtgctcgctgttttacattattatgtatatgctgtccattttctagagagcatagagatagaggaaacaaaactgagacttaatcaacatcatgggatttaaatatcaaactatgaacagataaagaatgcatgtgttttacacgagtactgaggaaagacctaaattgaagcatgtgttattttacgataatatttatttactcacaaacatttggtaaacatcttccttgtgctaggccatgcatagattctggggatacatagtgtttttctgatgaactagaatggatgctaaattgtatcagcacagataactctgaatatctaggacttgccagtttacattggcgtggtgcaagccatagatctttggacatattgtcttctcccagatcatcaaaggccaagattttccaggataactgggagcaagtcagtattagattctgcactgactccacgaaccaaggtgtttcagggatattaggataattttagggcaatggagtttgatttggaaagttggctttgcacagccactccccagatggccctggtctagatcaccccttcatgtcagtttttatggacaaggcttcccctcggatacctctggcattagggaggcacagatgtacttctctgcagctgtactttctagaaaccaggtaaggataatgaccaagagccacttgaaaggcaggtaggtatagatgatgagtaactgcctggggccttttaaaagctaatatttataaacatatattacttggctgggcatcatacaaaccaatttaaaccaattctgtgctttctctagggcagatgtgcaaacatcagaagcatgtagagcccagggaaagcatgcaaacactgatcaagtgcacagcgctgtgtgacttttgtcacttttcatgatgtataagcacagctgccttttttaggaatcgtgagctggagtcgtgagcaaagtgttgcaggagtagcatttttcaggagagtgaggtgctgatgagtgttaccctctctggtagtcaggagaggatcattgagggggtggtttttgagagttggtttaaggtagaaagggagggaacctgccatctggaagtgtgatgatgttccaggcattgggtacagcttcttaaagtggcctttgcttctggagtaaatgaaaaaaggggacatttagttaacttgactgagagaagctgagagagccaggctgttgagagcacttgattagctgtcagataccattctccctacagtttcttggcctcccagccctgaagaactgtcagtaaatattgccatacaggatcgattccatttaatcttttccaaaccacaactgtgcagtaggtgatggcatcatcatttcacagacgagtaaacagaggcccagggaacttaagcagcttgtgtgccaagtatttaaaaattactgtgtgtttacatatcacatatgaattcacacacacatagatggtggggattacgaatgcaaggaatgttattttttgagtcctttattccagtcacagtattataaactgtgaggacagccaaaagacaaattccccttttttgaggaatttccaatatgaccagtctttatacaataagtaggaatgaaaagaataaaagcaacattaaaaatgcatgaagaacactgaagcacccagaagatttcagtgtggccagcctgggacagggctatgcaggagaacttttgagcggtgagattggagccagtttttgtagttagaaatggagaccaggtgtggtggctcacacctataatcccagcattttgggaagccgaggtgggtggatcacttgaggtcaggagttcaagaccagcctagccaacatggcaaaaccctgtctctattaaaaatacaaaagatcagctggacatagtggtgtgtgcctgtaaacccagctacatgggaggctgaggcagaagaatggcctgaacccaggaggcggaggttgcagtgagctgagattgtgccacttcactccagcctgggtgacagagcgggactccatctcaaaaaagaaaaaagaaaagaaatgaaatgaaatgataggctatatgtattcagaagaagcacagatagatgaagagtgcccagtccgtgaagggccttgagtagaagcacatgatgtagttcatattctcttcatgactcaccaggttcttaagggaagtatttttaatgaaaacgatgaacaaaaagcatcacgattacatgagattagaactggaaaacataaaatctgtgaaggtgactaatataaaacaataagaaagagatcaacttttagcaaccttttttccgcaaagtccaattcctggcaacatggttgacactgaaatgttggataaacataaatggaataaatggattatgatagtgattgggaatgtatacgatatgagctaaaatatagattcttgatacagaagagacatattgaaagaaaaactttgtctaaaattaaaaatattaaattattattgtctcagtaaaatctggagattctatggggagatagggagagcatctatcaatcagggtccagttgcagaggatggaatccacccgtctattttaaacaagaaggaatttgttacagagccatggtaagtgggcctcagaaccattgcacagctgaagtagtagactctaaactgagctttcatgaacaactctcaaactcaaagctgctcccagaactggggccccacattgatgctaccatagcaacttattaagaagctattaggatcaggaaggcactgccatcaggacctgcctcggcaccaagcagtggatcctttcatcggctccataactgctcctgtctgcactagcaaaatggatgggatttttttgacaccacatagttaggggcagaaaactgggacctcagccacagaaaactgatgcctccaagactgtgcttgactgtaggaacagcagaagtggctgctctctcacaaatctcttaggaaggcatttcactgaccaagccaaagttaccttttggtctgtggctccaaagaggccagcttccagcactttgcagcaaaggcaggtatgtccacacagagagggagaagcaatgtagcagcaagtatctggaaggaagaaatagttggtattttgtttgcatatgataacaaacactggtttcatttgattcctagtattaggcattttgttttcagaacattttaatacaattatttgtgaagggaaggtaacaacttatagaattgaaaacaatgatggaacgtttacattaacaagagaaaaaaaggtaataagctgaaactctacctagccagcaaatagtagaggaaaagaggagaaaccaacaaagtaaactaaattgtaaatataaaataagaaaaaaaaatgaaaaaaaatcaagtgcaccattgctacattaaaatgtaaaaggactaaataccccatgtaaagaaagattaggaatgtgttggatcaaaataaaagcacacatgagttgcttacaaaaactataagcaatatttcttaaaggttagggaagtgaaaagatgaacagaaatatacaagacaaagagcaaacaaaataaaaacactaagagcaatttgtattggaatgaaagcataaaatagtagaaagaggagcaatttgtaaagtcataaacttccatgtccaaataacacagcaactataaatgcatttttaaaaactgtcacaatgcaggaagaattgattaataatttggttttatagtggtatattttaatgagtagatagtagataacaggttaggacagagaggctttgatgatccaatttagaaactgacttagtaggtatatatcacagaattttatatagaatttcatgtcctttctctagctttctagtgccatgaaacatttagaaaaattagtcaagtacttggcctggagaatagcttgaaaaattcaaaagagcgtttacagaccacattctttaagtattgcccaataaaactagaaataagtattaaaatataaccaaaaattttaacaacttggaaattaagaaacacacttgggacaaagataaaatcagaatgaaattctgaactatctagaaaacaatgaaaaggagaacacttcaaaatctatgagacgaagagagactgccaataataaaagttgatacataagaaactagaaaaaaaatacaccaaaagaaaagataatttaaaaagatggaagcagagattaatgaaatggaaaatagcaacaactaaaatagtagaatggataaataaattcaaaagttaatttggggtaatatacaaaccccctctgaaacctttctctagagaaaagttagaaatgagaaaacaaacataaccaaaatattgaagaaattctagaagatagagaataccatgtataactttttggaaatttgatttttttttttttttttgagacagagtctcactctgtcgccccagctagagtgcagtggcatgatctcggctcactgcaacctctgcctcccaggttcaagcaattcttctgcctcagcctcctgagtagctgagattatagatgcgtgccaccacgcccggctaatttttgtatttttagtagagacggtgtttcaccatgtcgatcaggctggtctcgaactcctgatccacctgccccagcctcccaaagtgctgggcttacaagcatgagccaccgtggctggcctggaaactagatttttaaacctagagcagggatctgcaaactttctccgtaaagaccagagagtaaacgatttaggctttttggatcataccgcctctgtcacaaccactcaactctgtcattgtagcacaaaaggagacttagacattgtaatatcaaatgggtatgactgtgatccaacaaactttatttatgaaaataggccatgggtggatttggcctgcaggtcatagtttgtcaaaccctggaccagaggaacccagtatagcaaaatataaactaccaaaa

SEQ ID NO: 929 - DNA, 29564 bp, Homo sapiens
  source 1..29564: mol_type = other DNA
ccggaggccgcggcgagagcgcgcccagccccgccgcgatgcccgcgcgcccaggacgcctcctcccgctgctggcccggccggcggccctgactgcgctgctgctgctgctgctgggccatggcggcggcgggcgctggggcgcccgggcccaggaggcggcggcggcggcggcggacgggccccccgcggcagacggcgaggacggacaggacccgcacagcaagcacctgtacacggccgacatgttcacgcacgggatccagagcgccgcgcacttcgtcatgttcttcgcgccctggtaacgccgcgcaggccggcgccctgccccgcacttggcgcttcgcggggcgtggggcgcttgggcgccgcgggcggggggtcccggggccacgtggacgccgacggctctggtctgcggcgtgcgtgctacgggcgcggggctcggggctcaggggtgcggggtgtaatactgggggcgcggggccgggagcgcggggaccctgcgggttcggggctccggctggcggggagcggggggcgcgggcgccgcggctcggggccgggagccggggactgcaggggaccgagggcttggggctccgggtcgggaggcgtgagctcagcgggccgggcactggcggctgacgtggcgctcggcggccggggcggtgcgggaggagggggcggacccctaggggacagccgggaaaagcccgccctgcgccgcgctcctgaattcaaccgcctcttgcacctcggcaccgagggaggggaaggtggggtcgtcgccctttcgggcagccgggagtccaaatgtcaccccgcggtccctgcccagcgccccaaacttcctgtgccggccggacgcgcggcctgcccgtgggccacgtgcactcaccagagcggccttgctgctgccgcggccaccggggtcggctgggacagactgcgggcacgtccccttccagaggctttaactgaaaaatagaacccaggaaggtgtggtttcccactttgtgcgtcttttgtgggataggaaggagtggtccgggcagaggagggttgctgagctaccccgggaagaccaaggtagtgcgaattctggaacccctccgcccccctgcagctcagggtggatgtaatctctgaacggagcccactggtcctcaactccaggctgtcctgtcacctccctgctgctctctcgggtccaggtcacttgttatgtgtgagatcggaaaagcccctccgttgagcagatggtccctcttgctttggttctctgggcgaggctttggtgtgggcctcgctgctgacctgagagaccctaccctggcactcatcccacggaagagcttcctgtcattcacacaagcatgtgcacagctttcctgccagtgccgggatgccccgaggaagggaagtgaccacaggccagagcagaaagccataattttaggacacaagacctttgagaggttggaatagcctgcaggttcttgttgcagaacttggtattcttccccagagctcagtagaggctcacttgggaaagggatgtagggaggcatagagaaaaggtaccctaagaaaaatggccagttcagaaattgtacctttcaaactgggagaaacgtttttctcttaaccttgtattcaggctattactgcgtttcagttcatttggagttaaatcaacttttagggccactgtgggtttattaacaatgtgtatatgaagtacattatgtttcacattcctaagaaccaactgactcgaatttttacaactccaatggtttagaaattactttgtaacataaaacaatcaggcagtattaacagtttctctttgttcgggagtattctcagcaactatttcaattaagtgtactacttaattggagcctatttcagtggaatacatctgtcgatgggttttcttttttctttcttcattatttatttattttagagatgggatcttgctctgttacccagcctgaaaccagtggtacgcagccgcagctcactgtagcctctaactcctgggctcaagtgattctcctgcctcagcctctgaagtagctgtgactacaggcgcaggtcatcacacccagcttattttgttgttgttgtttttgttgtagttggtagaaacagggtctcgctatgttgccggggctggtctcaaactcctggcctcaatcagtacttctgccctggcctcccaaagtactgagattacaggcatgagccatcgcatcccattctttactttttttttttttttaaagaaaaactgacatgcagatgtaataagtccccacagtgccaaaggaattttaagtttagaatctttgcaataaataccagctagtcctgggctgagtgagagaaaactggcacatctgggcacttggtattaagtaaattccttttccattatatgtggcttgtagacatttagctggatgcttccagaataattagctttatgttgttactttttttttttttttttttttttgagatggagtcttgctctgttgccaggctggagtgcagtagcgcaatcttgatttactgcaacctccacctcctgggtttaagcgattctcctgcctcagcctcctgagaagctgggactacaggtgcgtgccaccacgcccagctaatttttgtatttttagtagagatggggtttcaccatgttggccaggattgtctcgatctcttgacctcgtgttctgcccgcctcttcctcccaaagtgctgggattacaggcgtaagccaccgcacctggcatatttgttgacttcttgatagtctactacaaatacttaaacagagatatgtgggtttctatgatggtgtttaagttggacttttaagagggccctttcagaaaactgcagatactgcagtagggctcacgaataggctgccaggaaaggaggctgagtgggcggcgagtcaaatgggaggtcagcaggggcaagatcaagtaggaccaacaatacctggcacaacactttggtaagttgtaaggctgagagcaaggtggtgactctggaggggtctatgcaggagagggaaggaggtcctggagtggtgagctgagcgtttggagctcagatagaagactcagtggactccccctcaacacacacatacctttttccagtttcagctgccgtggagtggtgaaagcccacgtgtgattaaggggctggggcccctgtaacaaaaacatcaatctgtgtatttttgccctgcacttggcttctgcagggttatcctgctgctgtagattttttgccaacatcaggtcacaacttctgtatggccagtttgtgagtcaccctgaacctggtgacagtgaggtcaagatttggaccaggtagctttgctctacttcttggccacaggctaccttctgagtgcagctgcctgtctcagagttgggtgctgtagccgcagggccgactagatagcacctgtggccccatcacagccaggagcaagggcacgcccaacttggtgatggcccagaatggtcagttttgatttagcgcaccacaaacttatttattgtttattctcattcttaatctaatcttgtgttttctcaaaaaaaaaaaagggaaaaaaaaagcagtagcaaaacaaaaccttgtcaagattgcagaggagttctaaagttccagaatgagcatatctgatcaaagtcccctgaaggtcagaactgcccttgacagtcccttaggaaggtgccttgttggacaccgccccagtcagtcagtcagtccccactgccagcgtttcctccagcattagaactatcatggcttctttggttaaacaccaaatggactagttctcaaacctgtgcctttagacagcagggtcacacttaatgtagtcggagagatgctcatgccatgagaagcatgtaggaaccaaggcctgctgaggaacaaaaacctcacatctcccagcttgcacacacttcagggttctgtgggaattgcctttttttttttcttgtttccttctcccccgccacataaactcactttgttgaatctacagaagttaaatctgcatgtatagtttcattgtgcttttttttttgtatctgagtatctcataaagcagggattctcttagctggccaagaaagtgctgtttagggaagacacattaacttgaagcagactttttcagtgctacctttaagtctgtttttcttttttttttttttttttttttgagatggagtcttgctctatcgcccaggctggagtgcaatagcatggtctcggctcactgcaacctccgcctcccgggttcaagcgattctcctgcctcagcctcctgagtagctgagattacaggcgtgtgccaccatgcccagctaatttttgtatttttagtagagatggggcttcaccttgttggtcaggctggtctcgaactcctgaccttgtgatccgcttgcttcggcttcccaaagtgctgggattataggtgtgagccaccacacccggcttaaatcctttttttcttaagagacaaaatctctgtcacccaggctggagtgcagtggtgtgatcatagctcgctgcagcctcaaacttctggcctcaagtgatccctctgcctcagcctcccaggtagctaggactgcaggtgtgtgccaccacaccaggctaattttttaaaattttttgtagatgggggtctcactgtgttgcccaggccagtcttgaacccctgggctcaagcagctctcctgccttggcctcccaaagtgctgggattacaggcatgagccactgctaccgacttaaatgcttatttttgaggtaatctgtcagaaaataaaaggagatttaacagattattaaattattttgaggaagaagtcacaattctaagcgttgagtgttcatataagcaagtgtgtttaaaaaaaaagcattttaaaaagcgatacagcaaagtggttacattgtaggcatcagtgtgttcctgccatattaaatagcaaacaaacccatgtgtcataatgctatgggattgtagttgaaacctgggataaagtttctagggttgtctcattcaaaattcgagtatggcactgtagacatactgtccagagaacacagcaagagctgtggtcagctgtatgacttaaggtctagtgttgggaaagatgctgatatcctcatgaaatgtgaagcatggcaagaagcctagttaagatactattttaaatgatgggtgattttaaaatatttatacataactgaattcatacaatgaatactaagaatagacatttgcttacttcaaccctagaagtataggtggccacaaactttttttttccccttctcattggagaaaattgcaggtgattaaattttgagattgccttatgtttgtagccatttggttatatagtggaggagacttgacgaataaaagtagcagatacagcaggaagtgctaagctactgtccaagggaggagtagagaggctttccagaagggcaggagaagagaatgggtgctgaacagcccggggagtcagggccaacttgctagaggaagtgacacccaaactaaacctgaagggcagatagatttagctaggtggagtttagggacgaagtgtcagagagaatgtgtcccagggccaagccaagctatagtcctttgggaacactgcagatgctgcagtagggctcaggagtaggccacaagggaaggagggtggactctgggatagaagtcaagcgggaggtcagcagggccagaacaactaggatccagaacaacactttgctaagtttaatactggaacaaggccaagatttcatgctgagaacagggcagtgactctggagggatgggagcaggggagagaggtcctggagtactggtccaggagctgccatctgcaatggtgtaaagaaaggactgagagccccattgtcccctggacagagctgaagttgtgggccagctgccctgtgacctgatactcaatgtgcttgtactcttgccttgttccaggtgtggacactgccagcggctgcagccgacttggaatgacctgggagacaaatacaacagcatggaagatgccaaagtctatgtggctaaagtggactgcacggcccactccgacgtgtgctccgcccagggggtgcgaggataccccacgtaagttggaaggaagggggcacacttcctaggtggctcctggctacaaagaaagtcctagttaaacttttggtaaaggtgtgaagagatactaaatttaagcaggcagtccctgtcattagggagaaactgcatttaatgctgtgtctgttttagatggcttttatacttggataacctttaattcatcagtgttgggttttcctgtttataagagaatgtgtttgcaagagaaaaatgacggtcccgccatgctagatgttcaccggtacattttacacagtgtgcatggactgtcatcagttttggcttgcttttgctggtgacttattcgcaaacacccttcctatagttccttcccgtgtgactcccacagggctgttcctgttggaaagaaagtatagagtctgacagacgatgatacttacttccttgacagttaagaatttttttggttataagaaatagaaattgaaatgttctcaattctagaaatagaattgttctcttattaaacagaaagaaaggactatttaaaaggctgtggaggaacctctgagagccagctccaggggcctggggtctgtttctcctgcacctcccttgagatgacggctttccaggcctgtatctctgtttgcacagaagggcccaccactgactggccctgcttggctggaatgttcgttccaggaatagtcactgtggccagggaaacaggagcttatagcaagacacatgcccattcacaccatgtgccaagtgttggagggaaaagcagttcttcaaaaaagagaagaagctgtttctgaaggaggtggagggattgccacggtcacttccttgctgtttgtttcaattgaggaatgaagtcaattctatacaatttattgcttaattgaataatataggggtccatcaataaagcaaaaaattggagcttatattcaaacctgggaggcagaaaagtggagggatctccaggcttgaacctagaagtcgtagtcaaatcccagctctaccatttacttaccacccagctctgacctcatcacttaacctgtaagtaaggtgatcccccaaacattgttacaggacttacatggaatgtgtgcagacaccaatctgagcacacccaatacatgttagggttttccctaccatttggaaatgtgggcgtttccacaaaggaccctggaattcttggtctttggtgactgcttgctaatgtaagtgccataatttgggtttactttaaatcagatcaatggagataaaattgcttactatctgtatctacgtaaaagcattaactattctatgctttatagtattgcattgaaagtatggatcaagagcatcccaaagaagcaggtagtgagcagagatgagggcgaggaggtgaatgcttacctgttgagaaactgttgctttcaaagttcaggggcagcaggggtgagctggctgtggtgtctttcctcttaacctgctgaccatctgtggcctgagactatgtgcatcacacaccatgccacagggaaggtgacacaggacctgtaatggagctgagagtggtatgtgttatggggcttcagagaaggaagtgaaggcttccacctcagcctggccataacagctgtcagctgcaatatcagctactccatagttggtattcaccaaaaaccatcacaaatttaaaaagtcacaaatgtaaaaagtcacaaatttaaaaaggcccatgttggatcatgtgtttagatttttaatgagaagagctggtctccccaagtaaaccatggctggttttgtgttattaaaaagaacaaaaatgaacgtacaccacactgaacacagtttgggaaggaacctctgtgaccatcactgccctgcagaagctccaagaacagattattttccccccgagaatgcaggaggtggaatgtgctgtgtgcaatgtggtcgcactggggcatctgtagattgacttgagcgagctttgactcctctaagacaagtgcccatcccatagagtggttgtgaggcccgaggcaggtgacgactgtacctgcctgagtccaggcatgtgtcaggacatgagctttcacgttattctttcctggcaagtgtaactggagtaaaggattggaggggcagggagtttgggctcccacgctccctagagatggctggctgtgctcaggaaaatgttttgaggtcttcctgttgggccagtcatgaatcattacagcagggcaggactgacggggggaactacctgtgttagtttcctaggctgctgtaacaaagttccacaaaccgggtggccagaaacaatagaaatgtattctctgcagtcctggaggccagaggtcctaaatcaaggagccagcagggtcatgctccctctgaaacctgtaggggaatcctcccttgcctcgtcctggctcctgttggtttcctggtcatctttggcgttccttggcttgtagatgcatcactgccgtcctctgtcctcacatgcccttctctctctgtgtgtgtgtgtctctctgtgtccaaacccttcttacaaggacaccagtcatgctagattggggcccatcctagtgacctcattttaacttgaatatctctgtaaagaccttattctaaataaggtcaccttctgagattgatggttatgacttacacagatctgtcttgcaggacacagttcaactgataacactgtctacggtagtagaactttcatcatgctgtttgccaaggcagtacctacatggggattttctccctgcagtctccttgaaaaaggagactcaaatgcccatgtggaggcttggtaatagcggaaatctggggcaatactttgtttgggcttgtaccctgtggcccagtctccatcacctccctcacccctgtcgacagtgagaattgaagtcagatgtcccaaactcactgcaaggtctggaccagaagtgtccgctctgtccctgggctctgtgaacttaccgaggaagaatctcagacttcctgggcaggttagaacgattatcagtccaacaacaagaagatggttttttttaaattatttgttttgcaaatgaatagcaaattacaaaaaaatcataggctaggtcttactgtattttacttttagcaaagacacaagtgtgaccgtccctggtcctttctgatgtcttgaggatccacccatttcccttcctgaagagcgttagcgggaggcagagccgtgcaggaagcagtttctgtttccaggtgcggaacacaccttgtgggagcctggggaggtgccaggctaggtgagggcaatcatctttgataccgcagatgttgcagttgcttatcatgttgaacttcgtgacgtagccggtgtactggccaaatctagttaagttttggctgttttttgtggttatgagagtctgagctgctgaggaagctgggtgtatattctgcactggagacacattagggaccctacctatgccccatcataccatcttaggttctgggtaaggccagtatgctgatactaatttcaaagcctaatctagccatgtgacttcattttaaggagaattagccatttttttttggactgaatgtgtgtgtaccccagcattcataggggaaatcctaatccccaatgctggcaataggaggtggggcctttgagagggagcaggttattagggtggagctctcatgaatagggttgcataccttatgaaagaggccccagagagttctgtttccccttttgccatgtgagggcacagcaagaagacaccatctgtgaaccagaaagccctcaccagacactgactctgctggcaccttgatctcagacttcccagtctctagagctaggcgaaatagattctgttgtttctaagacacccaatctgtggtcttctgttacagccgttgaactaagacactattcaaaccttcatgtcagattttacatatgttgccgtcttacaattctgataccgtacattgggcatttactcacaaaatccacatacgcgctgtagaagtggcaggggtgtttagatgagcaggcttgctaacaaatggtactctgtatttcttttttcttctattggtagtcacatttttgcctatccttgacaccttctatgaatttttatctagagtattagagcacgttttcccgtgactgctggagggatacaggaactgagtgttaatttcatcctctggtgatgtcttttgcttatggttaaaggacctactcccgtatcctctctgcagattccttcagaggccaacatttgtaggaaaaagaaaagattccttctctatgggaaggtgaatggacagcatcagtcaatgtcaaggatgttcttatagctggaaacttgaattctcacagtaactggatattcaggccttgtaagagttgaatacctgccaggtggcctggaagaataccttaattgcaaaacaacaccgtgtctgctccagtcctaatttgaacacagacaacaactgctgaagccgggaaagcataacagtagcttgcagggaaggcccgaggctgctgcagaggagcactgagtactgtagcttttgaggcctcagtcacagcagcgggctggaagttttcacctcattttagttttccttgaataaaaccagaaacttctgaaagtttaggattaactgaatgtattatctcctggaacgttatgtttgtttcctttttatcagagaggagcagatacatgcctggctgcagccccttgacagctcattttctgattgtttcactaaatgagtttgctctctgataagacaactttctttttgctctgtctaatcctttgttattctttcagcttaaagcttttcaagccaggccaagaagctgtgaagtaccagggtcctcgggacttccagacactggaaaactggatgctgcagacactgaacgaggagccagtggtgagtgtctacctccttccctccctccctccctccctccctctctccctgcctacatctttggggtaatatgtaacggggcagaggccagttgaggttaatgattaaggctgccattttaaagcaactctactttttttggagcttattggtattacaggtaaagatgaacttttacagaaactttttggtgtggaaatacctaaatgtgcacaaaagtcaagagaaggctaaaccctgagtttcagcagttaccaccattttggtgtttgtcttccccaccaccctgcgccttgtttggctgtagtcagtcttcagggaagtcacttgtgtggcctcacagataagcacttactctttgttaacactgccaccctgccactgtcacaggtaatacagttcacaactgtaccccagcatcagagactgactctggaccacctggggtcagggctgggcccagcctagaatctcctatccaagccagcactggagcctcctcccatccccccgacctttgccctccaccacctgcagccctctggctcgggcctagcccgacagctgtacccgtagggtggatccttccttttcttctcggtgctcagtccccgagtctctaatgggctttgcttataacatcattttgtaccattaatactctgtgtcttaatgcacttcccttactaaggctaatatcaggagattgtagactcttagaatattatgtactaaaaaggatttataatcctccccctccccagttgatgttggaagtcttcacttttttataaatcatcatgatcataaaccactggttaagtgttcctttgtgggtggtgccttctgattaatgccgagtgctcaggtccctggatgccgggtagacctggtgggtcatgctgctgtgttggagagggactggaaaaacactcgtgttcctacactgtaggatcctgatgagctaggaagagcatctgaagtctttgtaatttcaatttcaacaaatacctaagactaccttcttgtatcagctaagcgcccactgatttgaaggtggtctgtggtggtccttttggagctttgccgcttactgttgccagtttccagtgtgtctgtgcggctcttccgctctgccccatcttctctgatgacctaatcagaaacttggctgctgattcagtgcttccatccctcacctgcaaagactctctcaactcggctgggtgtggtggctcatgcctgtaatcctagcactttgggaggctgaggcgggtggatcacccaaggtcaagagttcaagaccagcctggccaacatggtgaaacgtcgtctctgctaaaaatacaaaaattagccaggtggtaggtgcctgtaatcccagctacttgggaggctgaggcaggagaatcacttgaacccaggaggcagaggttgcagtgaggcgagatcatgccactgcactccagcctatgcaacagagcaaaaactatcgtggaaaaaaaaaaaaaactctctgaactgtatggtggagactgttggtgtgtgatgttatgtcgttgaaccagagacttacctaactttagctaaaagaaccacagacctctcaggaaatttgcatctttgtcctggcaagaaagctgaatgagcaggtgtgactttcatagttttcaattggacattgtttcctttgtgaaaatattctctttgtggggacacatatattggatggtagcaaaccaattttaaggaggagttaatagcctcaaataaatttcaccaaaaaagccagtcttctatgatggctttattcaagaaaccagcagccagtatcaggacggcagaaagacctcatctcatggcccatttcccttagtggaggtggcggcctcacctgcaggttggaaagggctgagaggctgcgtccaggctctgcaagggactttctgtctcctcagtgtgggagcaggatggccgcgtgtaatccccccatgccaccccagaaccacagtcaccaacttgccatattttagtgtctccagcaatagcaggccccagataattgccagaaacaatgacaatgcgccttattgtggaaaagtttaagtatatacactttatactgcaaaccagaattctcttagctttttaagtgaaaactttaaaaaaagttctttatctgtatacctaagtaacttagtacatacattttttaatattcacgtgggataaatttagatttttttaagtgttgtggcaatattcaagaaactcaaaagacaatttgtcactttgtacattctactgcaatttttgtatttccatgtttgcttctgtattttttcttgaacagttatacaaacatgtttcatctcattaatgattttatatatttatgtggtctttatgttgatcatgtcttatattattttatcatgtggatttgccataattcaactctaattctgtcagtggatatttaggttatttataccttttccatcatcagtaatgatgtagggaacaagtttatctttgtaaaggactttccacccccccttcttttgagtgatatttttagaatatagtattcccagacataaaattataaggccaagaataaaaaaaaagatcatttttatggctcttgatgaatatagccaggtttcttaagcaccatatcagcttatgctgccactgtagggcaagacgtgacctgtttctgggatgcactgtggtgttcccatgccgggggactgctctggagtctgccaggaacccaggaagcaactagaggccccgcatgtgccataaatgaacacttcatactgaaaggcccttgaacatctcatggagagtggcacacggtattttatttcaccttatgtgcacccattgactgttcacttagccattcttcccttgggcattgttttgtgtgggtatttagcactttgaaagtcttgacgcgctggcagcagaagggaaactttgtggttctttatgattccagccctgcacagctttgaactgtcagcacctttaaagcctttaacaacttagcttggatattctttttaataggaatatgaacccccagataaaagctgagtaatatacacttaatgtgtctgcagcagaacactgattccattatctttccctcatttctggttactttggttggaagccacagctgtacctggtctgaaaagttgagaaatgtaggattgtgactagacagctgcacacattgctgtctgcttgggtcctggcagaagcatcttttgaaaagcccctttccccctctttctgtatgagacttagtcatatgaattacattctttcttgaaggtgcagcttatgttcatgccatggttttctctctgttgcctttcattcacctgcattttccttctcatcacctccttttctctctgatcagtcttccacagttgtgtcttcctcacagttttccctgtcatttgtgtaaagtaaggataaccaggccttcctggtccctgagtttctcattctcagctttgtccattttgctaccctcgtgtctgtttgtgtgttttttgaggaagagtctcactctgttgcccaggcaggagtgcagtggcatgttctcagctcactgcagcctccaccccctgggatcaagtgatcctcccacctcagcctcccaagtagctgggaccacaggcgcacgtcaccatgctcaggtaaataaaattttttttttgtagcgatggggtctcactctgttgcctaggctggtcttgaactgctgggctcaagcagtcctcttgcctcagcctcccaaaatgctaggctgtcacctaggctggtcttgaactgctgggctcaagcagtcctcttgcctcagcctcccaaaatgctagggttacaggcacgagccactgcgctgggcactctggtgtctgcaagtgctgaccccttcagaatacgtccattgggcgttgtattttgtattctttgtgaagtatccaagtacgtttcaaagaagaggacagggtatagggtaagactgtcctttgcattgtctgctttgtttggttgggttttggggtagggacagctatcacttggctgccctggagactcagacctagagctttcactgagggtgaggctgacgagggggctttttgctgaagcttccagagggcttgacgagatcagttcctgacctggcctcactcagcacagcagcatcgtacaagggttccaggttgttgggtgagggaggcatctgcaggcggttccccacagacacagtcacctcctggatggtttccctgtgtctccactgacacacccatgactgttttatttcctcctgttagacaccagagccggaagtggaaccgcccagtgcccccgagctcaagcaagggctgtatgagctctcagcaagcaactttgagctgcacgttgcacaaggtaagggggacgtcctgatgccagcttcagagaatcactattattccttggcgtgctgggcttttccttcctgctactcaagggctcttagatagcagcatcagtggcactgacaaagggtcactctagaggagctgttgggaccgttgttcagtgcacctcctctaaaacatgagttctccttttgtctgtgcccttatagaaacgccgagtctaatgctaagcacacgtgacccgcacactagctggacagtgcatccttggctaagagtgtttattgacagactcacctcgcttgattgctctttactttattgcactttggagatactgcatttttttacggattgaggattttggcagcccagcatctggcaggtctagcggtttttccagcagcttgtgcttactttgtatccctctgtcagcatctttttagcaataaaatattttttaattaaggtacattgtttttaaagaagtaatgctgtagcacatttcatagactatagtgtaaacataactttgatattcactagggaaccaaaaaatttgtgtgacttgttttattgtgatattatctttattgcagtggtctggaaccaaacccacagtatctcggaagtatgcctgtgtattaatgataatcatatgcttaatgacctcaggcagaaacaaaagcttctctctgtctaaacagaatttagattgggcacagtggctcatgcctatcatcccagcacttggggagaacaaggtgggatgactacttgagcccaggagttcgagatcagcctaagcaagaccttgtctctacagaagattaaaaaaaaaaaaaaggctgggtatggtaagcgcactcctgaagctgaggtgggaagatcacttgagcctggaaggtcaaggctgcagtgagctgtgatcatgccactgtactccagcctgggtgacagagtgagatcctgtctcagaaaacaaccaaacaaaacccagaatttaatgacaccgttataacatgaatcaaattagttactctttacacttaaaagatctttctataccacatcccattttttgcaaatggtctcctaatatcagaatgatccccataaaatttccagtgtgaatacataagtctccctttattcacacatagatgtgtttcagaaaacttggcccaacaccgaatgacttgaaagcaattttggcttcctggccggctcccattaccaaatgctaccatggagagaaatccccttagaagactgggttggaaacgtgagaaatggcttggattgcctctggccttgtgacttgtgcctgctgggagtcagagcccctcccccaccacacttactgtccacagtaacttatcgtgaggccttcagccttttcccacttttgctaaaagttatttcatccataccagcgccctgacggcagaactctagcatgctttccgctacgggaatgcattttcagctgggattgtcttgggctctgagcagggtgtgtttcccaaatcacctgttacggaccgactccggcaggacagaccgactccggcaggcctagccagcgcctccctaagtgggtcactgccacacagctgtgtcgtgtaggtaccatggtggcttcctgcccttgctggcttcccatcagtactctgattaggttcccagagagcctgtctccaccttacagtgcaggatctactgtgcacctgcacatggtttcagctttgcacattttttaatggaagttgttaacttttaaaggaagtttttcaccattttcttcaagtgcattgttgctgtgctgatgagacagtagctgtgagccttagtgtggcagagtcctgctcagacgccaggccacatgccactggttagttctctccccggccacagcctgctttcagtttggtatcagcccaatgtcagggtagaacagctaaacaccttctgtgtccaaataatgatgctgtgagggtttgtttgtttttttccccgtagccaagggggtgatgtttcattttttaaacttttttttatgataaaatataatacagatcgagaaaacaaatgtagggcttaatgaatttttatagcgtggtcacactgtaactactgtccagttcaagaaataaaactgccagcttcccgtgtcccatgcagggcacagcccgccctcccttctccaagaaggcacttgcctgacatttgtggaaaccacttgtattagtccgttttcactgctgatgaatacacacccgagactgggcaatttacaaaggaaagaggtttaatggagaactcacagttccacgtggctggcgaagcctcacaatcatggtggaaggcaaggaggagcaagtcacatcttatatggatatcagcaggcaaaaagagcttgtgtagggaaactcccgtttttaaaaccatcagatctcatgagacttattcactatcacgagaccagcatgggaaagacctgtccccgtgactcagttacctcctacctggtccctcccacgacatgtgggaattcaagatgagatttgggtggggacacagccaaaccatatcaactcctttatgtgcactgaagtgcacattcctgagcactatagttctatatgtgtatgtgtttatatatcttttaaggctcttttaacctgcatgttctccagacatctctttatctttcttgctgaagacataggtggtttgacctgtagagctccccgtggtccagactttgctaattgtgtccccgtagtgtggtctacatgtttccctgatttctctgtttcctggaaattggtagttgggtctggggacaaaatcagtttcagtgtgatgttttttgggggcacaagaagacctcatagctggtgggggcacagaacgtccagttgtctctctttgggatgtggtcgaccatgacaggcagagcctgggtccgtccattccttagggctgccaagtgccgaggctcattcaagcgtcccttcattttttaaccaagagaaactcaccctcatttatcacctggttattcagcggtacagtgcatataggagaggtgggagaaatgcctgattctttccttttattacagttttccaaataatgagttgattgctgattgtccatcaaagatgacaaatttggttttgagtattgttatgaagtcatgaacagaaacacatttgatggagtccctttgtaccaattaaagtgctcatgccgaactaagatttgctaagcaggacaaagatctgattcttcaattaactctctagtgaggtctgacataaattacagttcctctttcccccgtctctgccttggctctccactccaggcgaccactttatcaagttcttcgctccgtggtgtggtcactgcaaagccctggctccaacctgggagcagctggctctgggccttgaacattccgaaactgtcaagattggcaaggtgagtgaaagcccttattaaactggaaatggactgctttgggctggattaattagcagagtggcccattattcattccgtgtgcaaagtcgcaaacttgatttattaattccatttagtgtgccacttgataattcatttcaccttcacagatggcagtctgattttgagttttgctggcttttccacagcctagagataaattatggcctcggctgctttgtttattttgaagagatggccaaatctgaattggcagccccagagcccgttctgcaaagagatggggtagagccttgtagaatgttcactggacgaacttggagaccgtccacgttcgacctcacccaagagctctctctaaaaggaccctggctctgtgctcccccaagcacgcagaagaccctccctcagtttgcactgtgcctgggattctttccagcatttcctactttatacagagaagccaagagtggtgtctgacaacttctgtgtaactggattttctggaaatatccagtgtagctccagggacatcacttttattcttctacactttccagcacccaccagacaccatgcatagatttcctttcttaaaaatctcatttttctaccttgccatggggctgatttgtatccaaaagtaatgctgcgtgtctaggactgaatgatggttaacaggatgatctacttgggatggtgagatggtcaaaagcataaacttgggggttgggtagacctggctggctgaccttgggaaaaacctctccacgcctcggtctccccctttgcaaaactgagctaagatctactgtgtggtgtctgggcagatgaaagtacactgcttagtgtgatgcttagcatggggcagatgcttggtaaattgtaatcacttttgttgtcagttaaatggatatttcactgttgcctcttaaacgcttacgataatatatactaattatacatgttattatcagtttatatttattgaacatttcggggaagtaattataaaataatcttgtctactgtcttaccccattccttgtatccttacttaattattgtatgaaattttatgggagattcttttaggtttatatccatagaggatcctagcagacctaggcgtgagcagacacaagcccaggtgaccacgctgaagcccttcatccctggcacatgtggctgggttacactggacccttaaaaatgcttgtcctctcccgaccttgggctgaggcctcttgtacttcagttccgcaccttagctgctctctgacgggtcttaggtgttgaaatagtatttttacccccgtttgctgacatagtgaataacaacttagtcctgcctattttagtgctggtagaaaataaaaaagaaagcaatgacttagaacaagatgtttcatgaaaatgttgggcaagcagcagctttatgagatttaaatgaaagaaaaagcttgaagagctgtgcttgttggtaaattaagtttataaaattaaggacggattataatcttgacatctttgcagtcttacctttattatataccaactactcctgtttaaaattcacttcttgctccctgttgattttaaaaccctctaagcttcagcatgagagtaaattctaagctggcatgtgaactggtctgggtcccagtcaccgacagccaggctaacccccctcccaccaccaccaaatgtcaagccagggccctgactcaagctaccaggtgctgactttacttgctcgagttaaaatgttgcttcctaaaaaccggcatgtttaactgagctattaatacaataaatcttgcctctaaagtctttcctttactccttttagctcaggtatgttttagcatagctttcaggaacattctcttcaaaaactgcaccttgctggcagagttgctacagaatgtggattttgaaaagaatatttgtaacgtacaaagtgtccagtagccccattagcaagaaggttcatgaagaaactgactgggaagttgatctgcttttattctcaggttgattgtacacagcactatgaactctgctccggaaaccaggttcgtggctatcccactcttctctggttccgagatgggaaaaaggtacgtctgcacttcttagtactgagaattcttcatctcttaaccccatcaggctgagctactgagtggtttaatgggcacagtgaattgccaatcttgattgttagggcactggtttggagaaatgtgtataatgaaacaaacgtctttctcttaattgataagatttgggttgtggagatgaaccttgaaacatttcagtggcccaggttatcactagaataacccacatcttacagtcacagggtaactgtgctctggttgtaaacacaaaccttcaggcctttgaacagagctaaggcttgcacttggtccggttctgcctgcctccctccctccttccctggccgatggtcagcagctcagagttccccatcagcacaacggcttgctggcaggcctctgccccagacttctgtgatgtgtaaccccgtggagggaagaggggcctgtacagttctctcaccaaagccgaggcattcagttatcctctctacattcccgtctaaatatgaacatgcagactttgcaccaccgctaagacatctgggagctctgacccgggcaagcaggggttgcaggaaggcttaagtgattcagaacacctcagtggactcactcagccgcgtgcccgtgtcttggccaggtggatcagtacaagggaaagcgggatttggagtcactgagggagtacgtggagtcgcagctgcagcgcacagagactggagcgacggagaccgtcacgccctcagaggccccggtgctggcagctgagcccgaggctgacaaggtgggtgcctgctggagtcgggatccccataagtggcccgtggcccccggccccccacctccccaccctcagaggcctcctcaaatgctttggacaaaatgacagtttggggacacagtcatctgatggttggctccagttgcgttttcaacacgtatttttcatcgactttcacatgctttcaggggcgaatgcaaacaaaagctttccttttgaaaacatgaaatggatgtgagacaaatcccaagacaatatttggtgtcaaaaatctctagagaatccttcctttccgcttcattcattttaaagaatgactctgctgggcatgtttctgctatgaaatctcgactgctggccccggggccctgattctattcctgaccttgctccgggcattttcctttacccgttgtaaaggcccctagaagacctgtagccaagagggcatccgcagcgatcaggccagtgactgtagctgtaacctgcctaggcagtcctgatgcactgaggggcttccttccttcactcaggtagcaggaggtttcagattcatttgttctgctttatgaagcccttgttatgtcacaggcactgttctaggccaccagggaataaaaataagaccggtttcctgcctctgaagcatacaggtctctgaggcaaatggtgagaagacacacaagccaatggcagggggctggggcagaaatgtgtgcagggcttggctgctagagagaagtgggggcaaatgggcaagaagtgtccctaaggagctgattgacgggatctgtgctggacagataggctgggcagggctgccactgaggggctgcaccaggagaggcacaacccgagaatcagccggcatttctgcagggccagagctggggctgggggaacacagtgggagacaggtcagggtgtggtgtaggatccctgagagtgagagaggagctggagttgagagtctgtgggcagctggccaaggattaggaactgtatcccatattgacagggagcccatggaggctctgtgcagattggagttgtaggaaaatgaccggcatgcacgtgtgctggaggtgggaagctgctctattaggcctttaaagatgatgcgttccctcatgctgcagccgtgactgtgcgatggcgaggaggagaaagccagcataaggagtccagccgctgtgcagcgcggagagggagggagggtccgaggcgagtctgattcccgcatatctggtggaggatggtacccagcacaggggcggggccagagctcgaggaaagggatgagcttggttttcaaggtgttgatcttcaaggctttcggctgtgtaggtggcagtgtccagtggcagttccaaccatgagcctggggctgcggcaggaggtctgcactggacgagagtgcccgtgtcatcctcttcaggtagaagtcatgcctgaaggccaggagtttggatttggaaaaaccagtggggccaccaacccctcctccctggtggggccacaccaggcctcctcacccctacaaccctgtccctagttgggctcttgtaggtcggggatggcctgagtgttgtttaaaagttgacgttttggttgaagaagtaaacagctgattttgtagttgtcaggaccacttatgttagaggagtgtatgtgtcatggtggttacaaaggtcatcccaaattgagtataattatataccacggatgttttcatcgcagcaccatttctatttataatgcagttttccaccatgaagtgggtcttttcagtgcgtgtggcgtcatgtttctggacataaagatggtagtgttccacagtggcccccttggcctccgtcactgacatgttactcgatgccagactcaaatggagcagccctggtacacttagccacgtgataaatcatcccattcctgctctcaggagagaatcgcagatccatttttggagaaacacatagacgtcattctgtaaagaactgtcaagggagaatggctttaaagcagactaccatgtagcacctttcccttaaattctccagccagagcttccatcagcgtttttcacattgacttagaacaggctgctttccatttttatgttcaatgtaaaacaggtatcattgcctttgctattgtaactaggttctttctgttgcatagagaggatgtcacaaagggtgctaggagaatagggtggccagtgagaaaagcggctgaggatgagacttcagtgggtatcctggagactccaggcttagaggtgcagactcaagtgtcagacacccagggctgcctggtccacaccacagcgccctggagagttttcaacctgcctcatccccaaaagacagtccccctccccaccttcatcccctgtacagtgtccagccacctcctcaccacatctcccaggcttgggacccagggacttgcattgatctctctgcccttcagaggctgccagcctccctttgtgtgtagcctatgaaatgcagattgtgtaggtatttctgtgtgaccttggagcctacgtaactgcatttttaaaaaattactgattcgtgtatctgcaatcccaaagcatggccctgctcaactttaagggatgtacttgaactgtggctttttcctcccttgaagggcactgtgttggcactcactgaaaataacttcgatgacaccattgcagaaggaataaccttcatcaagttttatgctccatggtaagtggctgtttaattagaaactactttgtccatgtgtactaagtcacatcatgtttttcagctcatctgccacccctccagactcaatgttgggcacatgttacatttatatgtaggtcatgttgtaggaaataaggaaccgttatcatgctcctatattcaaatattttaaacttcaatggccttaattatatatggagaatgaggctacagttatatcaactttgattatatatggagaatgaggctaaagttatatcaactttggagaaaacataaaaatggaggcaaattatgatggccatattcagttttgtggtatctgcacttttccaaatagatggcttttctttttggctaaacaatgagtgtcatgatgtagctttgctcctcggttcttttaagtactcggatttcttttgtagagaaatccagtagagtctgttagagccattcagtatgctacgcagtttcctgaacctgcatgccacgtggtcttggagaccagagcagaaatggattgcaggtagtgtgagatccagacaaccttggttctaagacttaccgtgaatgactgtatagtaaacttggatgtcctttaattcctttgaaccccagttccctcagctgaaaaatgggagtaactttttgtcttcacaaataaaacaatccatttggaaaagcagagtgttaggacaacagtagattgtttatctaaacatgataaaggcgtcacttttcttgtttgttacactccacatgttcctgagaaactaaccataggggtaaaaagttaataagcacaggacttgaacgaaccatagcaatgcctttcaaatcatttgcaacatttaaaaacctaaagctccacagatcaagtatcaaaaaggaggatcccctttggctgaaggggagccatccatacggcaggagggggtcagaagagacaagggaacagagtcgggtagaagggagggtttgaaccaaacttaatcatggccttgatgctcaccccacatcgctgaagtaccaaggaggccttaaaatggttttgaaattgtgagaccataagcaatcaaatctaaaatgtctttggcattcaagtgaccttttagaaattgtgtggcatctgccctgttccctgttcctctgctcctgtgctttcataaaccagttagcacagttcaccatggcatggaaatggtctcagaatctcaacttgttttgagactggcttgcttctgtcacattatctgaaagtctaccttggatcaacttttgggttcttcatttgggataggaggaggaagagttaatgtgcacccagtgggagaatttggtattttacaaatttctaggcaattgttgactgtcccatacagaagaaacagagcttgtcttggcagcagagtgtaggtgaatgatctcgacccaggatttcaacgaagctgccatttttctcgtcttaggtgtggtcattgtaagactctggctcctacttgggaggaactctctaaaaaggaattccctggtctggcgggggtcaagatcgccgaagtagactgcactgctgaacggaatatctgcagcaagtattcggtgggtacttggatggatgcttatgggagctctcagtatgggggcagatcccaagggaactgtgcctcaaccacgataactcactctgctctcatcttctcaacaatgtggtttttatgtccctttgagttgtttgtttggagaagcaaaagagatcctctctcaaagggaaggcattcttcttcgcccgctttgtagttagtatccatgtttcagtgcaggttttcaggccttgctgtctgagtaacaaggccgtgaagtaacagaccccacgccatagactgtggggcttcccacaccgcgactcttgatgattgaccagtggtctgtagcctttgccataaatacccgagtcgctcatttttcacacataagccagcattataaaatgcagtggctgaatctaagaatcatttcaacataacctcctttctgaaagggccatgccagcaagtcggtcctgtgcttgggttaactactgccttcattccaagctgttagcacagtctgatggcctggaagatttgtcattttttttcttctttgttattcagacacttttggagccctttagatggagaatagacgtaacccagacatagtttccttatcattaaaagataccagttgttttttgtgccctaaaattcttagaaacgagttgccactgaaacatgtatcctcaagaggatcttgctctcatggtctggtctgcagaccaccagggcatcgccagggaggtcattggaaatgcagactcccaggcctgctcaatccaaatctgcaccttcagcagatccgcaggtgatcgtgtgcacagtaaagactgaaagcgtctgctttagggtaaagtcgttcctttgaggctgatctttaatgatgtcattttgaattcagaagtgaacacacagccccacggctgtgctttctaaacagtagtctgctcctgttttaatggaatatacacctttaaaaattagccacagaatttttccagccacaacggtaggagtgtatctggttttatttaggaagcaatttgcatgtgatctggaccgctggtttgcaaacttttttcttttttgttttaaggtacgaggctaccccacgttattgcttttccgaggagggaagaaagtcagtgagcacagtggaggcagagaccttgactcgttacaccgctttgtcctgagccaagcgaaagacgaactttaggaacacagttggaggtcacctctcctgcccagctcccgcaccctgcgtttaggagttcagtcccacagaggccactgggttcccagtggtggctgttcagaaagcagaacatactaagcgtgaggtatcttctttgtgtgtgtgttttccaagccaacacactctacagattctttattaagttaagtttctctaagtaaatgtgtaactcatggtcactgtgtaaacattttcagtggcgatatatcccctttgaccttctcttgatgaaatttacatggtttcctttgagactaaaatagcgttgagggaaatgaaattgctggactatttgtggctcctgagttgagtgattttggtgaaagaaagcacatccaaagcatagtttacctgcccacgagttctggaaaggtggccttgtggcagtattgacgttcctctgatcttaaggtcacagttgactcaatactgtgttggtccgtagcatggagcagattgaaatgcaaaaacccacacctctggaagataccttcacggccgctgctggagcttctgttgctgtgaatacttctctcagtgtgagaggttagccgtgatgaaagcagcgttacttctgaccgtgcctgagtaagagaatgctgatgccataactttatgtgtcgatacttgtcaaatcagttactgttcaggggatccttctgtttctcacggggtgaaacatgtctttagttcctcatgttaacacgaagccagagcccacatgaactgttggatgtcttccttagaaagggtaggcatggaaaattccacgaggctcattctcagtatctcattaactcattgaaagattccagttgtatttgtcacctggggtgacaagaccagacaggctttcccaggcctgggtatccagggaggctctgcagccctgctgaagggccctaactagagttctagagtttctgattctgtttctcagtagtccttttagaggcttgctatacttggtctgcttcaaggaggtcgaccttctaatgtatgaagaatgggatgcatttgatctcaagaccaaagacagatgtcagtgggctgctctggccctggtgtgcacggctgtggcagctgttgatgccagtgtcctctaactcatgctgtccttgtgattaaacacctctatctcccttgggaataagcacatacaggcttaagctctaagatagataggtgtttgtccttttaccatcgagctacttcccataataaccactttgcatccaacactcttcacccacctcccatacgcaaggggatgtggatacttggcccaaagtaactggtggtaggaatcttagaaacaagaccacttatactgtctgtctgaggcagaagataacagcagcatctcgaccagcctctgccttaaaggaaatctttattaatcacgtatggttcacagataattctttttttaaaaaaacccaacctcctagagaagcacaactgtcaagagtcttgtacacacaacttcagctttgcatcacgagtcttgtattccaagaaaatcaaagtggtacaatttgtttgtttacactatgatactttctaaataaactctttttttttaaaagtctggtctttccttcaatgttacagcaaaacagatataaaatagacaataaattatagtttatatttacaaaaaaagctgtaagtgcaaacagttgtagattataaatgtattatttaatcagtttagtatgaaattgccttcccagtacatgattgtgaaaaagacatttagaaaatattctaaaatttaatctgagcctcactttctacaagggaaatcatgatttccgttcataaacagcatgctcatccccctaacaccat

SEQ ID NO: 930 - DNA, 32744 bp, Homo sapiens
  source 1..32744: mol_type = other DNA
atgtgtttcctgtcctattccacaccctagagaatgaataccggccagctagtatctaaatttagaatggcagcaacgtgtcgggttttcggagtagagataaacaaaaccaggtgacatttccaagcctctcaaggaaaggggggaaaaaacctttctggggtaagtaaataaggagagcttcaatagttccatggtagagagaggcctgctggaaggttcagaaaataggccgtttggaaccttctcctttaagccaggagggcggctttgggaggcgtcttgaaatacattcttgactctgctgggaaagctcggggagccagaggcctaataccccccacttcaggggaagctgtgaaggcagctgcacctcctttgtcaagctgttggtttcaaccacagacacgaggacacacttgaggtggggggataaggggagaagcctgccgccccgccccacccccgccagcacaccgccctcgccattcctctcccgccccgccccgcccggcgtctgtgaccccgcgggccgagcctcaggcgacctgttggcagggagagtcacgtgatgcgccggctgtgcactcccctcgggcgggcctcctgttgcgcccgcctggcgagttccatcacgtaacgcgcgggcgccgcccagctcttccctcgctgagcgagggagggcgggcgtcgaagaggaaagggaaggggaaaggggcgggagaagggaggaggggcggtgtccgagtcacgtgacccggggcagcccggaaagctccgaggaggagcctggcgccgccattttcctgcagctgcctgttcctcttaccctgcccggctccagctgacccgggaaggggtgggctgaactgaggcgggggcaagggagtgcccgacatcttgtccgactccgcgggtgacacgagccggttctctctggactggtggcagcgcgcggccccgaaccgcgccccaggccggcaggcggggaaggagccggtgggggtagggggtgcggtggggggtggggaccctccggctcttgggggtcccagtccccgccggctgctgagcgggtggggtggtggaggagctgcagagatgtccggccagagcctgacggaccgaatcactgccgcccagcacagtgtcaccggctctgccgtatccaagacagtatgcaaggccacgacccacgagatcatggggcccaagaaaaagcacctggactgtgagtgaagccgaccgcggcccccgctccccggcgcccgcgcgacccgcgcgcgtccttctctctctctcttgtctttcacccttctactgcctcttccctccctgcgtcttctctggcacggccggtcctgtgcccgttgagctgtgttcttttgcttccatcacacctgccttcacggcctccgctccccgtctcaaaatctgacaagccactcccctccctattcctaggggaccctcgtctccctgcccggtgcgctaccacaccccatcatacccaaccaacttgcttccccacctggcttctcaccccctacccgtctccactgcagccttctgctcttccttcccacccgtccggtgccgcctcgtcgccctcgtctgagcgtctccaagccccattgtttcttcatcagcctccttcgggtttcagtaaacgcctggttccttgcatccagatccttgttatccctccgggctgcctccctggaagggatcccccacttcctttgctccactagctgcttcgcccatcccttcctggctttctgttccaccttccctcctgcttttgggttaccttttcatcgcctctatagtagcttcagtgtagtttcttcgactcattttaaataccatacccagttacccgacttttatttcagattaccttctttgtgggagtgaaagtaaaaggattcaatttggtgtagggaaagctttctggaaagttgggatttttatttgcctctggtggaatttaatcgttgtgttgtccatacttttgactggggtgagtttgtgactgtcagctctgccccccagcttttcacatggggatatggaaaaaggcattttgctgatactcttatcagttcctggaactgttaattctggcggcttgaattcagaagcttgagtgttaagcgtagactgttggaattccaaatggattaataaatttacttacaaataacatacatcccttaaaaaaattggcaaaatgatgtttgatgatgcttgagtttggatgttttaattatgccagttaccttttgaggaactagctttagcttctcttacacgacatagtattcgtccattcgctaacgtagatacaattagtagagctaactcctcgtaacttttttctaacctggaagtcacctgtaataccctcctttttctttgcgctcttttaccccagggtacaaagctcattggatcactcaagccaatggagcttagacctgaaacttttcagggaaaaatagggcaatagtcacgataagtaagttccctttttaaatgactggacacattagtctgactgactttcatcatacatgaaagttactttgttttactgtttgaagcaagagtgagcatgccctgaaagataattcactgtctggaagcctgttttgatttctcatttggactttggccgtaaagtttgcactttaaaaaaaatgtacgaaatgtagattcttccaagttactgtgctcatgaatgctgttagaacaagtttttgctacacagaagcctattattctttgtgattgttcctccactgtggaaaaaagttttaaataaaaaagcattagtgcttgattctttcagatatgcatgcaggctgcttttaaactctcagtccttgcttgtcttagagaatggagaatatgtttaaatggtgacactcttatgaacagaaaactttttaaaatgcatcgtaaagccatatgtgattttttgattatctgatacgtgtagtagacgtttctgctatttacggctcttcaaatactacttggtttgccctaccaaatcttacagtttgtcctgacactgtgttaattcttttgttagttgcttttggtttttttttgttttttttttttgtatgggagtatgaagaaactagttgtgactgtgtgaactattttcctctttcctcattcaaaataagaatcgataaggcttttaaaagttttttttgtaaaggtttgtgtcttatttcaaatgtagcagtggttcttttaaagcattgtcaaaaagaggagaaaataggtagggttagaagagtgctatttgcatgttgtttcataaatgttattagctatttctcttgttatagccactactgcagatagatggtaactgggattaggtttggaggataatcttgcatttgtcgttctttttctctaccacttctgtgtttacaagctcccacgtttttggaacttgaatatacctggtagtatttgatttaaaaatatatgtgtcgttaatgtgcttctgtttcttttcaatgaggttttaaaatacagggatactattttccctacattgttgattaaaatgtcctgtaatcagttctcactaataaaatacctttatcttaggtaaagtctgaccagtgagtggtttactaaacaaataccttccttgcacacactaacatgctttgagaaaattaaaaagtcttctacggacagttcatggtgttgacatcatgaactttaggctttaatacagaaacctgtcatttcaagtaattttttgtcttttaggaatttttctttatagtgaaagcttagtttatgtgcaccttttaatgcccctagcaactgatgcttatttatatgaatctaatgaaaatgatttcattttaaaatggcagcatttaacaaaaaatatgcttaggactgttgtttttcgtataagcccttagagtgtggaggtggtttctgtcagtttctcgccaagatctttccacattaggaagtgattattaataattcatgaattatggcttaattcatactacattatatacttactgaagaaagatttttttgctttgcttatactgtaggtgttagtggataatagtgttgactagcatccctagtgtgaaagagttgtcaaacttgaaatatgtttgtaaaaataaacacgatttccgtttaatcttaggcctttagtagccataatcaaggtagaggaatagcagcccttatatttgaagaacttcagttttccaggcactttctcatcatctcatttaatcctgtctcacagctggaggtgggggcaattcatatacatagaaagtagcttctaattccatttagcagtacagaatgcttaaaagaaccataattattgcaggatagaaaaaacaaattttttttttttttgagacggagtctcgctctgtcgccaggctggagtgcagtggtgcgatcttggctcactgcaacctctgcctcccaggttcaagagattctgcctcagcctcttgagtagctgtgactacaggcgcatgccaccacacccagctaatttttgtatttttagtagagatggggtttcaccatgttggccaggatggtctggatctcttgaccacatgattcgcccgcctcggcctcccaaagggctgggattacagacgtgtgagccactgtgcctggcccacaatttttaatttataacttcttaatataaaaatcatttttatctgatcttacaatctttagtcttaaccccacccctttttttggatacagggtcttgctctgtctctggtgtgcagtggcaggatcatggctcactgcagccttatcctcctcaggctcaagaaatcctcccacatcagtctcccaagtagctgggactataggcatgtgccaccacgcctggttaattaaagaaactttttatttttggagagatgggggtctccctatgtggcccaggctggtcttgaactcctgggctcaagtaatcctcttgcctcagcctcccagagtgctgggattacaggtgtgagccagcatgcctggcccttatcctattttttgatatgaattcttaattttctttattcttatttactatcgttggacatttatattttgacatatttcactgaaatgtaatatttatactaatggctgtaatgtctccttttttttttttttttttaaaatgaggtgggtcttactctgttgcccaggctggagtgcagtggtggaatcacatctcactgcagccttgacttcccgggttcagacaatctttctgagtacctgggaccacaggcatctgctaccacgcacagctaatttttaatttttatacagacagggtctccttgtgttgctcgggcaggtctcaaactcctgggctcaaggatcctctctaccagctgagcctcctaaagtgctgggattataggtgtgagtcaccatatcctgtatgtctctgttttttaattcatattttccccagttaatttacagggacatttcatttcaaccactgccttatcttttctaaaacaaaatcaagatcaagttcttactaagcatccattatcaacatatctctggtcgatacagcatggttatttgtatgttgtgaactggatctagaaattggaaataagtttttaaaaagtaggatttgaatattttgcatatgtagaatttgtatttgggctagtggtttgtgtaactacattaaaaatgcgtataacataccagactgtacctgaattaattcccttttaaagcacaaatggtttttaatgtctcagttaataatatcttatgggtgcttagtttgcgtattgtcaagaaggatctggtaactaggatgtgatttctaagaagatgcatgtaaggaagaaataaagtagaagatctgtcccaggatatcttttatttaaaagtaaggtaactgggactttttttttttccaaaaggatcttgttttaagaagacagttattttgtaattaatgtctgggcttcctattctttcctgtaagaattagtcatatgatttatattttcatttttcattatccttactagtcttttagtagttttgcaatacagaaaatagaaatagagttatcaaagtggtagtaatgagtaagatttgatcacacatgtcaaatgcctgaggcattttatttatttttattttttctgtcgccatggcagaacagaatgcctgaggtatataataaaattcacaaatgtatcctttttcctcccagatatgtctagttaagtttctgaacagtatgtgttttaaaagaggaactctaaagagaacttaatattcaactattttttgtagccgcttattcataattagcaaatgaattctgaaatacttttgtaattattgttccctgatggatttatttgctatgttaagaaatagtataagactttgggcatctatataccttttgtgtttactgaatattttatatatctggataatttttaaaggtgtctttgaatttaaagttactatggcaggtgagaagtgaaacacttcataagatgtgattgacatttttctttcatacgctttgtgagacatttatatgaaacatttactttgatgtttaaaaaacactgattgtttaaaaataatctattttaataatcagaattgctttcatttaaaaatatttgtttatttggccatgataatcatttagaatagttaatgtgaaagttcaccgtagacatagttgtttctcctttgttttcttcagctctgaaatggttaatttcatggtttctcacttaaaataaagaagtaagaaaaataaacttacaggcttcttggcaagaggttagagccctaccaggaagaagtagccttagactttcaaagtaaagtcttagtatttgctcttcctgttcttttggtagctaaagtggcatttccgttactttgtgttctgtcttagtatgttcccagttaaactgctttatacgtttctctagagaatcaaaattttggacttgaccttttagtattttgtatgttcactgtgtatgtgaatcattttgggcagttagatagttctttaaaagagaatcttgatgaacctaagcctttgtattaaaaattatgttcagagttgtgatttgttagattatcagaaaatgaaggatttctcaagttatattattatcaagatatattatatcccccacgaaagtggtacatttgttaaaattgatggacctacattcagacatctttaccacccaaagtccatggtttacattagggtttttttttttttgagacggagtttcgctcttgttgcccaggctggagtgcagtggtgcgatctcagctaactgcaacctttgcctcctgggttcaagggattctcctgcctcagcctcccaaatacctgggattacaggtgcccaccaccacgcccagctaaatttttgtatttttgatagagatggggcttcaccatgttggccaggctggtctcgagctcctgacctcaggtgatccacccacctcggcctcccaaagtgttgggattacaggcgtgagccactgcgcccggccaaggtttactcttgctgtttgtatgttctatgggtttggccaattgtatggcacatatccactgttgtagcggtacaatgtttatctgccctgaaatactctgtgctccccctcgccatcccttctcttccccagccactggcaaccactattttttgttaactgtctccatagttttgccttttcaagatgtcatagttggaatcatacagtctatagccttttcagattttcttttttcacgtactaatatgcgtttacgatttcctcaatggcttttcacggtttgacagcttttttttttcttttgcacttgactattctattatctggatatacccgggtttatttgtccatttacttactgaaggacatcttggttgctccctagttttggcaatcgtgaataaagctgctataaacatcaaacatctgtgtgcgtgtcttttgtgtggacataagttttcagttcgtttgggtaaatagcaaggaacacagttgctggatcatatggtaagaatacctttagttttgcaagaaacctctaaactgtctttcaaagtgatggtaccattttatattcccaccagtaatgaatgggagtttctgttcacattctcaccagcatttgatattgtcactgttaatgggttttggccattctaataggtgtgtagtggtattgttttaatttgcattttcctgattatgtgactttttttcatatgcatactcgccatctttatatcttctttagtgaggtgtccgttaaggtcattgtcctgttcttaaagtcaggttctttgttttcttattgttgaggtttgagagttgtttattttgaataacagtcctttatcaaatgtgtcttttcttttctttttttttttttttttttttttttgagatggagtcttgctctgtctcccgggctggagtgcaatggggccatctcatctcactgtaagctctgtctcccaggggttcaagtgattcttctgcctcagcctcgcaagtagctgggattacaggtgtctaccatcatgcctggctaatttttgtatttttagtagagatggcgtttgaccatattagccaggctggtcttgaactcctcatctcaggtgatccgcctgcttcagcctcccaaagtgttgggattacaggcatgagccactgagcccggctatcaaatgtatcttttgcaaatattttctcccagtctgtgccttgtctttttcattctcttgacaatgcctttcacagagcagaaaattttaatcttaatgaagtccagtttagcagttctttctttcatgggtcatgccttcatcattgtatttaaaaagtcatcaacaaactcaaggtcatctagattgtcttctatgtcaccatttgggagctttataattttgcattttacatttaggtctgtgatccattttgagttaatttttgtgagtgtaatgtctgtctcctgattcattttttttttttttgcctgtggatatctagttgtgcagtactatttgttgaaaagattatctttgctgcattgtattgcctttctcctttgctggcagtggttcttaaggtgtggtctggggacttttgggggtcctcaagaccatttcagcaagtttgtgagttcaaaactgttttcatatactaagacattatttgccttttctatttttattctttcaagaaccactgtacagtggagttttctagaggctgtgtgatgtgtgtgtgatattgccataggttgaatgtagtagcagataatgataattcaactatttcctattaaaccacaaaatagagttttgccaaaatgtgaaacagtgccactcttctaaattgtggggttttttgaaaatactgttatttttcaaatgaattaatgttgataaatttatcagtttcagtttctaacagtaaatattggtagagaacccccacatgaaagctcttggctcctcaattttaaaagtgtgaaggttctgagactaaaaaaatgcacctttagggatgagtgtgtattagaagggacaaaagagtactcaaagaggaactagatctaagggatcctttgaattctcaaagtaattttggatttgattttgtaggtaacagtgcctcaacttttggaagatttcaagcaagagatgtggtatcataatccctatgtccactttatgtccataaatagattggaaggagtgttcagtatgacttggaaaggaaactgctggggcaaaaaagtcttaacaataatatttaaatttttttcccaaaggccttaaaaattagttattaattggaactcttgattatttgtcctctctcttttttttttttatgtcaaaactatccttttttgtgaaagttaggcaggttaggtatcaattgtgccaaaagttcttgactaccaaaccgttagcctttgcacatatgattccttggactaaagacagggtctggctctgtcacccaagctggagtgtagtgtcatgatcatggcttactgtaactctgaactcttgggctcaagggattctcttgcctcagcctcctgagtaggtaggactacaggtgtgtgccaccatgccctgctaaagagaaaggggtctctttcctaggctggtctcgaacttctggccttggcctcccaaagtgctgggattataagtgtgagccaccatgctcggcctcttttaaactgtctttaccttgctcccattaatattcacatttaaggtaaccgctttcataaaaacatcactgaataactccccctggtcctgtcagtccagcattattctcaccatttatagagtttcaaatattgttaaactgtagtggctatcttgcttttatgtattttgggtttatgcacatttcctccacagaataggaattgttttcggtattgttctctatctcttctccaagtacctagtcagcaaccccccatgggtgctcagtaaatattgaatgattatacttaacctcccttcatagctcagactattccatgaacaatttatggacataaaaatctatgccagtagacatttaaggatattttttatggtgactatggaaattgcctggttacaaatttatatatagagtcagtaacattgataaaaacataacaaattactgtttcatggaactcatgaggcattaagaggcttatttagttttgtttagatacaaggtagtgtcttccaaaacattgttacttcaaaatttttgtagctgctccagttgaacactatattaaaatgcacatttttgaggacatattcttgaaattaggaatgtaatttttaagaattaaacagaggaccagaaatagatctgaggagtttatcagagctgcttccttgcacaactctagaaggtgcctgtcacacctttttgtatgaaaggtgcctcctagagtataactgtacagtagactcatttttgatataagaagggataaagcacacttaacagatgatatcaaaatgtaaaagaaaagaagtgtctgttttagaaggaagctgtatgagataataggcaaaggttagggtggtggtagcaatggtggtaaaaataggatcacttaatctagattacttaatcagtaagttgattccaggggccagtgggaattgctgaaagtttcatctgaatacatggaatttttagcagtgattaggggaatggtgctggtatttatagccatgaacttattacttgaaagcatcctagggacccaagtcttaatcaaggggcagttcttccaagtagtggttgaggaagttgggtatgctttccaaaacttctttcctcactaaagattgcagatatactctgtaagtgacttcacagaatatactcaattgtcatattttaatttacatgtttcttctgattataggtcccacgtgattataagttctgagatcaagggtcatctttgtgggggtgtgtgtgtgcacttaaaattttatgtgctggtaatagttatcttgtggatatttaagaaataggaatgtgtgccatattttaaatacaccttatatgcaaaaattttaatgtaatttaagtatatcgcaaaaaataaatagcgggtggtattcacactgcagaggattggcaagtctttttaatatacttcaaacaattgttggcagaaatccgcctcatgcactgtattgaataatttgaaacattagcatttaactaatccaaagctaagataaagagattttgaggtgaggtgataaatatatgcggttgtccttcagtatctataggggattggttccaggacctcccacagataagaaaatccaagggtgctcaaatccctgatgtaaaatgacattgtttgcatataacctatgcacatctcctgaatactttaaatcatctctaggttacttaaaatgcctaatacaatataagtgctacataaacagttgttatactgtattgtttagggaatgatgacaaggaaaaatgtctgcgcatgttcagtagagatgcatttttttggtatattttcgattcatgattgaatccatgataatggaacccattgatatggagggctaattgtgtgtacatacacacacacacacataattttttattcattatttatttatttatttatatgtttgtttgtttttgagatggagtcttactctgttgcccaggctggagtgcaatggcacgatctcagctcctacaacctctgcctcctgggttcaagcgattctcctgtctcagcctcccgggtagctgggattacaggcgcgagccaccaggcccagctaatttttgtatttttagtagagacggggtttcaccatgttggtcaggctggtctcaaactcctgacctcgtgatccgcctgcctctcggcctcccaaagtgctgggattgcaggcgtgagccaccgcgcctggccccacacacataattttcttttttgcaattatttattttttttcccttttagagtacacatttttttgcaattttaaaattgagacataatctacataacataaaattcagttttaaagtagagaattcagtgttatttagtatgttcacagtgttgtgtgcaaccatccccattatgtaattctagaacattttccatcacccaagaaagagatcctgtatctgttaacggtcactcctaagctctcctcggcccccctgcaaccattaatccactttctatctatgaatttttctgttctgtacatttcgtattaatggagtcatacaatatgtggccttttgtgcctggcttctttcagttataatgttttaaaggtttgtccttgtagcacatatcagtactttattcatttttataggtgagtaatactcccttgtatagttacccacatttcatttataccttcattagttggtggacatttgggttgtttagccatttgggctgtgaagaatagtactgctatgaacattcacatacaagttttcgtgtgaacatattttcagttctcttaggtatatatctaggagtaaaattactgggttatatggtaattctgtgtaactttttgaggaactaccaaactgttttccacatcagtgacactgttttacattcccatcagcaatgtatgaagattcctgtttctcctctactttcttgccaaacttgttattttcaggattttagttttatgatttttaaaaaatagtcatcctagtgggtgtgaagtgttatgtcattgtgattttggtttccatttccctagtggttaatgctgtttagcatttctttatgtggttattgactatttgtatatctttgggaaaatatctattcaaggtcttttgcctgttttaaaatttgatctttatgtattctggataccagaagagtactttacatacctcacatactagatctttatatgatttgtaatttttttccccattctgtggcttggcttgtcactttcttgatacaatgtcttttaatgcacaaaagttttaaattttcaagtctaatttttcaagggttttttctttttttttttttttaaagacagagtcttgttctgtcacccaggctagagtgcagtggtgtgatcttggctcactgcaacttcgcctcccaggttcaagtgatcctcccaccttagcctcccgagtagctgggactacaggcatgtgccaccatgctggctaagtttttgtatttttagtagagacagggtttttccatgttggccaggctggtcttgaactcctgacctcaagcgatctacctgcctcggcctcccaaaatgctgggattatagacgtgagccatcacactctcacccagcctctgattttttcgattgtgctttcgatatatctaagaaatcattggctgattcaaggttatgcacctttacaactctaagagttttaggaagaaattttagctcttagatttaagattgatcaattttgagttaacttttgtatatggtatgaagaaacacatttgtattaaggaaaaccaaagatatttgggtttttaatcttttgaagttgacatggaatacaactctactacctctgtgtaatgtggaaatggaattgtgcaggagaaaaatgttacttgatggcaatctccatgactactgggtatagtttggtgatggataactggaattatttgggtcattctttcagctggataaaccacttaatctgatccagtttatattttttacattttcagaatagtcttagatatatgaagaaggtaacaaatagttgcatgactatcaataagttgttttggtccacaaataatagtgtcattgtatgtttccatggtatctttttttttttttttgagacggagttttgctcttgtccaggctggagtgcagtggcacgatctaggctcactgcaacctccgcctcctgagttcaagcgattctcctgccttagcctctcaagtagctgggattacagacgtgtgccaccacgcctggctaattttgtattttagtagagacgggggtttcaccatgttgtccaggctggtctcaaactactgacctcaggtgatccacccatctcagcctcccacagtgttgagattacaggcattagccaccacccccagccagcaagcaattttttaaaggtagatttttgccaacatttaaaaaaaatcatattttttttggagtgctaaggaaaaatggtgacagtccagaaaatattataaagatgagtgggccaggcacagtggctcacgcctgtaatcccagcactttgggaggccaaggtggatggataacctgtggtcaggagttcaagaccagcctgaccaacatggagaaaccccacagcctgagcaacaagagtgaaactccgtctcaaaaagaaaaaatgagtgacacttgattcttaccttaaaaggagcctgagatctaatagtgtaaaatgtgcaaactaataattgattataatacattaaggtaaatgcataataaatttttacataaagatcaaagtaggagagagtaattaactttgaaggaggttagtaaagacctcacagaggggaggtaacaggaactttaaggatgaatggtgatttgcagatgataagcagtgacatggggcaaaaaagcgctttatggtgtgtttgtgggaaactgaatagttttgtgtggtagaatgcaaagtgttaatgggagtaaggggagatgaggctggagagggagctcttaaaggagcaggacttgtcttgataaactctgggctcttcagtgccatcctccgtcttcattttagagccctcctttctcccatttattagctgcttccctagctttagataccagtgctgtgaaactagcaatgtattttttccttttcacacatagtttgtagtgaggttgttgagaaagacaggaaagaaggaatgcatgattctgttggcacatgtgcagggggctaaatataccttgccacccaaaattggacctccgaatgttgttatacatagtgtttggctctccaaataagtaaaatcaggcatactgtgaactcatggcttttgtgggcttgtctgggaattgagcttttattgagttccaaatttatgaatgaacttaacacaaactatcttattgggtgatagtatgaataaataagatttgttaaatcagtttgaagtcagtaagaatcttcgtggcctgtttgatttaattagtgacttttatatatctgaaaatgatatattgtcacttgtgcatttttaaagctggatttctaccaaacaaggctttgttagtcttggatgggtgctttggctcatccctgtaattccagaactttgggaggccgaggtgggcagattgcttgagtccaggagtttgagaccagcctgggtgacatagtgaaatcccatctctactgaaaatataaaaattatttgggcatggtggcacacacctgtagtcccagctacttgtaatgctgaagcgggaggatcacttgagcccaggaggcagaggttatagtgagccgagatcatgccactgtactccagccttggtgacagtgagaccctgtctcaaaaaaaagactttattcgtcttaaggaaattaatatgctcattagcattacatattgagtcttgttaaaataaaactttagacaaattaaatttggcagttaatttgagcaaagaaacaattcatgaattgagcagcaccctgaaggagtaaaggttcagagagttccacccagcaatgtggatagtcaggatttatagacagaaaaagaagtgacatccagacatagtctgattggttacaggtccacgtttgtgtccacgtttgccttatttggacatgtctgagcagcttgccgcttgtgattggcagaacgcttagcctcgttacaagaatatactcgagttaggttgcagttttaacatactgaggtgcagttccctgcttatggaagcagctttaggccaaatttaattaacagtgtcactattcaggttgtgttgagattattgtgaaacactaatctgtcctcagtctagtagggtagatgacgtatgcagatagctgtattgccagacaatgtgagataagtacagatcaaatgatgttaaaaatcagataagagagatactgcttttgataagggaagataactggaccttaaatgataagttattaggaacactaggcatttcaggtggaggaaagagcatgagcaaacatttgtagacaggaagctgaaattgtgtttgaggaacaaagagatttgtaaatggggtgcttttggactgtgagagggacaggttgggtgcaatgagaaatacagtcggagcaattgtctgaggctagattgtgaagggagtatgacttttaattatatgacctttagatatagctttttggctactgtaggtcaagttggaccatagttagagccaatttttcaaaattacactttatctgtagtttctgctgccagtgtgaaaacaggaaaggcaaggagttttgctgatctggaagctgagatgagattttgctgcttcaagtttttgtattaactttattatagaatgaatgaatggtggcaattactgaggtttggggatttccgagtctctagattgcacaggaatcattgaagaagtcttctcaacagaaataatgtaaacctaactttgatctgaaggaagaaattttataaaagaaaggaaactttcagtcttcagggattcacaaagtctgataaaaattggtgtattagtctattctcgtgctgctatgaagaaacacccaagactgggtaatttataaagaaaagaggtttaattgactcacagttctgcatggccagggagacctcaggaaacttacaattatggcagaaagggaagcaaacatgtcctttctcacatgatggcaggagagagaagtgccccttataaaaccatcagatctcatgagaactcactcactatcatgagaacagcatgggagaaactgtcgctatgattcagttatctccacctggtcctgtccttcacatgggtattattacaactcaaggtgagatttgggtagggacacagagccaaaccgtttcagttggtttagttaggacatacaaaatggggagaatagctaacctttaaggaaacctttctatgtcttgggcaattgacatgcattgttaacacaatgtttatacaaacctattcatcagatagtcttattggctttattttccacatacttaaaccaaaacactattagtaagaagacatagagaataaatctgacatttagatggcgatgaagaaccttgactagaggtcaggcaatctgaaggggagcttcttagctcacagaaaacttatatggaatgagatatagataggagagagcttttctttgaggaatataatttatgtaaatatgtaagattacattttgagatgtcaactttctatactttttttcttttctttttgagatggagtctcactctgttacgcaggctggagtgcagtgtcgcgatgtcagctcactgcaacctctgcctcccaggttcaagtgattctcctgcttcagcctcccaagtagctgggactgtgagtgcacgctaccatgcctggctaatttttgtatttttagtagagatggggtttcaccatgttggccagactggtcaggaactcctgacttcaagtgatccgcccacctccatctcccaaagtgctgggattacaggagtgagccaccactttatcttaagataaattttccatatgcttcaagaggagtaagctctaactggaatgtagggtactgaccctagctccatatgacctcacaaaaatctgttactaaaatagtttattttctaaattaccttcttactctgttattctgtgatgctataattgtgctcctttagctttttttgttgtaggcttggtcctttggaaacgaataccagaaacagtttctctctgagcctttgcttcattctccatcagagtattctgtcccatttactactatatcattatttgaaaaacagtttgaatttgcatatcttattatcattggtaggaataggtggcattgtcttatgtgattcttgttttaggaggaaatgggcaacaaaaatgtgaattttcagctgggtgtgttggtgcatccttgtagtcccagctactcaggtgactgaggtggcagtatttcttgaggccagtagtttgaggccaccttgtacaacatagcgagaccacatcacataaaaaataataacaataaataatttttttccagtgtgtatcttggatgtaaaaaaaagggagtttctttctacctttattaaaaattgtcttatatgtgttgcctgttgttcatattgggggatcagctgagggtgtgtaaggagcatcactaatccatcaccatttatgttctaccacagtgacataatcttaaaattattaagtgatgaattgatggataattgcttcaccttatttttatctcttcattttaattcttcagaaacacagaaatgtaaacattattattgttgccaggatccttaatttaatttgcatgatggaaggactgtgtttcttaaattatatgaatgctgtgtatatgtattgtagaatggggaattgcatgtatctgtttaatattagaaatctgtaataggtcaaggctgcatcagtttttgtggctgtaattgcttgcacatttttggcttataaacttttgtgtaccagtgacaaccattaagagccagaaaagtttgcttttacttgcagtacatgtacatctagttttgagttatttgtcaaaaaagggtgaactttctttttggctttttttttgggggggccttttgtgacttgaaattaagcaacttactgatatagtttttttttttttttttttttgagacagagtcttgctctgttgcccaggctggagtgcagtggcgcgatctctgctcactgcaacctccgcctcctgggttcaaggagttatcctgccttagcctcctgagtagctgggattataggctctcatcactacgcctggctaatttttgtattttatttttagtagagatggggttttgccatgttggccaggctggttgtgaactcctgacttcaggtgatccacccacgttgacctcctaaagtgctgggatcacaggcgtgagccacctcacctggcctgatgtagtttagaataatctttagttgtgtccaatatgtagttttacctagcaaactcgttttaattgttggtacctttttttttttttaacttctctaagttcatctaccttcagattgcatctttggaaggggatgggcagaattttggaaggtagcagttctcttagatgaatagaaaagaggccaggcatggtggctcacgcctgtaacccctgcactttgggaggccaaggcaggtggatcacctgaggtcaggagtttgagaccagcctggccaatatgatgaaaccccgagattgcgccactgcactccagcctgggtgacagagtgagactctttctcagggaaaaggaaaaaaaaagggaaaataaaagaaaatgaatttctccaattaacagttactggctttatttcaggcgagctgtcatgggggaatttgtctggttttgagatataagatcagtgtgaagatttattgatacatacaaaatggagtgggttgctctgcaatgaatttgtgtgttaaaactgaatatcaaagataaaataagttaactggatagttgcatttgatcttttggtatggaaccggagtaaagatctgatttatgtttttttttgtttgtttttttgagacagtcttgctttgtcacccaggctgcagtgcagtggcacaatctcagctcactgcactgggttccagtgattctcatgcctcagcctcccaagtagttgggattataggtgtgcacccaccgtgcctgactaatttttgtatttttagtagagacgggcttttgccatgttggtcaggctggtctggaactcctagcctcatgtgatccacccgccttggtcttccaaagtgctgggattacaggtgggagccaccgcacccggccctctgatttgttctttacgtggtcactttgcctcccattttcagaattggaagatatacccacattatccttattcccatttgtacatttccttattgaagtaaaaccagctgtttaatgactgaaaagttacagtttagcaggcagtaatttttttttttttttttttttttgagacggagtttcactcttactccccaggaggctgaagtgcagtggtgctatatcttggctcaccgcaacctctgcctcccaggttcaagcgattctcctgcctcagcctcccgagtagctgagattacaggcatgcgccaccacgcccggctaatttttgtatttttagtagagctgggatttcaccatgttggccaggatggtctcgacctcctgatgttgtgatctgcccgcctcagccccccaaagtgctgggattacaggtgtgagccactgcacccggcctatttttcttttattaacattagctttagtaatttttcttcacagaactatgtatttgtgtatttgttgtcaggtttggaatttgtgttggctatcaatttaatataaagtcttagactttatagagtataaaccctcatttatttttgttcatcgtattcttgcaaaatactgttttgacttggtgacctagagtggatcaaggcactatcttcaagtggtttctgtagtagcctaacctagaaacactgcctgacatagctgagtggcaatgaaaaacagccataggtactaacttaaaaattagctatagaattgcaactggcagctaagttagaaagctatttatagagcagcttgggatactaagatactccttgactgcatgaaggtgcagtgcaaggagagaaccattgcttcgcatcaggagattggaaaccttttttttttgagacggagttttggccttgttgcccaggctggagtgcagtggcgggatctcggctcactgcagcctctgcctcccgagttcaggagattctcctgcgtcagcctcccaagtagctgggattacaggtgcccgccaccatgcccggctaattttttatatttttagtagagacgaggtttcaccatgttggccaggctggtctcaaactcctgacctcaggtgatctgcccgcctcagcctcccaaagtgctggtattacgagtgtgagccactgcacccagccggaaacgttttaagagagaaacttactaataagttgcttcctgtccttgggcttatagacttaatctagaattgatttttctttgactttcttcatcagagttatattttcataacttaatgactaaccaagaatgtgttataactgttgaggccccttttaacgtagtttaccccttctgctattacttagaattgatagtaattacatctctagggcaaaagatgactggaaaattgctttgtgttcttctcatgtaacatcatataagacctgttcacctaaaatctagtgagttgatttagtttgttctctgacattcttggcttctttaaacttgcttataaattaaggcttgcagtttgagtcatttggaaatgggcaatgcccagaactttcgcaacttgtgaacttgagttgaataatgtgtcgctttcctcatagtctgtcaactttagttcattgtagccacaaagaagatgattatgccaatgaggattatactaaaccagacaagaggtggcctactgtgtatactaggaattagatttgtgagaactaaacacaacactgaatttgtgaaaatgtgtgcagtttagagtaattagagaaaatgataagtctcactcagaccacatggaaatgggggtagagtgtgtgtgtgttgtggatgtgtgtcttcatctatcctgctagtggaaaggttactgtttgaaaaatgtagttccaacacagccactagtttgtgctactttagacaagtatttaaatctttgcaatagagatattataatagagcattccttgccttggcacaaggctgttgttaaattggaagactaaggatatgaaagaattttgtaatgtataaagaaatcttggccaagcacggtggctcatgcctgtaatcccaacactttgggaggccaaagtgggaggatcacttaaggccaggagtttgagaccagcctgggcaacatagtgagaccttgtatctacagaaaatttaaaaattggctgcatgtgctggcatgtacctgtagtcccagctactccagtctgggtgacagagtaagaccctgtctttattaagaaagaaagaaatcatatgtgcattataaagattttgccactcttaagattgagtgcaaggatctatggtaacacttcccagttgatgaagaaattgggcattagataatgaaggttttgcagcagtaattgagtttgagctattttcatgacagtgtattggaaaggtgatagaggagttgtctcctaaaatgagggaaaacatcaatacaaaatgatggtaagaaagaaatgaaaatatttgtaatgatgctttaaagctttagggtacttttaaaataccctaaatatatcaccttactaagccaagatgttgtgaaaattaagtattagtcctattttttaaatgttgaaatggaaactgagtgactaattaacatgcctgaaatcacaatggtgaatcatgaatctcgaatttgattctagattttttttgctcattctgatgtgttggttagtcttgttatagtacagttgtagcacatggaaatggatgggaccatgcatggaagccagagagtctagagcagaacttcagtgatggcaaattaaaatcttcattatcagtatttgaagcagatattgaaaatgaatagctcttaggacagactatcaaataaatgtgagccagaagatttttaatgggagaaattaactttaatgaaatatcttgtagaaagagttaaaaacaagatacctgccaatcccagtcactctggagagtatctaatgtagcaatgaaagtaaaaactagttaacattctccagtgtttgtcaagtttaggaagagattaacttgaaaagctgtggttgggtagaaggtttatttgaagatcgtttggcatcatagcaaaaaaaagttggtgaaagattggtactgtagaatgatgggagaaagatgattaaatttcccttcctacttgtctagaccacttaaaatgtatattactttctcacacaagccaggataaagatacactctttaagaaatttaggagactcttcatatatccattcatagatagaatgtggttttgaaaataaatgggatattgtataaatatagatctatataaaattttataattccttttaagaaagacatttgtcaggaagtaaaattgtcagactttttagtgctgagaaataggaaataggtgaatgtgggttatatggagtcttttttttttttttttttttttttttgaatttcaagacagggtctcactatgttgcctaggctggagttcagtggctattcacagttgtcatcattgcatactacagcctcaaactcttgggctgaagtgatccacccacctcaacctcctgagtggctgggactacaggtgcataccactgtacccttctaggaatcttataagaacaggtgtatggttatgaggtgtatgaggatagagatattttttgtcctggtgattatttcttcttgtagaataatcctggtgatttttccttcttgtagaaacttaaaggcgtaatattaaacttattaggaaaaataactctggctttattttgtagtgatttattaatggctttattttatagtgatatattaataatgtattaaaattgctcatattttccacttagagagtattatttcaaaatttaaagccatgtagataggttattatttggtgctacatccgccattactgcagttggtttccagcagtttgaaaaatgatttttcagaaatggctttcacttgttactcagtggcttacagcaacggtccccaacctttttggcaccaaggagtggtttcatggaagacagtttttccacagactggcagggggtgtgtggagggatggtttcgggatgaaactgttccacctcgatcataggcattagattctcataaggagtgcacagcctagatcccttgcatgtgcagttcacaataggggtcgcgctcctatgagaatctaatgcccctgctgatctgataggaggcagagctcaggcagtaatgcttcctagctcaccagctactgtgtggcccagttcctaacaggtcatgagccagtaatggtccacggcctgggggttgggaacccctggcttacagggtcttcacatgcttactagctacagttacgtcacttaatcgtgtaataaatggctcgtgtaattttgagtcacttaaagtgatcagattgttttaattgtgaagcatgtgaataaataaatgagatttccaccgtctggtactatatacgtaaaactagaggctttgcaaaattaccaagagacgatcccgtttgatgtgtctttggtttggcacaggtggagcagacatgtgagatatagaatgaatgggaggccttcacacttactcactatgtggaaggtggtagttgatcatgatggtcagttccataggcctccaggccactggtgacacactaccactgttgccataattcttaaaagtcattttatgtggggctccttcctagcaacctccctcaaacacatagctccatcccttccaagagctaagaaatttttagcacttgccaccatctatttgttcatttgtttactgattacattcctcccattagtatataagctccgtgataatagaaactttgtccactattgtatatttctaactcctaagacactattggcgtattatagtatgcagttaatactagaataaatgggatttctgtttgttcttactgaggtttgcaaagcttcatgaaagtggaatataaagattctcgttgttctgtgtgcattggggacatggaacggaacttgtgttttctgagtgagggagcctctggcagagagtctaactgcaatccattattccctgtgactgggcagaatttaaaaatttttaagagaagagatgaaaaatcttctggattcctacttaatttagacatgggtttggctcttaacgaaaaactttaacctacctacagggaaggctttttcgctgttacccttacttctgtctcctggatcttatgagtggagaaatgagcctttgtttcacttacaaatccacaaatatttatgctgtcatatgaacacatgtataaggcgctgtgtcacattgtggaagatacaaagagacaggattcctgagaatttaacaaagttaagaatgagtgttattaattaaaacaaaaatgggacatttaggttatagttgagaccatgttcttgttttttaaacgtgagatgtttttggacacagaggtgaaaaattctaatgtctctaactcccccagaagaccttagattgatttttctgagaagaaatttgtgaatgatttgcatagagattttctttgaggttaagaaattagatgagtttcccggggtgaaaaaaacagaagcagagattattgttaaaaatggtcatgggtagaggggttagagggcaaagtaggcagaatagaagcatgtttgtgttttaaggaggctaagaactagaatatagcactcataaaaggaaaatgcaaatgcactgtgaatagctgctactggtagtgtattaatttcttagctacatgtaaacttttattagtgtgcttataactaaggtgatgtgtaatatgtcatccaaacttgggtcacttttaagagtgaaagggtgtgctatctgaatgggaccctggacaacaggtgtgaaccaggactgttccagcaaaaccaggacggttggtcattcctaactaataacgtacttttctccagacttagtcccaattcctttaacctctccagaattatctataaataattatagatattataccataaatgttttttcctttatagtactctgatctgcacttgcagagcctctcagttgttggtttctttttccctgtcttgttggaaagaaaggagaatttttctgcccccactctggaccctgcttgggttcacagcattggtggaggtaagtagtattctcaatgtattgttagttgactttcattttgcttaggaaatgaggtttctgtatttttctgatccagtactagatttttttttttttttgagagtcctgatgatatttaactgggctaacgaacagttagtaagttcttagcatgtaatacaaaaaagtgtttgtaattttggcatttgttcttaaattacttgatacttaatatgttttctttcctataggtggggttgtcattgtgaaatttaagatcttcaaagaagagaatgtaatttataccatgaatatgttattttttcatgttggagcactgtaatactttcagtttgttttcttattgtttaaataaaatttttaattcttatattaagtgatgagtttttattccattaagtagctttttattgtcttgtatttctgataaatttaaaattgacatagaagtaataaatctttgagatggtgcttaccaaaatatgattttcctcatcccttacagtaatccttatttggaatctaggatgggcctaaggtatctaggtttgaaaatcaccactttagagtactagaatggaatcctaaacaatctcagatttaagaatgtggtttacagatgagcctgaatgcatctgtgttcttgccagggtcctgttgttcctctgtacagtctgccatctagtggtaggaatgcagagtttaccagaatgccaacggaaagctctaggtttacactttcttatattaagaaggcttacgtagtaatttaaaacattttgataatcagaggaggggggaggaacaactctttcatttgaaaatacaagtcagtggcagtgaagtcagagtattccaagagtatatgtttttctatagagcattttcatgacttaaactttccacttttgttctaagagtttttgtatttatgacattagtgggtaaagagacaaatgaaagataattttaagagacagtagattagactgatctgaaaaatgtgttttcagtgttgattaaaattttagagcaattacataatgacttcatttaaaacaatttagtttgcacttttaaaattaaagtttgaacagttcggtaaatttggcttgggttcagccatgacttaagaggctaaatttcagacatatattaatatatagtatcttaggagtttgctttgtgtacccagttctatctgaattctttcttctctacatattcccttttcagttcctcatctttcctctgccacaaataaaaaggatgtcagtcctttctctgccaggaaaatgccttttaaaaaatctcttctgtgttccgttcttgaagtagaggctttttattgaggtagttcataatatcagtatagtggcaggaggaggaatatggggtggtataaacttgaaaaagcaattatgctgctctctagattgctaatatatttttttccaaatttgctgcactgaagcttagactaaatagaatattgttgctttctacagatgtcttctaagttacatttcatttactagtattaatttaataaatatttaaggtgtatcctgctaggtgctggcaatttgaggatgaagaagtcatggactgcctttagtgagctctctcataggagagactgatatatgagctagtaattgtaatgaagtgtgaaaagtgctgtaactattgtatgatgagttaagagagtatgaaattgaaaccagggaaaatttgctttcccctccaaaacaattgcctggtctttttgccatctctgaatcctatacatacagattacaatcaccataatgtattgtgaggctgtatctttacccccaaagacctcagtttagtaggggagaaattttgcatcttctcagctttgtatatctaagtatttggcatatacttaggtgaatccattgtttatttgaattgcatccgggtcatttccagcaaaagggatagctctgaaagtgtgtggcttcatcctgtgtctcacttaaagcattttggaatatatacacacacttaaacatatatacacctatactgtttgtacctgaatgtaaggtaaccccaaatataaagcaagcctgcattttcccagagacattgacagcccctcaagttttatttatttaacctatttaaatatgtaaatgttagggatatagatgaagcagtcagcctcataatattgaaactcactagttagaatacatatgaaagattactataaaaagtaatctggctgagtgcggtggctcacatctgtagtaatcccagcactttgggaggccgaggagaaggatcccttgagcccaggagttccagactagcctgggcaacagagggggagacctcgtctctataaaaataaatcaataaaattttaaaaagttattagaaagagaagtaatctgtgattttaaaatagtagtttcttttcgccactcatacatacctcaccacatgacatttgactcattttacattcatgtatatattggatattttgtgtttttttggtcatccacagccccttttttaaagttatataacatctttccttttgtgtaagatctttctaatttacattagaaattttttcacagactatcaccatccattcttataacactaagacagtttgtttctttcgttcctcatgtatatttctatatttctgatctctgcatctgcaacataactttattttgttgccttttttttttttttttttttttttgagacggcgtcatgctctgtcgcccaggctggagtgcaatggcgcgatctcggctcactgcaagctccgccacccgggttcatgtcattctcctgcttcagcctcctgagtagctgggactacaggctcccgccaccatgcccagctaatttttttgtatttttagtagagatgggatttcaccgtgttagccaggatggtctcgctctcctgacctcgtgatctgcccgcctcggcctcccaaaatgattttgttgctttttaaagttctgaagacacccaacacaattttgcaattatgtggtatatattcccaggaatacttacctctgttaaattttttatttcttcataagcacctgaaactagcattgttggaggtcttttcaggttaccttcttcaggaagaactttgttaaaataaacagaccagataatgagatgatttgtgaagacttatggcagtttttctattgaatagtttttagagagggaaagtgctgtcattttacctggcaattttacaaatggtagaattatttttacatttctggtggggggaggattgccttttaaaatttattttaatttatttttttttagacacagagtgtcactgtgtttcccaggctggagggcagtggttgttcacaggcatgattatagtacattacagccttgaactcctgggatcaagggatcctcctgtcagccttccaagtagctgactacaggtgcatgtcaccatgttccactctatttttacattttctaatttttaagtgtgggaatcttagtccattcatgttgctaagaacacagtgacagaaatagcatatctagttgtgctaatatactgatttttttcctacagctgcactttttttttttttgagatagagtctcactctgttgcccagacaagagtgcagtggcatgatcttggctcaccacaacctctgcctcccagattcaagttattctcctgcctcagcctcccaagtagttgggattacagtcgtgttgtcaccacgtccagctaatttttgtatttttaatagagctggggtttcaccatgttggccaggctggtctcaaactcctgaccttgagtgatccgttctccttgacccccaacgtactgggattacaggcatgagccactgcacctggtcttttatttttaaacgttaagataggactttgacttaccttttttttttttctgagatggagtctcgctctgtcgcccaggctggagtgccgtggtgtgatctcagctcgcaacctccgcctcctgggttcaagcagttctctgcctcagcctcccaagtagctgggattacaggcacctgccaccaagctcggctaatttttgtatttttagtagagatggggtttcagcatcttggccaggctggtcttgaactcctgacctcatgatccacccgcctcggtctcccaaagtgctgggattccaggcgtgagccaccgtgcccggccaggactttgacttactttgggtgtggggtctggagattccttaaggctcatttaccattgtaagagattgaacttgtgttcaaaatactgacctacttctggcatagtggctgccaaattctcaggtactttaccatgcaactcttattctttttttgttttgttttgtttaatttttttcggatggagtctcgctctgttgcccaggttggagtgctatggctgtgatctcagcttccttttacctccgcctcctgggttcaagcgattctcctgtgtcagcctcccaagtagctgggattacaagcatgtgccaccatgcctggctaatttttgtgtttttagtagagacagggtttcaccatattggccaggctggtctcgaactcctgacctcaagtgatctacctgcctcaactttccatagtgttgggattataggcgtaagcctccatgcctggcccagccactcttattcttgtaccacctcttcctcacatccttgaggagataaagaatgtgtcatggctctcctttctgctcttgatcatgataacgttctaaagggtgtggaataaattacagtacagaactggtgtgtgctatgtgacatgagaggtactgagattagtttatggaagtaacagtgttatagttcctttataaattatttttctctaacttcatatatgacatagttgctaagtcattttggaagtgttcgattgtgtatgcatcaccttgtatttgggcaaatacaatatatacaaaaaaatattacacatacataactttttttttttagacagtgtcttgctgtgttatccaagttggagtgcaatgtcgtgatcacagttcactgtaaccttaaactcttgggcttaaactatcttcccgcctcaacctccactacaagcagtaattaaaaaaaaaaaaactagggagctgggtgcggtggctcacgcctgtaatcccagcactttgggaggccgaggcaggtggatcacaaggtcaggagttcaagaccagcctggccaagatggtgaaaccccatctctactaaaaatacaaaaattagccgggcgtggtagcaggtgcctgtaatcccagctacttgggaggctgaggcaggagaattgcatgaacctgggtggcaaaggtggcagtgagccgagatcacaccactgcactccagcctgggcgatagagtgagactccgtctcaaaaaaaaaaaaaaaaaattttcttttttttttggctgggtgtggtggctcatgcctgtaatccccagccctttgggaggccgaagcgggtagatcacgagatcaagagattgagaccatcctggccaacatggtgaaac

SEQ ID NO: 931 - DNA, 32744 bp, Homo sapiens
  source 1..32744: mol_type = other DNA
cgcgcgcggggcgggaacgcggaaggggctggggttgcggcgcggcggcgaggaccagaccgggggcggggccggtagtgggagtgcggggcgcgcggtgacagcgcggggttggcggcgtgggacccagggggcgacagaggcagcagcagcccgaggcctgaggagaggagaccggcggcggcggcaatgctggagacccttcgcgagcggctgctgagcgtgcagcaggatttcacctccgggtgggtatacggtgggcgacgaaaagggacctgagggggccgggccgccgcctgggatgcccctgcctcgctcccttccccgcgccacggtccagggtccgtcctgtcccgcacctccccgccccgccccgccgaggaaagtaacgaacttcccggcgtcctcgcgtcgggcggcgcaaagtaacttaggtccctgcgggccgcctgtgacgcgcaccccccaggaccgggaggcgctcggcggcgcagcggagcgcccggggggggtgtgggaccctgcggtcctttcccggcagcatcagctgggccctggagggaagtcatgtgagaagccagcgcgcctcaccgcttccgcccccgcggcacagtggcctgcgcccctcggcccagcagacacctgctcgtgcgcacctggagctgggccagccaccctccccgagtcggatcgcaccgcgcagcagcctgcaccctccggccacagccttccgcgccgcgtctcggctttcacgcccggctcgccggcctaacccttggcaaggctggccgcccctccccgttgcgtcctttctctacctttgccgtgagctcagcgcctcggcgaaggaactcctaagcaggagaagcgacagaactttaggaatgcttttaatacccagcggttcccaaactttgcttagaatcacctgggaacctttcagagttctgatgcccaggtctcaccccctacctgttgaccagagtgcctggagacggcgttttaaagatccccaggggattccagtgggcaccaacgcctgggaaccacaggccgagactctggcgccagattgcctaggcatcctggctcgaccactaaatcaaacgtagttactcagctgccttgcctcaatgtactgtttccgctaccgtaaaatggggataatgatggtacttaaaaggttattacaaggattaatgaattaatgtgtaaaacacgaagcaagcatcatgtcagtattgttacttagtgcttaattttaattttttcattcctttaaagtgaaaaagatctgtctttgaaaaggatctttcaactttagcttacaaatcctgttggaggatgcactgaatgtgagaacatttccactcatactgttttaaatttctcccccccaccccccttttttttgagatggagtcttgctctgtcacccagactggagtgcagtggcgtgatctcggctcactgcaaccgccgcctcccggattcaagcgattctcctggctccacctcctgagtagctgggactagaggcgcccggcttatttttgtattttttagtagagacgggtttcaccatattggccaggctggtctcgaactcctgaccttgtgatcctcccgccttggcctcccaaagtgctgggattacaggcgtgtgccaccgttcccggcccaccctcccccccttttttttaaagtgacaagttctcgctctgttgcccaggctggagcgcagtggcgctattatagctcgctgcagcctccaactcctgggtacaagagatcctccctcctaggcttcctgaagtggtgggattatgggtattagtcactgcgcccagcctcgttttaaatttctaatgagaaagatgttagccaaaattttatcttaatggacaaaaatgttaatactatttgcacattgggcgttgaataacaaactgtcaaacgcttgagcacttaccatgcgtcaatcatttttgttagtttggtgtttagaaagttatggacgctcggagtcattcactgatgggtgtgcttgcgtgcttgcattttgttctccctatttagtaaaagtaccttcttttcagagcgtaaattattgtattgaaaactttttggtgtgatgctgaaatggcccatttgtagcatgagagtggccattattctcctgttagtacttcatggaattccttgatggcacaagagcccatcttgtagttactataactctaggtcacatggttgcctcagaagcattcatgctcctgacctttgtaagaaggcattttaccccggaatgtagattctggagtgggctctggactgctggggcacaaaccatcctgggagatcagggtaaccctaaacgtttagagttagttaaggagagacatgccaaagggatctagttagaaccccttggaaactgacttgacttcttaaagatgccgtagtctggggccattttggagctagacatcctgagagggcttcattaggtcttttgttggctttctcctgtacaggtcactttcagctgacaaaccactggactgtcagtgtgtgccattagcctgtcacctggtggagaaacaactcatctccaagtgatgtcagtctcccagtagacccggacctctagtgcctgatgttcactttcttcaggtcctcaatttcctacatttaagctgttcggttaaacttttccatattcagcttgagatcaacctcctttacataactgattatttttgccttgaggagaaaagatgacgctaaacacagcacacatgtgtttattatatgttggtaatgtggaattcaaagatgaaagagacgtgagctgcatcactaaaaaagaaacatattacataaatgcaatgctgatatcatagataataaaattaacactaattttttgatattatcaattatgcagtccataatcagatttgttttgtgcttagaaatgactttttacagttggtttgttcaaatccagatcagataagtttcacacattaaatctgtttaaaaaccaatttttaaaacagacgactgttaaagggccacatggggaagctttatggaatcttccaacaattttgttgtcccagctacttgggaggctgaggcaggaggatcccttgagcccaggagttcaagactgggcaacacaaagaaaccccatcttttggctgggtgcggtggctcacacctgtaatcccagcactttgggagcccgaagcaggcggatcatgaggtcaggagttcaagaccagcttggccaacgtggtgaaaccccgtctccactaaaaaatacaaaaattagctggccatggtggcgtgcgtctgtaattccagctacttggaaggctgaggcagaagaatctcttgaatccaggaggtggaggttgcagtgagccgagatcacaccactgcactccagactgggtgacagagggagactccgtctcaaaaaaaaaaaaaaagaaagaaaccccatctcttaaaaaagaaagaaaaaatgaaaaaacatggccctggccacccagagctatcacattggacctggcgtttctgtagaacacttggtggcagagcaattgtgtggaagccagagcagctgccttctaaaataattggaaacaccgggtgtgcaggctgccccagggatggaatggaaggcctcaggcatttctgggctccttcagtgcagccagtgcagctcccgctgtcgcccagagcagcatcctctcttcggagcttctgtgatcattttcactttctgaaaactcatatgaaggccctaactctagataaatttactttttttcatttttagtaaaatagaacgattccttatcagtctcagaatgtcactttggtgatgaaaccatgtccaataagaataaatttctacattccattcaaactttgaaaaagtgcagcttaagaccattgttctttaagggcagtgtagagattactggtggtttggggggagctctaggttgtccatggacttatggccttttttgtaaatttttatgcgtagtaacaattatgtcaaccttgagaaaaactagtgattacatcacattcttcctgccttaattgggtggtgggccagccttaggccacagactgaagaggattggttctgagcttcactcaaagatcttttcccctcacctaaagtgagttgtaatttgatttaactgagtcagaattcttggagccttttggagagttcacataaaatatccatttttacagagattggcttgagctctggggaagacttttggacataccaaagtacatacttcgaagccactctggtctttgacttttaccttttgagctgttacgaccaaaggcctcaggattgaggtatttaggcatgcaaacccttcagggaactgaaaatcagatttactgacgggtttacagctgcctgtcacaggctggtgtttcctatttgtgatgcactgggttcctgtggttggggataaaaaaacctgctattgttgcagctagagggtgtttccccctcaaagccctcactgcccctgccgcccacctgcacccctgcccagtgtcctcattctgtcttcttccgtccttgtagtatctaccaaaacctacacaaagggggttggagccagtcatctaaattacaatgtggtcaaatggtgaagtgttgcttgaaatgttgacttttccgggattaatcatcatcttaaagagaaaataatctcagtattcaacttgatttcataaatatctacagagttcctattaagtgccagtgccagacattagactaggcactcaaagtgtcctttttcatagaagcttaaaaaagatttgagagcccatatgctcaggtttgcctagtctttcctaaacaatgtctatatattgggccagatcctgcaggtacaaaggtgtctaaaacagtctctgtccaccagatgccctagactggtgctgatataaagcaaagcagaatgaacagaatgttaaagatacaaatagtgtggtatgtgagtccgaagaaagagtcattagttaggatgcatttacagaaggcttcaaagaggaaggggtttctaaaactaggccttgaataatgaggagaaattgcgatagatttggataagcacatttcagagatggaagcagtcctgggagatgaagctggaaaggaagtttagtgcctaataatagaatatcttcaatgctttgcttaattaatttgtcaaatatttattgagtgcttactatgtggcaggcactattttaggtactggggatatagcagagaacaaaccagatagcaagtaagatccttactctcgttctagtagcagactgtctagaatatctagacggccataagttctgtggctaaaaatcaggctaaggagaagatggcctacctgtatttctggaaaaatatttctgtgtttctggaagaataacttgagaggctgtgtgataggaagataggggatggggtagagggagattatttaggaggctgtaatgaaggtccagatgagagaagataaggcagtgctgatagaagtttaaaggagggaatagatgtgttaggcactggtcagattagacagcagtgggagatgaaaaaggtgcagaaattgagaatgtgaatttggaagtatcttagataaatggtgtcatataccagcattaaagaatttaacaataggtttgagagagaaggaacagttaacagtgaatttgtgatgagctagctgcttgacagctgagaagcaattggaaatttctcttgcgctcaggtgagaagtgagaacttgaagccatgtatttgggacttaggataaaggcattaggatgtagatagtctaaattcatctttctttcctgagtctgtgcagcttttgtgtgaatttcttaggctttgtaccttaggccatttgcacttttaagtgtgattgaggctttggcttttccctgatctcgcttaagagagaaaaaaaatgatgaacactgatgtgaaaatgtaatagattggatgtgccttatgacaaaatatgctaattcatacatttctgtggtgctttaaagcaatcgtcctcacctttcctaatagccaatgatgtagacagttggaaattgagttacaagtaaatgaaacgtcatgcaggttccgcacgctgttgaatcaccggcagatctcagcagtcattgtagtactcaatgcatcattctgtttatctacatctttttcttttctttttttctctgagacagggtctcactctgtcacccaggctgcagtgctgtggtatgctcatggctcactgcagcctcaacctcctgggttcaagcaatccacccacctcagccttccaagtagctgggactacaggcatacaccaccacgcctggctaatttgtgtatatttggaagacagggtttcgccatgttgcccaggcttatttacatccttttacactttttgtctaagcagttttgtgagtcacccccctttttcagtaagaagcccccattttagtattttctacaaagctcaaagacataaatatgctggtgtcaaattaaggtgaagtcgttggagctatctaaaaataaaattattgaactttatgacgaatttgaggtttagtgctttgaacttgaaagttgtcattagtagaaaatagttgtcagatggctcacttagtctatatattaatatgctcacacagcacttatgtgttcatggggtgtatggtacttgggagaagaccaagaatagggctgggcaagccttttgtaggcacattgggaacctctgctttatttcaccttagcccagtaatgtagtacattggtttctcggctttcttgatggggatcacctttattataactttcatttgaaattagctctgtagtttccagaatgccattaaggtcatatttggaattttattcaattctcatggcaaatctttatggttgagtataatactaccattttacatttgaggaaactggaatattccccctaggtcagtatttccttcacagcatgtcatgatattgtaggacattaaacagacgttataagtgggttgtttccaggacagaataagttctccagagaaactggagttatcctaaaataaaaatagtgggctaatttcaggtgaattctgggttttgaggatgttattttagaaaatacctttttggctttttgttactttcttaagtatatctgatcttttatatttttcatcttaagaataatagttggaaacaatcaagaaagtttagcaggcaaaaagatgactattttcaactttcctatggctactttgtttttttacttttttttttttttaacttcgttttactttcctatagctactttgttttttactttgtttttattttttagcagggaaaaagatgactatttccaactttcctatagctactttgttttctccaacagtttcttttctgcattttggcacattggccatttatttggagaagaagtggtgagaaaagatgaatacctaaaagattgtttttgttattaaaaatgttttttggctggatatggtggttcatgcttctaatcccagcacttggggaggctgaggtgggaggatagcttgagcccatgagttcaagaccagcctgggcaacatagggagacccctgtctctacaaagggtttttaaaaactagctgggtgtgctggtgtgagcctgtagtcccagctacttgagaggctaaggtgggaggatcgcttaaggccaggagcttgaggctgcagtgagctatgattgctccattgcactccagtctgggtgacacagcaagaccctgtctcaaaaaaaaaattgtattttacaaagtctcaaacacacacacaaatagaataacacaatgaaccacatatatccattgctgagattcaacagttttcagatactgccacgtttgccttgtctctccctttatttataatgtaaatctcagacttgcctactatacctgtgatatgtcagcttgcatcactaaaaaggaaacacattacataaatgcagtgctgatgtcataactaataaaattaacactaattctttgatattatcaattatgcagtccataatcagacttcttttgttcttagaaacgactttttacagttggtttgttcaaatccagatcagataagtttcacacattaaatttggttaaagaccaatttttaaaacagatgactgttaaagagccacatggggaatcttttgttgaatcttccaacaattttactttctgttccctgtaacactccttttttccctttcatttcaaaccggttttttctttttgtcggtggcggggaggagatggggtaggggggcagagaagagaattccaaacttggcatattacaattaagaaagtaaaagtttgttttagaaataaatagttgaaataccaacttagagatttgctggatcatataattagagtagtccaaagaggatcttaggaattccctttcacactcagctgtatagaattctcctgaatcactaaaaataatgcgagaatcattttgagtatgaggcactgctgtatataactaggataattttgcctgagatgttccaactaagtattttgatcaaactttatagtggaaatggtagagcatggccataaaaattgttttccctaggttttgcttaatcttggtttaaaccagatttactagtttccaggataaactgagaaatttatattagacttttacacaatttcctagacttatctagagaggtatactaattacttttgtattaaagagattgctgaatcttttgaatattgcagaggaattgatcttgtcaatattttattttttgaaaaagatcatagagtaatatgaaactctttgtatgacattggcattctaatttggttttaaaaaaatgcagtttatcagaagtccccatatggtgcttaatcagacgttatagacagaaaagatggaatcctgtttcagaaccagcatgcatagttgtgcagattgtatactgtaccatgcattagttgaggcattcatgcaagagtcaacttgtgtattaggacagtttctggctgatggcagtaaagtgtctggaggaaggagcagctatttctgtttttacaaagactttgtaggggctagcagtagtactgtggcctatattttcagtttctatttacaaatgagtacttgttgaagtgattgagaagaatgtgtacatgatatctcattttatgtgatattactgcatactgtagcactcacttattggcaacctcagttatctgtaacagagtccacagccaaaataaagtaaaactgggccagtgaagtgaaaataaattgtacagtttatgaacatcatattttacattaaaagagtctgttaattctatatatgcagctctagcccatttatctgttttccagtgcaataatttaaaagcagcaagtagaggggaggagactgctagaattaaatagctggcagaagcagtgagtgagagctgacatccaggtgaccaatggtagagaaagaaaatttaggaaaggtagacataagagcccaaacaaacacaaaactaccatagattggtttcaggttaatagatgaagatgcatttctagctcagaagtatcaggggagagtactgttttgctgcaaaatgtagtcaatgatattcttaatactgatcctgagtcatcacaaaatgttaaatgagatatacaaaatcctctttaatgaaagaagtttgtaatatattttaaaaagctttttctcaactaaaatttcaaatactgtggatgcttaaagagatttgaaggcctgggtagcatctacttaatgaagtgtgctgcttagatatctttgttacctatcgatttctcctatgtggaacattactttttctaaagatgccagataaattatgtttttgtggtctgatcacatttaggaatcttggtttctaaaaaaggggcttggggtaagtaagaatatgaaaataaggcctggcgtggtagcacacacctataatcccagctctatggggaggctgaggtgggaagatcacttgaggccaggagatagagaccagactgggcaacatagtgagaccaaaataaaagtgaaacaaatagctgggcatggtggcacatacctgtcatccttgttacccaggaggctgaggtgggaagattgcttgagcccaagagtttgaggttacagtaagctacaatcgcaccactatactctagcctgggcaacagagtgagaccatctcttaaaaaaaaatttgctacagattttccgtttgtagtatctaacatatagtaaacactcaaatatttgttgtcttttgaggtacttaattcttgcttaaaaaaaaaaaagtagcttatctgacctaaaattttaacatgtgaaaatttgtggttgaaaaatctctgggctgggtggggtggctcatgcctgtaatcccagcattttgggaggctgaggcaggaggatcatttgaggcatggggtatgagaccagcttgggcaacatagcaagactccgtctccactaaataaaaaaagaaattacccaggcgtggtggcgggtgactatagtcccagctactcaggaggatgaggtgggaggatcacttgggcccaggattgaggctgcagtgagtaatgtacatgtcactgcactccagcctggacgacagagtgagaccctgtctcaaaaaaataataataatctcttgacttgtaaaaatattatattttatattgaattataggctgaagactttaagtgacaagtcaagagaagcaaaagtgaaaagcaaacccaggtaagcttgtgctaagattttaacttaactgtgacttaaatttcatacaacttttggtgtattcacaattgtgtagttatattaatgaaccttagatttgttgagtgcatctgactacaaaataatttatcgattctttctaaattttgtaacaggaaaattttctaataaaatcgtgaaatggttgaaaaaatggtgaagtataattgttttactctgacagtcaatgagtattatttgatcacaattagtcatttttaatttgtataagagcaaaagtaaaagtcctgaattattgaaaagcaaattaatgatgaaatactacttggcaaatgagcctcttcagctatgttacctgttttgtatgaaaacaccaggattgtgctgtttgtccatttttttaataaagtaaagcatgtgaccagatttcattttcaacctagaaatgaactgtgatcttacatatttgttcttatccaacattatattaaataatttattgtatgctgaagagaatctctggggcaaaatgatggttgatagtgtgttacatacagtacattaactctgaaataaaacacatttctctaaaagtttaataattgtcattagtgattttaaaatatattacaattgacaatgtcaaaattcttgtatgtacctttttttttttttcagttggctaaatcaagaacagttttaataagtgtttcttttgggcaggactgttccatttttgccaaagtactctgctggattagaattacttagcaggtaagtgtttcatttgtagaggaaggttatacttctgacttttttactgaccaaaaatatcttttaattttgtaggttaaaagccttaaaacagctaaattttatcttaatgcagtgattggaaattatttatgtattattttccttgagggctttcacttttcactcattagtacaaagtccattcaaactttgagcagacagatcactattgtatttacaagtcaatactttatgataatatgtacggcttctttattacaagaaaattgattctggatttgagtccccaataattttgtttttttgctttgattcttatgtcatttcttttccaatccattcttttattgacatggagtttaatattaaaatgtatggtctttttagatataacatcaaaagcacaaacaacaagataaaaattagacacaatggacttggtcaaaatcaaatacttttgtgtgtcagagaacaccatcaagatagtggagtgacaaaacatagaatgtgagaaaatatttgcagatcatatatatgaggaacaacatgtatccagaatatataaagaacttttaaaacttaacaataaaaagacaaccccatgaagaaataggcaaaagagttgaatagacatttctcaaaagaagatatgcaaacgaccgataagcacatgaaaagatgctcaacgttgtcagtcttcagggaaacgcaaatcaaaaccacaatgaggccggtcgcggtggctcatacctataatcccagcactttgggaggctgaggcaggcagatcacttgaggtcaggagtttgagaccagcctggccaacttggtgaaaccctgtctcttactaaaaatacaaaaattagctgggcctggtggtgcatgcctgcaatcctagctactcggggctgaggcaggaaaatcactggagtgcaatggtgcgatctcggcaggggttgcggtgagccgagatcgtgccagtgcactccagcctgggcaacaagagcgaaactccatctcaaaaaataaataaataaatacagtatatggttaaagtatgtcattatacatatttctgtgcttactaatgtgccatttgacagatgtgtggtaaagatgtatgtgggagagggtatgctgcttttccttatctgtatttgttatgacacaatcactgatacctacattttcctttctcctttctagttcttcattaggtttctttttatggttgctaaatctagagatttttcttctctgaagtgaaaagtgcttaatatgatatttgcttcctttgttttgttgtgtgaagaacagaaatgaacatgaaaggaagtgtagtacaaattaatcagtaatgtattgtttactatttacattttatctttattttttctctagaaacttagttgaaataacttcattttactgaaaaatttatgttagagctatcaactttttgtgtggtacattttttggggatagggttgcattttaggagttaatatagaaaatttacatccgtaagacggtgtcaataatgtgtttatacatcgcactgaaacagtcttttcccattggaactaaaattgaatgtgagaaagaccattttaaatagcaaatgtttaaatcatatttttaattttaaaaatgtaatatacatagcataaaatgtatcttaaccattcttaagcttagtagtgctgagtacgttcacatggttgtgcatccaatcccaaaaactcttttcatcttgcaaaatggaaactctgtacctgttaaccaacaactctcatttctactccctcctctccatcccaggcaaccatcattctatttgctttctctgtgaatttgactattctaggaacatcatataagtgcaattataaagtacttttgtgtgtgaccggcttatttcatttagcataatgttttcaaagtttatgttgcagcatgtgtcagaattttctttctttgaaaagctgaatattctattgtaagtatgtaccatattttgtttattcatctgttgatggacacttgagttgcttccactttttggctgttctaaatactgcttgctgctaggaacatgagtgacaagtacctttttgacaccttgctttcagttcctttgggtatatacccagcagtagaattactggatcatacggtaattctgtgttttattctttctggaaacaccatactgttttccatagtgactgtatcattttactttcccatcagtattgtataaaggttctaatttcttcctatcctcaccaacgctcgctattttcttgttttttattatagctactctaatgagtatgaggattttcccctgtgttttcttctaagagtttttcttgtcaagattgttttggctgttgaaggtcatttgagatttcatatgaattttaagatgtattttctattgtttgcaaagaatgtcattggggttttgattgggattaaattgaatctggtcattttgcttattacagataacaatgttaagtattccaatccattaacatggagtgctttttctatttattgatgtcttctttaatttctttcagtattgtttagtagttttcattgtatgagtctttcatcatctttgttaattcctaagtattttttgatgctatcatttatgaaattgttttcttaattgctttttttgaattatttattggtagtatatagaaacaactgacttaattgttgtgtgttgatttaatatcatactttgctgagttcctttatcctgatagttttttgtgtggaactttcagggttttctgcatataagatcatatcatttatgaatagaaatcattttgcttcattcattccaatttgaataccttttatttcttttttcttgcctaattgctctggctagaccatccagtactgtgttgaatcgaagtggaaaaagcaggcatccttgtcttgttccttgtcttgatcctgatcttacaggaaaagctttcagtctttcaacattgagtataatgtcaactatgaatttttattatgttgagattgttcccttctactttagtgtttttatcatgaaaggatgttgaattttgtcaaataacttttctccatgaattaggatgaccatgtgttttttcctttcgttctaccaatctgtcatattattacattgacagattttcatatgttgagccattcttgcattccaggaataaatccctcttggaaattgtgtataatgcttttaacacagtgcagaatttagtttgccagtattttgttgaggatttttgcattagtattcataaggggtattggtctgtagtttccttttcttgtatgcctttggctttggtatcagggtaatgctggcttgtagaatgagttaggatttattccttcctcttcattttctttttaaaaagattttgagaatggtcaatgttggttcttttttaaatgtttggtagaattcaccagtgaagcaatcaagtccagggtatttcatcttgaggttttttattactgattcagtttcccatttcttcaggattcagtcttggtatgttttgtgtttgtgggaatttgtccacttcagctaggttatacagtttgttagcatacattgttcatagcactctctcataatcctttttatttctgtaagattcgtagtaatagtcccacttcattatggttttagtaacttgagtctttttttttttcttagtcaatctaggtaaacatttgttaattttgataatttaaattggtttatcttcaatcatgttgattctttcttctcaaatgtgcttttgaactcctccagtgaattattcatttcagttattatacttttaatctccagaatttcttattggttcctttctgttttatatctaccattggtagatataaacggtagtggtattgatgttaccattttgttcatgtatcatttttcacatctgactggcatgagattgtatgtatctcatttggttttaatttgcattgctctgatgattagtgatgctgagcatttttttcatctttgttggcttcttatatgtcttcatttgagaagagtctattcatatcctttgctcactttttaatggggttgttttttcttgttcatttgtttaagttccttatagattctggatattagtcttttgatggatgcatagtttgcaaaaactttctctcattctgtaggttgtctgtttattgtgttgtttcttttgctacgcagaagctctttagtttaagtcccatttgtcattttttgtcacaattgtttttgatgtcttagtcataaattatttgcttaggccagtgcccaaaagggtttttttctaggttttcttctagggtttttatagtttgaggtcttacatgtaagtctttaatcttgagctaatttttgtatatggtaagaggtaggggtccagttttgttcatccataaatggctagccagttttcctcgcaccatttattgaatagggtgtcctttccccattgtttatttttgttgacgttgctgaagatcagttagttgtagctgtgtgactttatttctggattctctatcctgttccattgatctgtgtgtctatttttatactagtactatgatgttttggttactgtagccttgtagtatggtttgaagtcaggtaatgtgatgcttctagatttgttctttttgctttggattgctttggctattcaggctctttttttgattccatatgaattttagattttttttttctgattttggggaaaatggcattggtaatttgatgggaattgcactgaatctgtagattgctttgggcaatgtggttattttaatgttattgattcttctaatccatgagcatggaatgtttttccattcgtgtcatctatgatttctttcatcagtgttttacagttctctttgtagagatctttcacttccttggttatatatactaggtattgtatatgtgtgtgtgtgtgtgtgtgtgtgtgtgtctattgtaaatgagattgagttcttgatttggttctcagattgaatgttgttggtgtataaaaatgctgcagattttatttttatttattttttaatttttattttttagtttctcaaatgagttgatgctgtggagttttgtacattgcttttgtatgttgaaaagttactgaagttgtttatcaggtctatgagtcttttggaggattctttagggttttctgggtatgtaatcatgttgtcagcaaacagagataattaatttgtcttcatcttttcctatttgggtaccttatatttctttctcatgcttgattgctccagctaggacttccagtattatgttgaataggagtggtgagagtggacatccttgtcttgttccagttcttagggagaatgctttcaactattgcccattcagtattgtgttgactgtgggtttgtcatatatggctcttagtattttcaggtatgttcctttgatgccttgtttgttgaggattttcgttatgaagggatattgaattttatcgaatgccttttctgtgtcttttgagaagattatgttatttttgcttttaactctgtttatgtggtaaatcacattcattgatttgtgtttgttgaaccgtccttgcatccaagggttaaacccacttgatcatggtgaactatctctttgatgtgctgttggatttagtttgatagcattttgttgaggatttttgtgtctatgtttatcagtaatgttgacctgtagttttctttttttgttatgtcattgctaggttttggaatcaggataatactagttgcatagaatgaggtgaaggagaaatctcctctcttcaattttttggaatagtttcagtaagattggtaccagttctttgtacatctggtggaatttagctgtaaatccatctggtctagggctttttttggttggtagattttttttattattattattactgattgaatttcgtaacttgttattggtctgttcagaatttcaatttctttctggttcagtctggaaggtgatgtgtttctaggaattaatccatttcctctaggtcttctaatttgtgcacatagagatgttcttagtagtctctgatgatcttttgtctttctgtggtgtcagttatgatgtcacttttgtcatttctgatagtgcttatttgaatctcttttctttttttcttggttaatctagccagcagtctgtcaatcttgtttatcttttcaaatatctaactttttgtgttgttgatactttgtatggtttttttttggtctcaatttcatttagttctgctctgatcataattatttcttctgttagctttgggtttagtttgttcttgcctttctagttcttaaaagtgtggtgttaagttgttaatttgagatctttgtgtgttttggtgtagtcatggagcactgtaaattttcttcttaatactgctttttctgtatctcagaggttttggtatgttgtgtctttattttcatttgattcaattaatttttttttatctctgccttaatttcattgtttacccaaaagtcattcaggagcaggttgtttagtttccatatacttgtgtgattcttagggttcctcttggtatttattttgattttattccactgtggtctgagaagatgcttgatatgattttgattgttttgaatttattgagacctgctttatgattgagcatgtggtcaattttagagactgttcgatgcacagatgagaagaatgtatattctgtggtagttaggtggagtatcctgtagatgtccattaggtccattaggttgagagtctaatttatgtccaaacctttgttagttttgtgccatgatctgtctagtgctgctggtggggtgttgaagtcccccactgttattttatggctatctctctttttcggttctagtagtagtttctaaatctgggtcttgtgatgttgggtacatatatatttaggatacgatatcttcttattgaattgagctctttatcattatgttgtacccttctttgtctttttttttttttttaactgttcttggtttaaagtttgttttatctgatacaagagtagcaacctctgttctcttttggtttccatttgcatgaaagatctttctccatccctttattttgagcctatgggtgtcattacatgtgagataggtctcttgaaggtagcagaggttgggtcttgtttttttaatccaacttgccactgtgtatcttttaagtggaggatttaggctgtttcctttcaaggttaatattgatatgtgaagttttattcctttgatagtgttgttagctagttgctttgtggtctttattgtgcgattgctttatagggtctgagttttgtacttatgtgtgcttttatggtagcaggtatcattctttcatttccatgtttagaactcctttgagcatttcctgtaggtccagtctgatggtgataaattccctttgtgtttgcttgtctgggaaagatttcatttcttctttgtttatgaagcttagatgaacaggatataaaattcttggccagcaattttttttttaaggaggctaaaaataggcccccagtctcttctgactgtaaagcttcggctgagaagtccactgttagcctgatgggttttcctctatgggtaatttggcccttttctctagctgcctttatgatttttgctttcatgttgaccttagtctgatgactgtttgtctcggggatgtcatcttatatggtatctctcaggagtctctgaatttcttgattctagatttcagcttctctagcaagattggagaaattttcctggattattccctcaaatatgttttccaagttccttactttttcttctctcaggaatgctagtaagtgaaaggtttgtttgctttacataatcccatatttcttgaaggctttgttcattttttaaaaattcagttttctttatttttgtctgacttggttaatttgaatgactggtctacaagctctgtaattcttctgctttgtctagcctattaactatattttaaaattcctttagtaaattttagaattcaagcagttctatttgtttctctcgtaatatagctatcttgtctatcatgtgctgaatcagttttctggtttctttgtattggatttcaacttttttcctggatcttgttgagtttagttgcaatacgtattttttattctttattggtcatcctatacatttcagtttggttaggatccattgctagagagctaatgtgatcctttgagatgccagaacaccctggctttttgtactgccagagttcttgcattgattccttctcatttgaggaagctgtctctttttattttgaatttgccatcatttggatgtgacttttttttccttaagggtatggctgtggtatatgttgtgtattatcatttgcctttgtttctgggtgcttccacagagccaaatgctatatggggtccttggttatggatagcttctgtgtagtgactttctcagatgctgcttactgtagtgatgtattggctctaagaactgacacctaacaccttgtctcctgtggagctgagggtgtggagatcccagggggctcatcttgtggactgcctagcactaagcccttttttagcagatttttatttggtgatgcagttcaggctgcagtccagtagatggcatttaagagtaagagccggcaggtaggctggcgttgggtggaagcacctgccctgagtgggcaggggatggtggcgggaagagatcctgtggggtgtgctgaggtcttgggggagaaggtgggtgggtacacccactcctcattctgtgctggcaggaacgtgatccacttcctatcatgcccctgtcacaaggctcccaaccttcatttcataaagattttgtcctttggttcctggctgcgggttgcgggtacactcctctgagggctgccaccaaaatgggctcagggagagtctcttcctccagatgggagcagacaactctgcaacttgtcttcccttgctggggtgttgctgctctgtgtagggaaggggagttgggccctacccttcctgaaagcttgagctgtgcagggctcactttcagtagaggtggagccgctacaagatgcatgaaatacgctgtgtgtccgagtgcatgtgctggcccctggcagagagaacactgctgcatcagcaacagtgtagggggatgcaggagatgaccccttccccacatccattcctgggtaatgatacttcctcttgtagcagttggcactgtgcctgcatttcctttgtcccaaggtgtgcttttgatgggctgcactctcttccacttagggatggcccacgcagggggttagatctccagagatctcacagttacctggggaactgctggttccctgtgcttgccaaagttagagtggtctgtgaggtgtgtttgcagggaatctggtggtgtggtgactcaagggcagagaatccctgggcagggcagcatcccactgctggcgcacgacaagtatggtatctggcacctgagaggagtgtggacacgcatgtacacacgagttggccaccagattctccagccccaggaggttttcaagtcaccatcaatagtattgctttgggtcacaagggcagaggagcactctccaacagtttgatggtcaggagattgttggaggggtaaggggagcagagaactactcccacctaccctttccacagggctccaaggtccttgagggtcaatctctgccagagtcttgctgctttccttttctgcaccccagcttcttcccttgggcactctgacaggtcctggctcccttccctcagttttctgtctagaatttgtccactcaccagtaactttgatctattttttgagaaaaactggcttttgatattcctagtaagccatcttgggacaaaaacaaaaacaaaaacacgcacacacaccacaaaacaaaaaacaattgcatctgttattgaatgtcctagtctttaagtgtctggctctccaagagggaaaggggaacaaagaaaggggacaaaaccagacgctggccttttaaatcctctgaaaattgctagccatagcaggaggggtttgcaacagtagctgcctctgtgtctgcatctccctgattagaagcagcaattgtgatcagagcacagactccctgatgtttggagcacagggtccttattggcccaccttgactttcataagccgtgtacaagctacttcaggaacaagtgcatggctacctgtccaggggttggggtggtggatgggtagctgtcattgtgctaaaacctgaagtcgactgaaatgaacctcagtttaccctccaaaccttcccctggaagctgcaagcctttaatagattctagagtcccaaaatagttacatcagacagattctgccaatgtgattgtggtctaggtagggtgacagattctagatgcctcttactctgacatcttctctctatttcctaaatcataatgtttcaaagagtgtagtacaacacagtctacagttactttcctatattcctatagctctaatgctatataattagtcctttcctttgtctaccaagtaaggtaattatttacctgtgtgttcatcttcctaactgtattgtgaacacttccactagtcttcccatggtatacatagaatatattcaataacgatttgaatgcaagaattacacattatgaatgtggcttcttcatttcatcatcattgacttgtgatttttaaagacgtttgagtttgaacacagaaaaattgaaggagtttacatccagtgtctttatctcagtaaaatggagtaagttcatccatctgttgaaagtgattggatggggatgagtttcaaggcggcatgagatgtgtaatacctgctgtgtgtacttcagggaacaatctaatagcaataaattttttttaagtgctgattggcagctaaggcccatgcgaggttggatagcatacattgtaatggatttagtgcctttctccaaactgcttcatgtcgtaaaagtagagcagagaatatgaatggttgcgatagtctaggtttagagaatgctgaaaacagtaggaaaatcatgaatgaactaggtgctgaactaggaaagtagaaatgagggagggtgatgtataatggcaaggtggatgtgaaaagcatacataataacggggagaaaaggaaatggtgagatgttaggaaaagtgatctggagtctaaatttggcaagtgaggattaattttctctttcccactgagttaagaaaatgatagaaaattttaccacgaagtcctgaattttcaatttataattagtctatttcctcactcaacagacatttaatgtgtctcttgtttgttaggttctgtgctaactaccaggataacaaagatgcaaaagtaaaatttatatctcagcagttctggtgcctaacagtgcttagcatttagtaaatacttgttgattttaattgatgcttacataatctgatacatccaagaaaattttctagctttctgttagtcaacaatgacagcaggactgtattatttgtgtgaccttccaccttaattttcatcacatgtggactctagtatcacctggattattcagattgattttcttacttaaattcagtagaaaaattgtgaatctgactatgaggggaggcagtatgaactcattaaatatgtattcctgtttggagaaatattcgctggatagctagaattttagattgggaaatcaggttttacatcagcaatcaaatgaatagtagtttagaagttttattttttaacttctcattttgaaataatttcagatttacaaaaaaattgcaaaaatagaacaagcaatttcagctttcccagtgttagcatttcatataaccacagtacaatgatcaaaccagaaaattaacattagtaaataccttaatccataggccttattcagattccatcaattattccaccagtgtccttttttctgtactaggatccaatccaggatcacacatcatatttagtcacaatgtctcccttaccttctttaacattgaacaattctttagtctttgtctttcatgacctcagtactttcgaagagtactggccaaggctgggcatcgtggctcatgtctgtaatttcagcactttgggaggctgaggtgggtggatcacttgagtccaagaggttgaggctgcagtgagctgtgatcacaccactccagcccgcgtgacagagtgagaccctgtctcaaaaaaaaaaaaaaaaagtactggccaattatgtttcaaaatgtctatgaatttggatttttctatttccttgtaattaactgtaagttagtacttttttggtaagaataccagaagagtaatgttatatccttcccagtgcatcacatcaggaggcacataatgttgatgtgtctcattactgttgacattaattttgatcactttattaaggatgtgtctgccaggtttgtcctcagttaacactgttttctcacttttagttaatgattatccaatgggcagatactttgaggctgtgtaaatatcctgtttctttttgtgcttttacccactagttgtatcatccattaaaattctttttaaaacaattattactattgtgtttaccaattggagattttttttctcatcatttcttttaaaattactaattggggccaggcacagtggctcatgcctgtaatcccagcactttgggaggccgaggtgggtggatcaggagttcgagaccagcctggccaatgtggtgaaaccccatctctactaaaaatacaaaaattagcagggcgtggtggcacacacctgtaatcccagctactcgggaggctgagacaggagacttgcttgaacttgggaggtggaggttgcagtgagtcgagatcgcaccactgcactccagcctgggtgacagagtgaaactccatctcaaaaaaaaaaaattactaattggatttctattataaggaagagtttttctcttctctctcattgatttatttattcaattatttacatcaccatggactcagggatattgtattctttgagttataatctgttactaccattatgtattttgttgctcaaattgtcacagatttggccactggaagctctgtcaagttgacgtctgtgtccttgcaacatgtccccattattttttgagtgtttcctttctagcaccacaggatattccacattcatctttagatagtatttccttttaatgtgtggtttgcatttcaaattattttttgcttttttttaggtatgaggatacatgggctgcacttcacagaagagccaaagactgtgcaagtgctggagaggtaaagaattgactaatcttatactcgtggcaaactttcctttttcagtgctaaatggtattttttaaaaattgaatttataattgtttgtgtcaaaatgttttgcaggatatctgaaattgaatctagtcgttgattatgaaactccctgaataaagcacctttttatcatttctctgtcaagtaatttagtttagttgagcaagagagtttataacttttattctaaggacaggtaaatacttgttttatgtagatataatgctctgaattttagtctgatgaatttgcaatatatgtaaattataagacatctctttataccctatataagacatctctttctacactatttaagaattccttattatttggtcaaaaaaacttaactttgctcagtctatccaaaattattaatttgcctaacaaataaatacaaaaatttcaggggtcatcctcagttcacttagaagaacaaagtatttttaagcactagtgtcttgtaatttaaatgacttggtaaatgtacatagccaaaatcgaatactctcctcaatgttgttgatgtcaatcaaaccttatttttttctgaaatgatttctgtaattctgactttaaataaatttagactgattttctttaccatttacctaaattaatgaagctgtaatagttatatacaacacaggaatatatatgatgaaatgtagacactagcatttctcttagaacttactgataagaagaaaatgtaggtttctggtagtaaggcagaatagatactttgaaaagccctacagctataaaacacttaaatgttggatatattttttaaaagttctttaagatacattaagcccacaaaaattaagggaaacataaagggccaacaacaacaacaacacaacaaaacagaacagggaactgaaatcagagtcattaaaacaaaacaaaacaaaacatggaagtcgggatcaaaatactaaaacaaaagctttggagatttgtgggaataggagactttgtctgtggggatctgaatctgagacttttgataaagctctttggactttgaggtggctacatccccctggtgaaagcttaagctagggggaaaaaaaatgtacctgttggctaaaggagtcaacaaggaaacctgtctggcttcctaagaagttggcatagcctcgtttcttgatttgttaccatggtattggcctcataggagtatggggttctaagttatatttcctgcctgatcaaagaacctctaagttaagaaatgaaagagttggctgggcacggtggctcacacctgtaatcccagcactttgggaggccaaggtgggtggattacctgaggtcgggagtttgagactagcctggccaacatggtgaaaccccatctctaataaaaatacaaaaattagctgggcgtggtggctcatgcctgtaatcccaactactcgggaggctgaggcagaagaatcgcttcaacctgggaggcggaggttacggtgagccaagattgcaccattgcactccagcctgggtgacagaaactctgtctcaaaaaaaaaaaaaaaggtgcaggtaatttgtgttctttgacacccaacaaaaacaaatgcaaattctccatggatgaaactgtctaaacctaggtccctcagatttccacagattaaatcaggctccctgtcctcaaaatgttagcaatcacacaagtaaaccaccaaaagtttgagtcaccagaaccaaagtgtgagatttagacccataaaggactgtagatactgcactattgaatattgactgttaaatagttatatataaaatctttcaagagataaaagatggacttaaacgtgagtaaggaagaaggcactatcaaatattttaaagtcattgaaattacaaacccaaaagatgtgcttaacagcaatttgaggcagctgaagaaatagtgaggtacaagagagagtcaaagagtacacagaaaggatctcagaaagaaaatggaaaatatgaaagaagaattgataggcagagaatacttataaaaggtctttaggttgaaccaggtgagattgccaatattcgatgaatttttatctgtaaaattgcagtttcatatgagttagcccaacatatccagtaaacctaaatagttctagaaagagcatgagggaaagacagtgtaggaaaaacatgtctgagaattttccataaatgagatatgtaaatcctcagatccagaaagtacaacaagcaagcaagataataatccattcctagacacctcatactggagctacagaacccagttaggctcggtggctcacacctgtaatcccagcatttggggaggctgaggcgggtggatcacctgaggtcaggagtttgagaccagcctggccaacatggtgaaaccccatctctattaaaaatacaaaaattagctgggcatggtggtgtgtgcctgtagtccaagctattcgggaggctgaggcaggagaatcgcttgaacctgggaggcagaggttgcaatgagccgagatcatgccactgcactccagcctgggcaacagcaagactgtctaaagcaacaacaacaaaaactacagaatcctaaaggagaggagaagatcttaactagagagaagatagatcacttataaatgaatgagttccacagcagacttttcaaactgttgtcaagaattagagtaaaagcaagacatactcagataaaaacatttttctatcagcaatcgtccaataaaagaacttctaaagaatgtaattcaggaaaaaaggaaactcattttagaagatgggtctgagatgtaggaaggaatagtgagcagagaaaatggtaaacatagataaatctaaacagtgggacatatatattagttatctaatttgtggggttaaaatgatagaagaataatgctagataacaaagcatgtaagatggaaggcagattatcagcgttcaagcattctaacacttccgtattatttgggggaaatgtattgatattgattaacctcacttttaaaagttaattatggagggcagaatttcaagggtaaccacatacaaaaaaaatagaaagtggttgggtgtggtggctcacacctgtaatcccagcactttgggaggccaaggcaggcagatcacttgaagtcaggagttcgagaccagcctgagcaacgtggtgaaatcctgtctctactgaaaatacaaaaaattagcctggtgtggtggcaggcacctgtaattccagctacttgggaggctgagacaggagaatcacttgaacctgggaggcagaggttgtaatgagctgagattgagccaccgcactctaggctgggtaacagagcaagactctgtttatcttctaaactagtagaaaaaaactagaacaatgagaaagaattcagtcaatgcaaaagatgacaagaaaccagaggaaaatgcataacagtagaataaacagaataagatggtaaatgtgaatatatctgcagcctcaatatttttaaatgattaatctagattaatctaaagggcatattttgaaagacgaggaaaagtctattaatagtttataagttactgacaagagaaacacctagaacataggacacagaaagattgaatgtatgggcatacctcagaaatattgtcaatttggttccagaccactgcaataaagccaatattgccagaaagcaagtcacacaaattttttagtttcttagtgcatataaaagttatgtttatactataccattgtctattaagtatgtctaaaaaagcaatgtaataccttaaataaaaaatactgtattgcttaaaaaatgctgacaattgcctgagccttcagtgaatcataaccttttttctggttgagagttttgtttgtttttttttaatgtttatagctgccgactgatcagggtggtggttactgaaggttggggtggttgtggcaatttcttgaataagacagcgatgaagtttgctgcatctattgactcttcctttcacaaaagattcctctgtagcatgcaatgctgtttgatagcattttacccatagtagaacttctttcaaaattggagtcaatcaactcctcatccattcatgcttgatcatgagattgtggcaattcagtcacatcttcaagctccacttctaattcgagttctcttgctatttttaccgcatttggagttacttctgaagccttgaacccctcaaagccatccatgagggttggaatcaatttcttccaaactcctgttaatgttggtattttgatttcctcccatgagtcatgaatgttgtgtgatggcatctagaatagtgtattctttccaggagattttcaatttagtttgctcagatcaattgaaggaacttctatctatggcagctataaccttataaaatgtgtttcttaaacaataacacttaaaagttgatatgactccttaattcacaggctacagaatggatgttgcattagtgggcatgaaaacaatgttaattaacagttgcttgtgtgcagtaacttggcgtctccatgctggacacatataagccatgcatattagctgtcgatactctgttcatacagcctcagtgtgtagacaatttaaatttctaacaattatgatgttctaacaattgtatttgaaatgcaattcgagaatctactcacacgttgttttaaaatgtgtatcaagcttaaatataaagttttcctatatatataaaacttgctattgatatttgcaaggcttatgaatattggataataaaaggcattctacctgggagacattcttcaatgtatgcctatggtggcaaaccaaatccagcaatgtataaaaaacaaaatacacttagtttattccagaattaaaaggttaacttgacattagaaaatcttttacatgcaattgactcttaagtattaaaagtgaaaatgatcgtcagatgcagaaaatacatttcataaaattaaatacctattcagggtaaaaagttttagcaaatttttaatggaagacagcttctttgtcctgatatctaccaaaaacctgcagtgtttgacttgcagtattttaatcccatattcggccatcttgctaaattctcttattctattactttgtatttgggggtgcgagttgttttgggtagatggtaagtttgtttctttccttctaagccatacaacttttaatttttcatgtttcttatactgggtagaaactctagtataatgttgaataaaaatagttgaagaccttgttcacattttggcttcattagatttaaatgtgaaaaggaaaactatacattttttggaaaatggtagaagagaatatgtttaagaccttagggtgggaaagatttcttaagtaagatataaaaagcaccagccataaataagtacattgataatttttgtcaaaactttttttaatcaaacaacaccgtgaaaaattaagtgatttataagacagaggctaagtgttcagaaaatatgaataacccctataaaccaataaaaagaggatgaaaataacctaggagaaaagtgagtaaaagatatcagcaggcatattgcagaagagaaaacaggaatggccagtacacagtaaaatatgttcaaccttgcttggtatcaaggaaatgcaaattgaaaccccaaattttcactcattagattaccaaaaatttaagaagcttgagctttctgtgcagatggtcattatttgcagatgacagttttgtttctttcctcggaagaaatgtgatgataaacaactagaacttgggagtataaattagaacaatcacgttagaaaaaatgagttggcattaagtagaagttaaagttgcacatgcctttcaagcaacaattctgcttctaggaatttttccagagcattacatccaacctgcaggggctggggagggggatctcattaccctaggccctgggcaatgaggagatggatatcttggacacatctgcaattcatttgtgaaacccttgcacatgtgcaccttgagatttgtaccagaatgtttgtagcaagcttggtttaatctttggacagttccgaagtccatctgcagggaaaagtgtggtattattcataaaataaataccgtatacagcagtgaaaattagtgaactactacacctatatgtatcaatatgtatgaatcccatgttaaatgaagactgtgtcctatagaggagctttaacaacaatcattcttttgattattagaagcattaacaatatatacaggagaaagaatttcctgtcagatgtgttattgaatttgtgctacctcaggatcttaaatttttgtataattggttattgtaaaacccacagctcatcaaaagtacttatgttgctttgcagaaacagtacccagccttaaaaatgaaagtttattttaaagccttctgtggtgtattattgagatatatgtaaatatttaaatgtatatctttagtatgcatagtattaaacttgtcattttgtaaatttattttgtcagaccgctcatgtgtctttggtgggctttaccagcataacctcctggggcaaatatacttttggacaattccatcttgtttaacaaattattttatactcatctactttaaagctaattattataactatatagtcttagaattcagagcaatagtttataaaacaagcaactgtgatcaaaggtaactttgttgtttaggcttgttttctttttttttgagacggagtctcgatctgtctccaggctggagtgcagtggtgcgatcttggctctctgcaacctctgcctcccaggttcaagcgattctcctgcctcagcctcccgagtagctgggactacaggcacatatgccaccatgcccagctaatttttgtatttttagtagagatggagtttcaccatgttggccaggatggtctcgatctctcaacctcatgatccgccagcctcagcctcccaaagtgctgggattacaggcgtgagccaccgcacccagcctgtctaggctttttctaaataagggtttcgattttttttctcctttagcagtgtattaaaaaaataccataaatagttaatacttagggcttaaactctgagggcagttttctaaagttagactttcagtgttttgcctctcctgttattgtgaaatattagcttgccttcaaattgaactttcaagattcatggttttgtttaacagtttgacattaagccagttgaatttgactgtttcactgtcagaaagtgaactgaacgtagtgttggaaatcctggtttctgctccttgctgcacaaatacctgttgaccttggg

SEQ ID NO: 932 - DNA, 32744 bp, Homo sapiens
  source 1..32744: mol_type = other DNA
actgcgcatgcgcagggggtggactgccaggtcggctcagggagccgtgacgagtccggaagcgcctgcgcgcgctcctccgtacgagaactagttttgttccgtgccctctggactggaaccttttggagagaacccccggcaggaccaaccccgcacccgccagcaccgcggcaatgtccagcaatagttttccttacaatgagcagtccggaggaggggaggcgacggagctgggtcaggaggcgacctcaaccatttccccctcgggggccttcggcctctttagcagcgatttgaagaagtgaggagaaaggtttgggttgcggggatgggagggaggagctgcggactcggaggagtgggcgccagggtgggcttcctggagaggagcggggtcgccctgaggtctgagcagggcagggcggtaacgtgtcccgcgggtgggtaggtggggttggttggcggtggtgggagttgtgggagtttggggcgaatgtgtgtaggggtctctagtagttttcaaactttagtgaaaaggaaaccacttggtgagcttagatcccacccctgaagacactgattgaattggacttgggctgggctcaggagtctgaattttgagcatcgtcttctagtttatttaccgttcgccggatcagactttaatacattccctgattagggtgaaaggagtgttttggtgaaggtgagagtgcgagtgttgcttgtgggaagttattttgtgaccccggagtgtaggagcagagaggtggatttaggctgtttgaatggacaaactggtttacaccagtattaatgttcttggattatgtcctttgcactacagacaaaaacaccaatccaaaataagcatatgaatagaaaatattttaaaagagtgttactgtgaacaaatccaaaacttttacagattaataatgtgaattttaaaaacgaatgttaaacaaggtacacttagttttgtaaaaagtatcaccgagaaatggaaagaaatcccaagttgtttgttttggggggtgggttggtggtagtggttacatttaccagaattatcatttttacatttctcttattttaaatctttcattactaagcaatagggtcacataatagtctgtcactaaattcatgctaaattaaggtagaatagctgtgctagtagctttgcagatctgttagagggtataattaaaatttaaattaaacgttactaacaatattgggtagtctagaaagtgctactacttcaaattgggattacattttggctgtattgaggatcaaaatcatatatatagcatgtaagatacaatcttttcctttttcccaaggttagaaaagtttaaaagtaaggtaactgatttcatttttcattatatgcatttgatgatccattgttctagaacaagtacggagcttgttgcctctactattagcaaaatgtttagactgaattaacctgtatatcggcatcaatctgtttcgcaaattaatttacttttatggtttgtgaacatctacgatgttttctcttagatttttgtcagatttggggccaggcactgcggctcacgcctgtaatcccagcactttgggagggtgaggtgggcggatcgcttgaggccaggagttcgagaccagcctggccaacatggtgaaaccccgtctctactaaaaatacaaaaattagccgggcgtggtggctcgtgcctgtaatcccagctactcgggaggctgaggcaggagaatcgcttgaacccgggaggcggaagctgcagtgagccgagatcgcgccacagcactcaaacgtgggcgacagagtgagactccgtctcaaaaaaagaaaaaaaagaaaaagatttttgtcaaatttggacctgatttggaaaaaaaaaacaaaaaaaacttacggctttgactctgtgaccagtgctcttgaggtgacctaacaggttggatttaaaataaaagtagctaattgattagaggtgatatgtaatatatgcaaataaccatggttgaattgtgttccccgaaagatatttattgagtatttgtgcacaccactttacatttattatctcattcagttttcctaaacaaccctgcaggttattaccaggtacttctctgctcccactttacacgtgaggaaattggagcaaggttgttaacttggaaaaggccacaaaggtagaacattgcactgcctgaatttgaactcaggggctctaatattagagcccattctctcaaaagtttagatgtgctacttactacttgatgaaatgtatggtatttttattagtgagtgcatacaactcacaaaaagtttaaaactttaaatagtagctccaagtagtaccaccagagaagcttccagggattagaaacatttggctattgacctgcagtctaatggaattgtacagaaacaaggagacccctgttctggaagtggtcattaaatctctcttgagtccacattttctcatttataaaaccgtaatattacttgccttttaaaaaatcgaatgacaaagtttatataaaaaacttaaagcttaccctattcctcacctctggtttttaatggtttactctgatgaaatagtttcaagtttacaaaaaagttgcaacaatgacacagagagctacccttttgcagatttaccaattaaaaaaaaaatgctacattgcttgcttactctctctgccactcactctccccatgcatattcaggcacatatacgtattcatgttattatgtcttctgaaccattggagactcagttgtacacatcatgttcttttacaatgaaaatcttaatgtgtaatttttaagaacaaagatattctcttacgcaactacagtgttgatgtattcaggaaattaatctaattttatcctttgttccaataaagtgttttttttcccaagcatttttttcctcaagtacagtttccagtccaagataatatatttaatttagttgccatgtctctttaatcttctttaatctgggatagttccttagccttttttgtctttcatgaatttgacatatctaaggattgcaaagcctattattttattttatgttaatcagtttttgggtttgctggtgtttcctcatgtttagattcaggttatgtatccttggctgggatactaccataggtgatgcatgcttcttgaactattacatttggaggcataggttgtccatcttcatgatgttaattttcctagtcacagggttgtccagtttctctgtggtgtcatttctgtttttttttttttttttttcaaattatctgtggggagacactgagaccatgcagatgtcttgctcttttttaaatggaccacttctacatttaacaaccattgatcaatctcctgaacctgtcttttccacaatggctgcaaaatggtaatgtttcagctgcaactccctctgctgttctgctctttggcttcttggcctagagctctgtgttcactgatccttcactaaccatctcaatgatgcctaggtacttcctagtcatagtattatcggcaatttttgttttctgaatttaatcttatttatcaatattatttatcttctcctctcttcaaacagaagcagaattagatggctttatgaaagtagatcctatacctaatttattggctaaaaaggcctgtgtattagattattggcttcaagattttcaatttctttatttaaaatgtaaagaacttatttttgtactcttattttttattttttgagacatgtcttactctgttgcctaggctggagtgcagtggtgtgatcatggctcactgcagcctcaaccatctgggctcaagtgatccttcccacctcaggcttccgagtagctgggactacaggtgcatgctaccatgcccagctaatttttgtatttattgtagagatggggtcttgccatgttgcccaggctagtcttgaactcctaggctcaagcaatccgcctgcctcatcctcccaaggtgctggaattggaggcgtgtaccactgtgcttggccccttccttctttttaaaatattctcaacttttattttctgtttttttctaagttgtttttcttcatttaaaaaaaaacttcttttaaccaatttgggtatgtgtgcctataattaaaaataattttaataattctgttactggattaaacatttaattaggaattaatttctagaaacagacaagactaattaatttttcttaattacaatagtaaagctactaaatttgtaaatctcttttcctttgagagcatcttggtgtattagaaggaagactgaggctgggaatggtggcccctgcctgtaatcttagcattttgggaggcccaggcaggaggattgcttgaacccaggagttccagaccagcctgggcaacatagtgagaccttgtctctataaatgaaaatgggaagaaaaaacaaaaaacactgggcccagagttagaagacctggatttaagttgatgttttccatttgtagtagtgcttccttgttcaagttgctgatctcttcaaacctcagtttcctcatttctagacgggatgtgataatacttgcctcttttgtgaggatctcatgagatggtgtacttcaaagtgatttctaaactaggatattaactaacgctatttgggaaagttggtgaagacttcactgaggtagtgacactttagatcttaaagcctgaggtttttgccagggggaggaaagatggattctttaggcagagtatgtagaaaccagaagatttgcaaaagaaaaagcatgttcaaatgagatggatatttagacatcacaattatgaatagtaggtagtaaagtatgggaatggatgaaatcacccagggaagacttttcttgttagacgagaaggcagtttggacaaaacccaggggacaacaggatataaagtatgaatggaagaactagaaaaagagactgagctcagaagggtgggaaaacacaggaaggtttaaaaaagaagatgctaacaggaaaattaaaagaaggaaatgttcagctatgtcaggagttgtagagtaagggcaaatagaatgaaggctgaaaagaggcccttgggtttaacaactgaaaggtgactttagcagccagtaacttagcaatgcagtacctcctgcacacgttgaaaggtagcatttttactctgtttaaatcggggtgggcttttcatttgtttagattcaaagagctaatttagatccaagcaaagtactgcatgctttcctgtagtcagtaatacaacccagtgtatttggattgcatcaataaagcctgacttattttttaacttaaatcttattcattgtcaactttacaatatcaaacatgaaaattctattacattcattcttaacctttaatatcagtgattctcaggagagtccagtaggaagattacatgtgtctgtggtttgtacgcaattatagcaactctgactttatctccactactttttgtatctttctgaaaggcatatagaaatgcagctgagtgagattcatttacttagagggatgttattgaatatactttcttaaaaatacaattttattaatagtaacgcattatatttgacctacctcaaagagtcattgtgtctcactatgggttctaaacttgtttgtgtttaagtccattttttattaatacttaattttatctagtgtctgtaccatatttttgggtgtttttttttttcatttaacattttttcatggtctagttgtttagagcttgctctactttctttttgcttatcctagtatttctcatttaaactttatctcattgtgtattttcagtttatgtagttgctcagtgaatatttcttaaatatttatatagataaatcgttcacacattctgctcatattaaagactgtgatttgtgtgaaggtgcctagcaaagtgtttggctcataattttgcttaataaaatattttcagatccttttactcaattcagtgatttagattccattaacatttgctctctcattagccaatgttgttaaaaaatgaagcatgactgattccgtggaccctatacagaaggaaaccctcatctggtatctccattgtattgtagtacagcatcaccctgaagctaattttgtgtagttcacttgggtctttgctgtggttaggattaactgactcggaattgtcatgtaggtatggaatgaactttacaatcaggatttttagtctttatcccagtcttcaaaggcatctttacctcccagtcttggattattccatatgtatggttcattcctctgtgttttcaccataaaaatgcataacaattatagtgtctttatcttgtttttaagaaactcagactttatttggagagattaggctaatgtgaactaaccgtcagtaattcaagtatacaattagtgttaaattgtgtaattcaacttttcagtgtggcatacctattgaaaattatttgttataagcctttgtttgtgtaaacagtgatttactgaagaaaatggaaatgctggaattttgaaatgttaaggacattttagtttgagacgttgaagtgttggtgccctgagtcataagcatgacatgaagaggcacgggctccttcctcattgtgaattcctttctcttgtgctcaggagttcagggttgctgctatgaaaatatgcttcagtcatgattttgtcagcatactgttatacatctgatcatctttagttatgaagatttaaatctcttgtgttctaataattccaggtttgataactgatctgtcttgtttattatgtttagctaattgaaatttatggtcattagatctggtactagagctgttaacatatttgcttgctacatatgtaaactggatcctacttttttttttttttttttacaaggggtacattaagttattaggaaattttagtattttattgatttttcactaaatttcagcatttgttccaaggtgactaaaaataaaagaagaaactgtatactagcatctgcagtgcattcctagcagctgaactagttgtttttgtcttcataaaaataagatcgtaagttttacaaagggccaactattcaaattaaggattgtcatttcagtggtgcagtagggttccatttatgatttaattcttgaaatatatttcaaattaaataagattttactacattgaatagaaatttgatgaaatactgcctgtaaacagagtcttactttccaacagattataaaaccttttatcttattttgctttgcttgcatatctccttgaaggagagttggttctgacttctacattttgtcttaataaatattcaagaaaatattctttcttgacagtaggatatgttatttttaaaatcactgatctggtaaaatttgaggagaaaaatctgaaaattaaatttcaagccttaccattaaatcataagatgtgagattttatgttatttaaaaaaaatttagtatttggagcaacattaccagagctgaatgattaaagcacatgaaaaaggcagacagatggttggttgaaatgttcttttttgctgcatgaaaagttataaatgctcatagaatgacaaatgtattacagtgaaataatttgacagtatttcacttgtgtatataaatgaactactgacaaaaacaaattgcctgcagtccaaattcaaaatttaaaatgaagagcttaaagtagaataatcaagaaggaaatgattttcctctatttcatattattatgaataacgttggttcgtgtatttagagaaggcttatttagcctatcagctggaaagacttaatagatctacaaaagtgaacagtttatagccaatatctgtttattgatggactgattatttatattgctgataggaaccagcctaattagaagtccactgtctttaattcagctgagtgagttggcatggtagctggacaaatgagagaagaatgaataaggccctgtctcagtttgttttatgctgctataacaaaaaacctgagactgggtaatttctaaagaatataattttatttctcacatttttggaggccaggaagtccaagattgagtcacaggcaggtttagtttcctggtgagggctgctctttgcttctaagatggtctgttgttgccgcatcctctggaggggagtaatgctgtgtccttactgggcagaaggtggaagggcaagagaatggaagactgtgaagcctcttttgcaagggccttaatctcattcatgaagggaggagccctcatgactaaatcttaaaggccccacctcttaatgctatcatattggccattaagtttgaacatctgaattttggagaggacacattgaaaccatagtagggtggttccaaaatcataggttggcagagctaggcatcacccaactttattcttggaatgggttttctgcaagtttttaaagcctaggttgagaatgtggtcaagaaggatgtgggggaaattaattagtaaaatatgagggcagagagataaggggcagagtggaaggcggagacctgattgtgtagggccttgtaaaatcattgttaaggtctttgattttactctgagtgagaagggatgccatttggagagttttgagcagaggggtgaaatgattgtttaccctttaaagggacattttgcctcttgaactaggagtggactgcagatttgaggcaaggaccagcaaggagactattacagtaattcaggcaagagaaggtgatccgattggtggtagtggagagaagtgggtgagttatggatatatttgaaaggtagagccaatgagatttgctgatagtttggatgtgatatgtgtgtgggagaaaagatatcaagggtggatacaaagttttttgcctacacagctcgaagtttggaatagctgtcaactaaaatgaagaatattgtgcaaagaggaatttttttttaaagggggaaagggaccaagagcttgtgcatgttaagtttgagatgcgattaggcatccatgtggagatactaaataggcagttggatatcagagtgtggagcttagaggaggagtcaggctagaagtataaatttgggagtcatcaggtatcatgggattggatgagacactgaggaagtgagtgtagaaaaaggtcagagtcagtcagtcctgggacattcctggagtaattgtgtcaaataatacaaataggtcaagtaagatgattactgagaagggagttttggatttgtcactgggtggactttggtgaccgtgacaagcagtttaggtgcactggtggggctgaaagcctcatgagtgggctcaagagagaaggaagaagaagaattgtggttagtatttttttttttttttgagacagagtcttgctctgtcgcccaggctggagtgcagtggcgtgatctcgactcactgcaagctccgcctcccgggttcacgccattctcctgcctcagcctcccgagtagctgggactacaggcgccctccaccacgcccagctaattttttttgtatttttagtagagacggggtttcaccgtgttagccgggatggtctccatctcctgacctcatgatctgcccacctcggcctcccaaaatgctgggatttacaggcgtgggccaccgcgcctggccattagtatatttttaagtatagaagagcagagaaatggagcagcacttggagaggaatgttatgtcaaggaatttttccttaaggtaggagaaactgtattatcttgtttgctgatggaaccaactgatgtagaggagagaaaatagatgatgcattagagagaaggaaaattgctggagaattgctgatatcccctttttcttctagaaaacttacagatacaggttagctgaaaaataacaaccctaatttcaatatccagaagaaatcggttaatgtagtatatatcttttagccttttttcttttgcatatatatttatatgtatgtatgtgtatatcatgtgtttttagagcaaagctatatgcttttataatatgacattataatttgcttgtttcatttaccaatgcatggagcctgctcatttcttaaaatgatagtccttttaggacaaattgtagttaaattactatctattagctattaggaaagtaaacaactaaggtatacaaatgaggttatgtagctagctccactagaggatttaaatagtatcttatgtagaatggaccttattaattactacctacataaatagaataaccttgcaaaagaatgaatactaatgatgttagatagtagcactgatgaggactttccacacatacctgtgtataccaggcagacagaatagcatatacctaggtttagagctgtaatgttcaatatagtagcaactagccaaatgtagctatttaaatttaatttaattaaatttaatttctccaccactctagtcacatttcatgtatgtgatgtagctagcagttactataatggataatgcagataagtgattatttctattatcacagaacattctattggatactgctggtttagaggcaaggatttatggcttacatagggaacaggaaacaattcagtgtggcgagagcacatagttaggaggaaatgagggactgactggtgaaagatggttaggaggtaatcagtctgtattatgaagagttttgcataccatgctcagaaattaggattttatcatgaaggtttgcacagtaaggagtgctaaagtataggagcaacataaaatgatttattttttaaaaagatcaccttggctacaccagtgtttttggattggacaagtatgtgaatgatgctagaattctgtgatactggaaacacagatggatagagtaagtttggagtgaggagggtaagtgttgaggtccgttttggatctgctgaatttgaattgatagttaggcattcgttgagcagttagatagatagataaggtattcaggacagctacctgggctggtgatgtagatttgggagtcattaattgatgacattgtagttggagccattgagtggaaagtgtgtgtgcggcatgtgaagagaaggccagtgaggaatcttagtaaagtctacattgaagagagtaggagaattggaacttacttagaaaactaagaagggagaattcagtttggggaaaccatgaaagttgattgtacaagtttttgaattgtgtttaaggtataaggaaagggcgaaacttaattcctacttccgtaggaggaagacagccgataaatggtttattgtgtggtttgttgagacagtgtggtatgacggttagacacacccactctggaactattcctgggtgtcaaaatgtggcacagagttaataaatggtacttggacagattattttacaactctctgcccttggttttcttatgtgtaaaatggggatgaggatgataatgtacctacactcattgactagttgtgaggattaaaagatttaacatatgtaaatagtgcctggtacataataaacatagtaattatgattaccattataacaccattaaagtcatttaaagttttgttttcatttttcttttttggttttaagagacacaatctctttctgtgccccaggctggggtgcagtggccctatcatggcttactcctgggctctagtgatccttctgcctcagcctcctgagtagctgggactgcagacatgtatcaccatgcctagctattttttttttttttttttggtagagacaagtcttactatgttgtccacgctggtcttgaactcctgggctcaagccgtcctcctgccttggcctcccaaagtgctaggagtacaggcatgagccaccatgcctggcctgttttatttttaatatgatgtactttttaagctattataattttagaattattgttaattttaacattaaccattgctttatgtttttaattttcaaattttcatcaaacttcagtttttctgaattatatttcacaagtgtttgaaacaactaaatatatttacttttaatggcaaaaactgcagttacttttgcaccagcttaatacaaagtacctttaatgtgcaccacataaaaataaatgaaattaataagccctgattcttctgtgtgattatcaaggatttgggaacaatgattatagtacaaaggagtaaaaagtgtatttgttttaaactttttttttttttcaattttcagtcttcttttgtatcctatggctttgaagctgttcttgaagaagcagcctatttctcatttttcctaaaagaaggcaggcttatgtatgttttgctttaacagaaataaaaagaggaggggctaaatggtcagcagtgccagctgctggtgtggaatcaagcaaaatggtaaggcagtttggtgataaggcagttgttggtgaccttggtggtggtgacagcagtgtcaagggatgttgagtgtggaaatcgatggcagtccattggtggatgggtgagaagtgagtaaaagaagatcacttctccgaagaactttggctttcaggtagaggacgaaggatggttattgcagggagacatggagtctaacgagcttttttttcttttagagtagtttctcttttatttttaattatggtaaaatacacctgaataactttatcatcctaaccattttttcccctatttgacaaggtatcaagcaacctaaccattgttaagtgtgcagttcagtggcattaaatatagtcatattgttaggcaatcgttaccaccatccctctccagaactctttttatatgcaccactgaaactctgcacccattaaataaatccctattttctcctctctcctattcctacatacacacagagtcccatctattttgatactttgtatattacttaaataattttggatgatagtgactgcaaatgatttttttcttagcattcttagtattgtaaaacggtttttcattcatgtagcaaaactataaaaaaagtttcaatatagtttggtcaataggatatgtttatgtttcaaaaatgtaaaactacacatggaaataagttagtcagtcttttaaaaataaattataatgggataattaactatagatgagaactgtttttttttttttttttttttttgaggcagagttttggtcttgttgcccaggctggagtgcagtggcacgatcttggctcactgcaatctctgcttcctaggttcaagcgattctcctgcctcagcttcttgagtggctgggattacaggtatgcaccaccatgcccggctaattttgtgcttttagtagagatagggttttgccatgttggtcaggatggtctcgagctgctgacctcaggtgatccacctgccttggcctcccaaagtgctggaattacaggcgcgagccactgcgcccggccgagaattgtttttaagtgatagcatactttaaaataatcacataaaacttaagtgatttgcacttttagattctattcctgtcaagtacaaatttgtaggactttttttctgtttctggttctacatagccttcatcaggaaacttggtgggaccatgtgactttaaaaaattgtggtaaaaaacacataacattaaatttactatcttaaccatttttgagtgtacaattcagtagtgttaactatattcacattgttgtgctacagatgtctagaactgtttcatctgcaatactgccctgtgactttttaaaaactaatttttttattgagatttccaagtgcatcagggacaaaggcagacattgcatattggtttcctgaattccctttacagaatgctgatccaaactcatcagatggaaaacttgccttctgtggccttggaaagttgttgttgttgttgtttttttaaagaatttaaaaattaatctagctttgagttggcatatcttattaacacagttgtagaaaacttatatttcctctactatagtttatgaatttcttggagaaaaatctaatactaatactcaaacttgatgcacaaacggattctttggcatgtttgtgtgtatgcccatctgttactgtggcaccatgcctattattactgtggcatgccaatagcagtgagccatgtgagccaacaaagatgaattgtttggacggaatacactattctgtaatactaattaattttgagctgatgaatctacatgagataatgttaaccaaatacagtcaaagtaatgtcagtgaaaataaaatttattttgacttatacagaagtgtatcacagatgttttagactaccattgagaataattagaatcagtgtttactatgattctagtgatcagttttcttttcatgaaaattttgagtttaaaagaaaagttcttcttgtgattatagattaagtagggagggggatgacactccaggttatggattttataccttttataaggtattactttatagttcttgaaatatattcttttttttttttttttgagacagagtctcaccctgtcgcccaggctggagtgcagtggcacgatctcggctcactgcagcctcaacctcctggtctgatcctcccacttcagcctcctgagtagctgggcccacaggtgtacaccaccatgcctggctaatatatatatatatatatatatttaagtcatatatatatatttaagtcatatatatatatatttaagtcctatatatatttaagtcctatatatatatacacacctatatatacatatataggacttaatatataatatatataaattttatataatatgttaaaaaatatatatttttcttttgtagagattaggtctccctatgttgcccaggctgttcttgaactcctgggctgaagcgatcttcctgcctccgcatcccaaagtcttgggattgcaggcatgagtcacagtgcccggccattgaaatatattcttaatatagtcagctttatagcagaaattgacagcgtagtatggtgaataggaagaatgttgaatttcaaaacaagattgaaatttaattccttgctttgccattccctggttttatgatgatatacataaaaggcatgtgattttagaatttctcacatgctatgtaatcttatgttacctttatatattctgagacttggtttactcatctattaaatgggaacaataatagctacacacgcttcatagagactttgtgatactaaaataagacagtgttataagcttcagaaaataaaaccactaccacgtggctaaataagttaataatatgttataaacacgacatgttagcggtgagttagtcaatgatgtggaaaggatataacttccaatcccatatctcataactcccattcatgtgtaactacaaagaacaagttcttatgtatcctttcagaaattttttaaaaaaattaaacgatcatatatatactattctctatgtatcttgctttccacctggtatattttaaaagatctttccatatgttgatatgtctttccatatcaacatatgataccattttaatcttttaaaccagcaatcgccaaaccagcagtacccagggacctgtttcatggaagacagtttttccatggaagggggtgggggttggcttggggatgagactattccacctcagatcaggcattagattctcataaggagcgtgcagcctagatccctcgcatgcacagtttacaagagggtttgcactcctctgataatctaatgccgctactgatctgacaggaggcggagctcaggcagtaatactcctcatctgccacttgcctgctgtgtggcatcctggtttctaacaagccacagatgggtaatgttctgtggcctgggggttgaggacccctgttttaaaccactgtgtaatagttcctcataattaattagtccccccccccctttttttttttttttttttttttttttgagacggagtctcgctctgtcgcccaggctggagtgcagtggcgggatctcggctcactgcaagctccgcctcccgggttcacgccattctcctgcctcagcctcccaagtagctgggactacaggcgcccgccactacgcccggctaattttttgtatttttagtagagacggggtttcaccgttttagccgggatggtctcgatctcctgacctcgtgatccgcccgcctcggcctcccaaagaattagtccccttttggaggggcatttgattgatttcacttttcatcacataaaaacaatatttcaacataagtttttgcatacctgtgtgaatttatctatttgtaggaaaaaagttttacaggaaatctcatagagccactgacatagtttagtttatatatggtgatgcataaaatttgtaacaggcaaaaagttccttttcactgtttaaaaacactgtaaaccaaaaatgccactttgtatagaagattaagattgggggagtctcagaagcaataaaaggaaacattaacaaatatactactgaatagtcacattctagaagacattcctaatctcctgagcaaaggtaaaacatacttcctgctgcctaccaagaggccaagtagctgagggcattgataaagatcatggcaaatatgaagatgtcctgtgatgtctgtatgacatcatggcttttaatacgcatatgaatgatatgaagacatggaagatatatgcttggtttttaacttttattgggatcatggatccttttgagactttacagtgaaagggttcttctgtgtctttctaagaaacaagtttagtatatagcctgctttcatttgttttttcaactaatgtttattgtgtatctgttatggaccggtaaggaatgtaacctgcttcagcctacctttagaggcccttcatagatcttcttttggattctttatagccaagcttgttcttgctctgttatcttgtatgatttctttggttgtctccttgtacttcgagacctcagatcacttatccgtggaggtcttttgtgatcacccagtcttactttattgcattccttattttaattgtttgtgtactacttatctgatctttctttatgtttttgttcctccctgctttcttccttctctgccttgctctctccctctttacttccctcccttctcctttttttcctgtcattccccttaaactccctcccaccaattccttgtttgttaaaatttaggtcctagaatattcagggacttcaatacttagagcagcttctggcatataatggatgttgaataaataaatgtgctaggcccagtgataagtgctttatgattttattaagtcttcatgacaacctatttgaaatagacatcagcttttagttctgttgatttttctctattgtagttttgtttcatagaggctttgtgatactaaaataagatacaagcttcagaaaataataccaggtagctaaataagttaataatatactataaatgcaaaacatgttagtctgttttattaaattcttcttgtatctttattattttattacttgtactttgagttcaatttgctgtttttttttcctagcattctgagatggaaacttagatcattgatttttaatctttctgattttgtattgtaattagaaatataaatttgcttcttcttctttttttttttttagggacagggtcttgctctgtcactcatgttgaagtgaaatggtgcgatcttggctcactgccgcctcagcttcccagactcaagtggtcctcctacctcagcctcctgagtagctgggactaaaggtgcatgccaccatgcctgactaattttttgttttttttgtggtgaaagggtcttgccgtgttgcccaggctggtcttgaactcctgggctcaagcaatcctcccacctcagcctcttgagtaactaggactgtaggtgtatgccaccaagtccaactaatttttggattttttgtggagatagtgtctttgttatgttgtctaggctggtcttgaactgctgagctcaagtgatcctcctgccttggtctaccaaaatgctgggattacaggcatgagtcacctcccccagcctaaatttgcttctaaatattgctttagctgcatcccacaagttatgaaatgttgcactttgtcaaatcacaaagtatgttgcaggctggcatggtggctcacacttgcaatcctagcatttttggagactgaggtgggaggattgcttgagttcaaaagttcaagatcagcctggacaacatagggagaccctatctctacaaaaaataaaaaaacattagccaggcaaggtagcacatgcctgtagccccagctacttgggaggctgaggtgggaggatctcatgagcttaggagtttgaggctgcagtgagctgtgatcatactactgcactccagcctgggcaatagagcaagaccctatctcaaaaaaaaaaattaccattatgtgagcactttttagtttttattttattttttaagtattggtttctatttagattccacatactctgattcttatacctttcaaatttgttgaaaccttatatagtctattttggtaaatgtcctatgtacaattgaaaagaatgtttattctgcagttgttggatatattgttctatgcttgtaagtttaagttgtttaattatgttgttcgaattttttacacctttattgaatttttcgtttcctggttctgccagttactgagaggtgtgttaaaattgccaatcatggccgggggcagtggctcatgcctgttatccagtactttgggaggccgaggtgggtggatcacgaggtcaggagatcgagaccatcttagccaacatggtgaaaactgtccctactaaaatacaaaaaattagctgggtgtggtggcgcgtgcctataatcccagctacttgggaggctgaggcagggaaattgcttgaacccgggaggcggaggttgcagtgagctgagattgcgccactgcactccaacctggtgacagagcaagactgtcccccaaaaaaaaaaattgcctatcatgattatggatgtgtgtttttcttccatgagtctgtcagcatttgctttacacatggaaactgtaaatttagaatctgtataaattgcatataaatgtaaaattattttccttttgaaatgataccctatgtccaggcagcagatcttcagcttttatttgtttgaaaaccactttatttcacctttagtgaaataaagaatatttttaatatcctgggtatggaattctatgttggcattcttttctctttcagccctttaaatatgtcattccgatatcttttggcctttataatgtctgttgaaatgttattccttttaaggtagggaccagcaaaccacccatctgtttatgtacataaagttttattagaacacaaccatgcccatttgtttttgtattatctatagatgctttcattgtgcaatagcagagttgactagttacatcagagatggtatggctggtaaaacttaaaatatttactttctggccctttacgtttgttgactcctgtctcaaggtaattttctggatgcctttttttttaaaaaaaagatagggtctcacccaggctgagtgcagtggtgtaatcatagctcactgcagccttgaactcctgggctcaaacaatcctcttgcctcagccttctgagtagctaggattataggtgcacactatcatgcccagctaattttttaaaaatattttttgtagagactgggcctcactatgttgtgcccaggctggtcttgaactcctggccttaagcaatcctcttgcattggcctcccaaagtgcttgattataggcatgattcaccatgctcagcctctggatgcttttaagatttttctcattgtttcttgttttcagcagtttgactatgctgtacctggtgtagttttatgtttgtcctttttttctaagatttttaaatatgtgggtttatgtttttcataggttcagaacaattcttaaccattatctcttcaaatactgcttttgtttcatactctcttttctctttggaactctaattagaggtatgttagaaattttacctttatctcatatgcctctgatgctctgttctattttttccattcttttatttctctgtgcttcaatttgtatattttctcttgacctgccttcaagttcgataatcctttttttctcccatttccagtctgccattaaacctatctaatgagttcttaatttcatatactatacttttcagttctgaatgtccatttggttgttttgtatggattctactaattgttgatttctgtgttgtttcatctgttttgtccatctcttctacattttcctgaccatgttaattgtaattattttaaaatccctgtgtgataactctggtatctgagtcactcatggatctgctcctggtttttttttttttttttttcctttttttcttttttgggcgggggtaatttcatcctgtttttagtatgtctcgtaagttttgatcagatgctaggtatttaggataaaaatgattgatgaagctttgggtgatagcttcttccatacagggctgggtttttgtttttgtttttttttccagccaagcaaatagaatgtaagcagatcattctgatcttgtcaaagctcagttttagactttttaaggtcttgtttatggaactttttcttatactcctcgggcatcttccttagcactctgtgtggctcttcagtaatcttaatggaaagtccagggcattcaccaaagcctctcttctgaggacagacttgacagctgctgttttttgttgtgtttcctggagtcttgccttaggaattgcagccaacattttgcacacagatttttgtgtaccttgtctctggttccctcctctgtaattttgtccttcaagtctcagtcactgtggcagccctggaattcaacatttgtctcctcaagttattaagactgtgacttctccttgggttctgttctcccacatggcaatttgggaaatgtactgagggaaaaagctggtgtgaatgaggagctctttttttcccttgagagagataggttcttactctgtcacccaggccacagtgcagtggcatcatcatggttcattgcagtcttaccctcttgtgctcaagattctcccaccgtgtctctgagcagctgggattacaggcgcatgtcaccacacctggctactttttgtatttttagtaaagatggagtctcaccatgttgcccaggctggtctcaaactcctgaggtcaagctatccactagcctcggcctcccaaactgctgggattatattaataggtgtgagccactgtcctggcctaggggctcactttttgtgcttctcttctttcaaggatcatggccccttaagagtacttgtgtgtgtgtatatgtatatgcatacatatatgtgtgtatatgtatgtatttcagcttttatagttattttctatggcaggtttagttttttgtaagctacagtgtcatggacagatatggaagtccctacagtatattctgaatgtagcagccagaatgatcctgttaaatagatcatgactctcctgtgttcaaaacctgcagttctttatttattcagagttaacaccaaaaacttttagagttatttgacctgcttatcctccctgtccccctttgctccccatgatatctgcataactaactctcttatttgaaaatctttgttcagatgtcacttttaaaatttactcaaactgtgctattaaaattgcctccttctttcctttctgtatccttttcctctgtttttttcccccatatcaccttacgacttaaaaatgtcttatttattatgtttgttgtttcttttacttaatagaatgaaatccctatgagggcaagggtttttcctatcacttttgttcattgctgtgtcacagatgcgaatggagaaccagatgagaatagagcttcagaatctaaaggaggagggaatttcaagatggaagagtaatggtcatatgtatcagatgtcaacagaaagagccaaactttgtaaaataattgaagaggtttattctgagccacatatgagtgaccatgacctcaagagatcctgagaacctgtgcccaaggtggttgggttacaacttgattttatatttttaaggagcgtaagacatcagttagtacatgtgaggtatacattggctcagttgggaaaggcatgacagcttgaagcagggggcttacaggttacaggtggatttaaagattttctgattggcaattacttgaaagagttaagttgttattgaaaaacctgggatcaagagaaaggtgtggctgggttaggataaagggctgtagaaaccaagattcttatgaagtctcttaggtggctgcctttagagacaatagatggcaaatgtttcctattcaaatctttaaaagtgctggactctcagttaatctctttagaattgttagagcctggaaggggaaactctgtagagatcctttacagatgcagattttcttccacaaaaggctgctttgcagggccggttcaaaaatatggcaaagaagcatattttggggtaaaatattttgattgccttctttatatgtcatgtgacgttatgctatagtcaggttggaaagtaagccacgttacgtagggttaaattaaaatccatctgatgagaatttatggtttgtagggcaggactcctcaggccccttaggaatttgggcaagagagagaaaagtcagagtttagtcctcacaagtacagaggaataatctgaaactattcatgagattttaccttggatttttaaattaagacgttgtttgttaccctgtgtgagagacattttaaattaaaggtaaatgagattaccaagagttgaggaagggtctgtaggcttttttctttttaatcttgtgaacagtataggaggaatattcatatttatttggataatttatgattctgacttttagaaagtttgtttgttttttgttttttgagatggagtttcactcttgttgcccaggctggagtgcaatggtgccatctcggctcactgcaacctccacctcccagattcaagcaattatcctgcctcagcctcctgaatagctgggattacaggcatgtgccaccatgccaggctaattttgtatttttagtagagatggggtttcttcgtgttggtcaggctggtctcaaactcccgacctcaggtgatcctctcgcctcagcctcccaaagtgctgggattacaggcttgagccactgtgccctgcctagaaagttaatagatgggtgagcaggtaaagacactagcaatggagttttttgtttctattcactgttgcatttattaagtggaggctttgtgccaaaagtttttcccctatattacctcatgacttaaaaatttcttacttattatgtttgttgtttcttttacttaatagaatgaaatccctatgagggcaagggtttttctgtcatttttgttcattgctgtgtcacaaatgcgaatggagaaccagatgagaatagagctacagaatcaaaaggaggagggaatttcaagatgaaagagtagtggtcatgggtatcagatgtcaacagaaagagccaaagttctgagcactctgcaagggaagcttagatcctaagtgaactgaaaatgttcctaagccttaatgttttgcacaaaaacattattattatgagggccactccctttggctacatagcactgggaaatggtaagttctgactctgtttccagcgttttttctgcatatccattcatatttgcagcgcaccacttggatagtagcatcttttattggagtggttctctatgcctaaagaggtgcctgtgttttggaattttttggtagggctccataaaggtccagccttcccttcgttgaatatttttatacatccttttttgggcatgtatctctgattggaaattgctattccttatcacttttccagtccatgatttcctggatgtaagttttaggtgttgctttctatggtatataaattttggtgtaccataattttgaggaaaaagaaggtaactttgtagtgtggggctctcaaatggtaaaagtcctttcttttttctttttaaaatttccagtccaatattgatggatacttctacaaaatacaataaaaaataaattactagaaaaataaaatgggccaggcgtggtggctcatttctgtaatcatagcactttgggaggccgaggttggtggatcacctgaggtcaggagttcgagaccagcctggccaacatgatgaaaccccatctctacttaaaatacaaaattagctgggtgtggtgatgcactcctgtaatcccagctactcaggaggctgaggcaggagaatcacttgaatccaggaggcggaggttgcgtgagcggagatcacactactgcattccagcctgggtgacagagtgagactctgtctcaaaagaaagaacaaacaaacaaaaacataataaaattaaagaaaaataaaatgaaaaaggcacacaaaataaaatacaagccccactttttaaattagactcaataaacataaaattacattgtcaaattgttccgtcacggttctcaatgtgcttattctgaattttggtacctatctcctcatgggttggtaacaaaaatttgtgaattagtcatgattcttggaccagactttctcagatcatactttaagtagcactgatatagtgtacagtactacatagtcttaattttccccttaatttatgttgtctttagaaggagtagaaggttttaatgagttatggattatagattgattaaaaagagaggtaatttacactacataatagccctaacacatccctagttcttatatataactggtaaactttatttttcagttatagttactagttcattctggggctaaaataagaatgactttcctggtaatagtaagatttgccttaaatgttcagttatatattcttctctgtcctttgaaacttaaaactggcctattttgaacatgaaaggaaaagttataccatttaacaccacaagatgtcacttatgtaaaaataaagttggtatcctaatactcaaagctagaaagctacaggtaactaggtaaatgaagacacaggtaaattaaaaatgaatatatttgaaacaactattgttttcagcaaagagttgaggaaaatattgctaattcagcattattttgactcaaatattgatatttaacaaaatagtatctaagatttatgcagtaatacatgttaactgatcatatttgaatctacgtaatgaagaaggtagacctaaaagaacttaataaaagttaatgtattttgagggtaaagtaggtgttatggtattaactttcctaaatctttactgttttggtgacaggcaaagaagaatttgggaagaaacatgtaatttatatcagaattttaaatagatccttatgacatacgtgagaagctgcatattacatcaggttgaaacagtgcctaggatttttcttgtctcttccctgaacctcagaattattagtttctcttcctatattaatgcagtatttgttgttgaagactagcttttctgttaaccatgaagagcaaaacctttatctttaatattgagattctgttttcttgtttttagtttcagagagcaggtgcttgttctgggcactctgggaatttgggctttagatgagcaaaccaagtttccattagtttacgagtaagactatgcctggaattagaggttgggctgttctaaaaattgacacttcattcctcttcattgctcacttctctctccagataaaactggtagaggagaataatgggacactttggggaacagaaaaggggaacaagcaggagaaaattgttttcttttttggcatgtgtgtatgtgtgaccacatttcctttctatttagttcctatcgaattctttttttttcttacctaacttcagtaagatttttttaaggtttcttttagggtttaggtttttcattataaaagtatacatagtcattaagtaaataggaaaatacagcaaaaagtagaagaacaaaatacagttacatatatagttccattaatttctctcccttttctgttacctgtgaaatctgaaagagcctgaaaagttttatgcagggatcctaaattccttaaggtgaacatttatagtatgtgtagtagttgtatgttctcagagacagtttttatttattactacctctactgtttaaatattttcaagctgtatttttaattaggaagaagtaggtgttttaattatttaattgtattttgtcttctctactggtcaccattgcatttaattttatgagctgtttggaaagtaaggctcatttttttcataataaatttcattgcatttattccttttgaaaaaaatgtgcttagcttttacttatttttttcttgcaatgacagtttgtaacatttaacccttgtattagtttgctagagctgccataacaaaatgccacagactgggtggcttaatcagcagaaattaattttttcacaattaatgcctgggagtacaagatcaaggtgttggcgggtttggtttctgctgaggcctttctctctggcctgcagatggccaccttcttgctgcagttatttaacattgcccatgatattacttctaattcttatgaaaatgatatattttaagctatctaatataaaaatcaaagtatggattttttttcttctcttttgtaataggaatgaagatctaaagcaaatgttagagagcaacaaagattctgctaaactggatgctatgaagcggattgttggggtaggtaaaatactcatttacttcaattttggaaaaatggacaagcagtgatcatattattatatatatatataaaaatacgttaaataccaagtctaatattctgtttgcccttaatattaacttagaatttcctgtccaaaaatgttaaagaaaaaagtacattattgaagtgtcaaaaatcaagaaacttaggttttaattttatcttttctctgttttaatttccctgtatctaatttcaaggtatttctactatgagaatgaggtagttagtcattttgaagacaaaataagatgatatacaagctattttgacttcctacacagagggatactaaagaatgattttttttgtcctttcacagcctaaatgttctgagcatactttcatctgttttttaaattctcttactaccaatagaaacactttattcagtttagaagcctagaacttctaataaatattattaaatataagagcattcaccagtgttcagctgtaaagcaaaacataaacaattgattaataagttatgaggattctattgccagagaattaaagatataatatagttccttaattatttttaatgttttaattttaattttttatttttccagggttctagttgtatataccatctttagtaaaatagttttgcaatttatgttgcactctctgtacgtactcatttgattttccacattcacagagaaaaaacttgcttaattccactgactatctgatgctcaggagttttgcttttgtttcactggaatcaaattcataaaactgatttttcttattaacactatcctttttatcaccaccattgctgattctattttccacttaattttatataataaggtcaaaattgaatacatttgcataattgcttaaataaactactgtaataaggcgatgacacaactaaaacaatactgttttccagcaggcagtgccatcgtatgagagcttcagatctcttttcctttcttgatatattaaagtccaaataacaggtatcagcatgctctgttaaaaagtgaggtggtatgaaaatcaaatatattaaagtcaagtactaattgtatctgtaggacatctgtaagtgacttgatccttgctttcatgtttatgtcatttggcagtataggggcaattttgaggattccattgtaaatttttgatttgttaatgttatgctctatacataggagtatttatgggcaggcagttcttgctttgcatggcttttatacatatgaatttcagttactacagtttagttaagtgacaccaatcccctaacaatatggttcaaatttcatttaccatggtgtattaattgtgtacttggataatgtacaaacttgactgctagctcttcattctacaaataacttgtaaattacaaacatgtatcatgatccatgatcaatcatgtcacttctttcaaaatctgtcagtgattggtcactgtgcatctgttactcagtttatgcacagacaacaaagcatgtagttgtgttgcctctttgtctcccagtaagaaacacatgtgacattttacagaaatgaataattgaaagaggcatttgcccaacaaagtgaaaatacagcaaagaaatgaaaagtgataacatgtaatgaaaatcaggtagaatataaatgaagttatacagaagtagctggctgtggaactactgacattacacgtttttaagagactgaatttatagctggaggaacttggtaaggtgagattttcaaccaacataaatgatgaaagtgattttgttgaagagcatgaagctgtctcagaggaagtgatgctgtcagaagacctcacattcattaaaggaactctaggagatagttgagaacattgaaaatgcaaagggtaaaatgttggaagctgatccagacttagaaaggagcatgataatttactgaggaatacgaaagattcttcctcagtatcatgagttaaacactgataagagaacaagttctgttcaaaccactcttgataagttcattttctttgcctttttttttgtttttttagagacagggtcttgctctgttgtccaggctggagtacagttgtgcagttgtaacacattgcagctttgaactcctgagcccaagcgatcctcccacctcagccttctgagtagcagggactacagatgtgtaccactatgcccagctaatttttttatttttattttttgtagagacagggtcttgctatattgcccaggctggtgtagaactcttggttttacttgatcttcccacctcagcctttcaaagtgctgggattataggtgtgagccaatgtgcctggccaagttaattttcaatttttccaacgttttaagttatagtatactaaatattgatttttattattttttcactttcctataaatttataactgacagtaaaagagttattaatgctttgacagaaattttaaatagtatccagggatttagtgaaataaattaccttaatgggatgtaagagccatagtttaaagaaataaataagggcagtccctactttgcatggtagtgcaggtctatgccctgcaggaatgcaagcagaaaccatggaaagaaattttaataagccaactggaaaaattacaattgatctatgatgcttaaaatttttgtcaaaacaggaaaattagctgagtcaggtggtatactgttttgagttaatgactgtaataaatagttttgtataaatctttccagacggactgtttatcccttgttctttccctttcttccttcaataacaatgctttggttctatgtatgctttaaaggattcaacttggggctgttgcttgcatcttttaaaaaattattgggttggaaattgtttaaaagaccaagatttttctgcagtattagtgtgcatcaggatgaattcctggttatcaggcctgaggttttactggtgatgtgacacctatagaactttagtgggttttctatcagctttgctccaatgtagtctctggaatacaaaataagggtcagttaactttctgtatctccatttattcttgactgttgattcttaagagttactgttgggtctgaaaccctttgaaaccttttctctctgtttttgttacctgtgaattaactagcagttttctgtaaattcaaaattctgaacttttatctcatctttattgctttgaagaatgaccagtggaaattaaaaattaaacataatttcatcctttttcaaaaaactgggtttaaaaattatgtgaatttttggatctagattattattcaatacagtcatgcatcacttagagtcatgcatcgctgaatgacagggatgctttctgagaaatgcatccttaggcagtttgttggtgtgaacctcatagagtacttacacaacctagtatacttacacaagcttactacacacttaggctatatggcatagtctattcttcctaggctataaatctgtacagcatgttactgtactgaatactgtaggcagttgtaacacaatggtaagtatttgtgtatctaaacgtatctaaacatagaaagttacagtaaagatacagtattataatcttacaataagattatatatgtggtccctccttgaccaaaacgtggcacgactgtaatttaaaaataacacaaaattcagtcattgtaatataccacattaacagaaggaaagggaaaaatccctcacaatcatctcaatttattcggagaaagatttgacaaaatttaatacactttgatgataaaagtactcaacaaactaggaataggaggaaactacctcaacctatctgttaaagagcaggtgtggaaaacccaaaactagcatcacactcagtagtgaaagactgaaatcttttactccaaggtcagaaacaaggatgcttgcttttaccacttctgtgcaacacagtattggaaattttagccagaacaatcatgcaagaaaaagaaataaaagacatccaaatggaaaaggaagaagtaaaattatttttattcacatcatcttatatgtagaaaaccctaaagattccacaaaaaactgttagaaccaatacgcaagtttaccaaagttgcaggatagaaaagcaacacaccaaaatgacttgcatttctacacattaacaatgaacaatttgaaaataaaattaaacaaatattcatttataatagcatcaaaaagaataaaatattcaggaataagcttaaccaaggagatgaaagacttgtacactgaaacattactgagaaaaattaaagaagacacaaataaatggaaagacatctatgtttctgggttggaagactaatattgttaagatgtcaaaatgatctgtatattcaatgcaattcctatcaaaatgccaatgatgtgcatggcaaaaatagaaaaaaattcatcctaaaatttatatagaatcccatgagtccctgaatagccaaaacaaccttgaaaaagagcaaaattggctgggcacagtggctcacgcttgtaatcccagcactttgggaagctgaggcaggaggatcatttgagcccaggagttttagaccagcctagactacatggcaagaccttgtctccacaaaactaataataagaaaaaaattactacctgtgcctgtggtcccagctgcttgggaggctgaggttgtggtatcgcttggagtgagctgtgttcatgccactgcactccagcctgggcaacagagcgagaccccatctcaaaaccctgtctcaaaaaaaaaaaaaagaacaaaattgaatgtctcatacttcctgatttcaaaacctatgacaaagcatagtagtgaagacattgtggtactggaataaagacggacaacgtatagaccaatggaacacaatagggagctcagaaatcaaccctgacgtaaatggtcaaatgatttttggtaatggtgccagatcaatcaattgggaaaggacagtcttttcaacaaataatgttggggaaactggattatatatatatgcaagaaaatggtgttggatttctttctgtatcacaccataaataaaaataaaccaaaatggatcaaagacctaaatgtaagagctaaaactataaaactcttagaagaaagcatagagaaaaagcttcatgacattggatttggcataggattcttagatacaacactaaaacaagaacagtaaaaaaaaagtagattatttggattttatcaaaattaaaacttgtgtgcatcataggactctgtcaacaaagtgaaaaggcaacccatagaatacaagaaaatatttgcaaatcatatatctgataaaggattgatatccagaatatataaagaactcccacaactcaaccattaaaaacctaccaaatggctgggtgtggtggctcacgcctgtaatcccagcactttgggaggtcgaggtgggc

SEQ ID NO: 933 - DNA, 4542 bp, Homo sapiens
  source 1..4542: mol_type = other DNA
gaaacctgagttaggtgtggctggagcgactcgagatgcgaggtgggcgggggcaggctgaaagttggagcaagcaggaagtgaactgagggccaccctgggaggaagccgactaggcgaattcacttactgaccggcctgggctgctctgagacatggtgagccaactgggaactaggaaagggctggtttaaagaggagccagagggggcttgggactgggggttggctgtgtcgggggaggagagttggtggcaaagttagagggctgggccagtgctgctatggcctctcttctttgacaacttggctgcaaatagctctgagctgtcctggcaggtgtttctactccttctccctccctcccctgacctctgtgctggtggggagctgggcttccgtgccagcgccgatgggggctccgaattccaggcaaagagttgttgtgccttcctcctccagggagcccgaggcgggtgttgtgacaccacaccaggcagcgcctgggcagttcccagttcagattccagcccagcggcagaagctctcctctccggcctttcactttatccccacacagaaacacaaaggatttgtgtgtccactgagtcctttgggtgtcctttctccattaacatggagaagagaactaaaggtttataagagaaccagaagttggttctctgtgataatgtagttctgacccatgccactggcctatttttggaggtcaagcggggaggagctaaatactatttttctctccttgttcaaaaaccttgtcatgaagcctccgagatgagacatcagccagggaggactagtcctccatttcccccaacacccaggcgggtatttttatttaatatctgcataagcaggcggttgcttggtgcctgcacgtgtcgcccagtggtggggaaagcagaagtgtgtggctcaacggctccaggcgccttctgggatacttggttgcctgttgttctgggtcacagcaatggcattgcggccagggccgtgctccggcagctggcttagagggacagatgggtggggctgggtgagggtgttctgctggccagcacagacactttcaaccagggtcccaagaaatcaggaaaggggggtggctctgggaattgtaaatagtggcgggctctgctctggaagggaacattgtgagatgctggccctgctgtattctacggccctctctagggagcaaggaagcagtggggagggatttagtgatgtgctgcttttccttgtcaggggccctaataaccccaaaagaagtttgatctagtctgttcagcatcacatctcaccttctggggcttacaaatgcatttatttttgattacagaagtaatacatgaaaacattctctttgtaaacatttcaagcattttacaaaaagcttaagtctgcctgaggccttaccctccccagatctctgagcccaagtctccagttcccccaccacttggtctaattaaccccgtgttgccgcacaggaggaagccagtgaaggtggaggaaatgatcgtgtgcggaacctgcaaagtgaggtggagggagttaagaatattatgacccagaatgtggagcggatcctggcccggggggaaaacttggaacatctccgcaacaagacagaggatctggaagccacagtgagacagggagcccactgggggctggaggaaaacagggagggagggaatttctttttggtggggcaaaatggacaggagggccagaagtttgacatttctgttgcctttcacctggtttgggagctgatgtgagctgagtctccacttctgaatctgctctgctccacagattgttatggatcccagggaatggatcccatgactggggcttgaggtggcagctcgcccatagaggcatgttctgagaccgaaagctcagtcagcccatgcattctcaggcttctctcccgggaaacttgttttccctttgaagcctgcccatgacaatcatctgggtctgaccttcccagggcagaaatattggctctgaggaaacccccgctgtggcctctagccttctctaggagctgttagacaaggggtgggaaattgctggcgtcttgctgagtaggctttaaaaagaagggggaaagagcagtgaaatgctttgatcccagggtcccctgctagatgaaggctaaaataatatctcccacacatcttgctagacctcattcttctctctctccagccaggggctgaggccagctgtttcagggaggaagtaactccaaagttgagcaaagtctggagcctcaagttctgtgttcagcggggaggctggctctggctttctgagtcctgtgtgaactcttggctcttgggtattgctcccttgtctccctggggctcattgcctgtttctgtagcttaattgtagcttaatttggggagcatggccccgggaattttttttttttttttagacagagcctcactctgttgcccaggttagagtgagtgcaatcttggctcactgcaaacttcacctcctgggttcaaacgattctcgtgcctcagcctcctgagtagctgggattacagtgtgcacccccacacctggctaattttttgtatttttagtagagacgaagttttgccttgttggccagggtggtcttgacctcctgacctcaggtgatccacctgccttggcctctcaaagtgctgggattacagacttgagccaccatgtctggacaagccccaggaaatttagtgtctataacttgaattgctgggcatggggaagagtgggtggaggaggaggagttcccttacttccaaccctctatcctgtcctggtccctcctccagcctcagcagtcccgatggggcaaggagtcctggagctgcgagatgtgcccacctggagcctgcacccctcagtcccagggtctgccctcccaagggcagattttgctgccagtgttgtacccttgggtgtaagcaggtgtcgaggacccctcagtgtgcaggggtaagaagagaaaggggacccctagtcatatctaggtggagacctcctaggatcctgagaattctaaatttcaacccggccttccagatttttaggaaggtacatttgtcaaggtaggcagatacagcatttttttttttttttttttttttttgagatggagtcttgctttgttacccaggctggagtgcaatggcgcaatctcggctcactgcaacctccgcctcccaggttcaagtgattctcctgccttagcctcctaagtagctgggattacaggcgtctgccaccacacccggctaattttcttgtatttttagtagagagggggtttcacaatgttggctaggctggtcgcgaactactgacctcaggtgatccaccaacctcggcctcccaaagtgctgggattacaggcgtgaaccaccgcacccggccagagcatcttttatttagcagtttgttacctcagcttacagtgtcagtattaagatgtatggcttgagctgaacgtggtggcatgtgcctgtagtcccagcactagggaggctgaggtgggaggattgcttgagccctggagatggaagctgcagtgagctgagattgtgccactgcactccagcctgggtgacacagccagacactgtctcaaaaaacaaacaaacaaggccaggcgtggtggcttacgcctgtaatcccagcactttgggaggccaaggcgagtggatcacctgaggtcaggagttcaagaccagcctggccaacatggtgaaacctcctctctactaaaaatacaaaagttagctgggcgtggtggtgggcacctgtaatcccagctactcagtaggctgaggcaggagaatcaattgaacccaggaggtggaggcagcagtgagccaagatcgagccactgcctgagtgacagagcgagactccatctcaaaaaaaaaaaaaaagtatggcctgtgggctgcacttgtactcttataatcttgttccagtgggaggagccactgggtcactcactctgccttttccccaacagtctgagcacttcaagacgacatcgcagaaggtggctcgaaaattctggtggaagaacgtgaagatgattgtccttatctgcgtgattgtttttatcatcatcctcttcattgtgctctttgccactggtgccttctcttaagtaacagggaacctctcccacctgcccttctcttcagggacaaccctccataaatgtgtgccaagagggtctcctttcctgtcttcctctacagagaatgctgctcggtcctcctacccctcttcccgaggccctgctgccatgttgtatgccccagaaggtaccttggtcccccggaaggagagaaaaaagagagatggactgtggctgcatttcttgggtccttagagtgggctggagagacctagagggcccagcatgtggctgggaaactgttggtggccagtgggtaataaagacctttcagtatccctata

SEQ ID NO: 934 - DNA, 29208 bp, Homo sapiens; identical to SEQ ID NO: 463
  source 1..29208: mol_type = other DNA

SEQ ID NO: 935 - DNA, 32744 bp, Homo sapiens
  source 1..32744: mol_type = other DNA
ttcctgacagcacctcccggaccggacataacggtccccgcgcggctccccgaaccggaagtggaggtgagctgtcgcgggcggcgcccggccttgctcaacgcccagcagtccccaccgtcgctgccgccgccaccgccctcggccgctgccgaggcctcctgcagccatcatgtccgccagcgccgtctacgtgctggacctgaagggcaaggtactgagggctccccaccctccctgttgccaggcaaccggcaggggcctccgcccgcggggacccaccctgttgctaggtaaccggcttatgagccccatcctggtgtgaggcagagaggccggtagacctcacctgagagccccatcctgtttctgggtaaccgggcgggggtcttaagtgggtaatccccgccctgttgctacgtaacgcggtgggctgcagccaccgcgttgccaggtaactgactgcaccgccctctgctccccggcgccggggccgggggctcgggcctcggtggaggacccagaagcggggccgcagccggcctcggagccaggcagggcgtccaggggctgcgcgacccttggccgggggtggcgaggcgtggcggggactgggtgctctcgagccagtcccgccttctcagggcgttacagcttctgtttatcgtgcactttctctcagtaggaatttctccacgttcattgtgatagtgagttacaaggattaggtgaggtgagtggtgatcacgagtgccgttttatagagggagaaactgaggcatggagaggtgaagcaacctgaccaaggtcacaatggtcacagagaagtagcaagtctaggagtccgatccagaatcattcgtttattcagctgatatctggggagcacctactaatgccgggcagggtactaagcctggggtcgatttgtgtttagcaaaaaacagtccctttttttttgttttgtttttgagatagtgtcatgctcagtcgtccagtctggagtgtagtggtgcaatctccactcactgcaacctccgcctcccgggttcaagcaattttcctgcctcagcctcccaagtagctgggattacaggcacctgccactacgccgagctaaattttgtatttttagtagaggcagggtttcaccatgttgaccaggctggtctcgaactcttgacctcgagtgatccacctgtcttagcctcccaaagtgctgggattacaggtgtgagtcatgtgccagggctcaacaatctgtgttcttacggtgttcacaggctggtaggggagatggatacccatctccaaaaacacaaataaatgtcaattgcagtggtgttgaggggcgagtgtgttatacagacagtcagcctcagcccgaggatgagagagggtttccctgaggaggggtgacaaatggaccagagacaccagggagctggacataaactagaacccaggcatcttccccagaggatctgagaaaactttaagaagggattgtccccaccttttagaaatggtcctctgccttctcctaagtccatcccaggtgcaaggcaggtggctgcctggcctgttgcatgtggaagcaacaagaaccggtccaacaatgtgaagcccaacattgatcagtgagagaaacaaacatgggtgtcaggtcctaggtgaggcgggcaggggtgagccctaaagcagctgagagtgaagaggtgaaatggctgccccttcccgccccaccccacccccagcactttcctgaagtcccttgagtgggtgcctgctctggaagccacccaaagtcaacaactggtgagacccagtgctgggcttccctcccccgccttcttggaaggagggaagacacccgtcttagagcacgccaggggctgggtggtgcggtggaatgagtcctggtggaatgagtcttgcttccaccctggccactgcctccccagaggtgccagtgggctgcctgtcttggcttgcttattccttcagcaaacatttcatgagcacctagcatgcaccctgccctatgccgggcatagggtgtccattggcgccatggctgtggtgttaggggtgagctcaaaacccatccctgctgctcagctgtgtgacctgggacaggcaccttctcctgtctgagcctcactttcctcactggtcaaaagaggcttttatggagttattgtgcagatttgctgagcagatgcatgagacaggctcagcaccacccatggtccatgttagctctcccaggcctctcggtctagcaggggagtcacctagaagcagagacattaccacacagttggatccaggcagccacaggggcaggaacaaggtcccaagtcctgcagttgctcaacctcatctttagccagtggaagggggaggtggttatgaaaggctccctgaagagggcgacgctggaagtaggtttggaaggcacgatcatgtggaaaagaggtgttgcaaggggcagcctgctggggctgccaagccagaagtcctggctaatgctgagatgggagagagggaccaaggggaccacttcagttccaaccaggagccaccgtgaggagaccgtagcccagagaggcatgatcagacctgcctttcagaaagctccccaaggcagccgtgggcttccttcccttcctctgcaaccatgatgccctttcttattccacgacccacggacctcctgtttccaaagtcagcctcgtgagccgactgcatttaatcaacaataaagcacactgagaaattcatggccacgtgtctggtcaccgaggacaccagcgtggccacactgggctgggaggaagctgtcctagtaggaagcttctccgctttatctaactggcttctcagcagcttctgacaccactaaccacctcctcttcagtgctcccttccgcttccaggaggctgcgctctggggggtttcctcctgtttcttgcactgcctactttcctccttttctgccctccccagggctgtggagcggctcaggcctacgcgtgcctccccatgctgtcactcttcccaggtgggctttgactcatgtccatgggccagtgactctcaattttgttcacagcatttctctggagatctagtggcctctgagacaccagagaggtcccgccgccaccataaattcagcattcttctaaatgcactccctgtacctgctctctttccatttcagtgatgccatcacccattcagccatctgcacaagagacctggacgttatcctcgcctcctttgtctcctcacccctgttttcactccacaaatgtttactgagcacctactatggtccaggcccctttctgggtgctggaaaacagctgtgaatgagacaggagtagttgctgttctcaggggatgtcagacagtaaaggaggatagaaataaatgtttaatgcaccaggtgatagggataaagcaggggtcagggttcagagggatgggacatgatctcagccagagcaagcagggaggatttcttttttttttttttttttttttttttttgagatggagttacgttctgtcagccaagctggagtgcaatggcacaatctcggctcactgcaacctctgcctcccaggttcaagtgattctcctgcctcagcctcccaagtagctgggactacaggcatgcaccaccacgcctggctaattttgtatttttagtagagacagggtttcaccatattggtcaggctggtctcaaactcctgacttcagatgatccgcctgcctcagcctcccaaagtgctgggattacaggcgtgagccaccgcgcccagctgggaggacttcctagaggaggtgttatttgagctgaggcttgagaaatgagaagagccaggtcagggcaaaggcccgaggtgggaacagatgtggatcactcagagaccagctaaggggccaggctggagcagagtgaaccagggcagcgcaggcagagaggcgtcagaggggctgtgaggagccagaccacgctggtccttgggagccatggggacgggcttgggctttgttctcagtgccggggaggctggggtaagtggcagttcagcagtgggggagagaccccgtctggcttctgtgtaggaagagccctgtcaccctttgtgaggaaggacctggggggtcaagagtgacagcagggggaggggctgttccctcaacacgtcatcacctgcctccctccaatcagttccacaggccacgaagcagacactaggaaaggaaggtgccaccccgcaccacccccagtctcgccttgagagaataaaggcagcgtgtgatgaaatgccaagttctgaggcaggtggttcccaggatggtcagcgccgcaatggccttctcagcatgttgctgagtcctgcagctggctgtcctgcaggccccaagagctgcagctgctccaggcagcatctccaaccgcagccatgcccaggctagcaaaacttccgacctcctttttattctttaatgaggtataatttacattaataacctgcacttatctaaagtgtacaatttgatgagctcagtcatgtgggaagccataaccacacattccatcgcccccgaaagcttcttcacacccctttgctgtctagccccatccctaggcacccaccgatgtgtttttcatcaccattttctaggattttatacacgtgcagtcatgcaggatgagctctcgtttgtctggtttctctcagccagcacagtgattctgatgcgcctgtgtatcgggagtccgatcccttccgttgctgaggcatgcttctcatggtgtgcacggatacagtttgtttctagttcacctgctgaaggacattggcattgtttctagtctgggtctgtttcaattaaagctgctgttaagattctcgtgctagtgtttgtgcagacatgtggtttcatttctcttgggtaaataccagagagaggaatgactggatcgtatggtaactctgggtttcactttttgagaaactgccagactacaccaaagtagttgtcccattttccattcctatcagcagtggacaggggttctggatgctgtatatcctgacccacaggctatgaaagagagagaccaggaagagggcttctcccttcaggccacctgtggacttcagtaaatacgaaccttcagcgggagtgggcgccctgacacaggcgggagagcaaggtgcgttggcccggcaaaggctctgagaaggtctgcattgagagcttgtgaggcattgcttaacctgatgtctctgggtgattcagtcctggacctttgctgcagagttcgcctctaccctcaccctgcgaagaactgcagtggcccctgtgggcattcacactgggagatgctcttctccaggaattccctgggggatggagatcagaacggcctcaagtcctgctcttttgcggatagtggccatgaccggagtccccagagcgaagcagggtggtgcatctcaccccctgccccaagcccccagattgtagaactgaaaatgcaagcatcttttctcttccttccccaccccaggtgctcatctgccggaactaccgtggcgacgtggacatgtcagaggtggagcacttcatgcccatcctgatggagaaggaggaggaggggatgctgtcgcccatcctggcccacgggggggtccgtttcatgtggatcaaacacaacaacctgtatcgtatccctttgctgggggtgctcccaggggactcctgtgtgggtgttggtgtgtgtgcatatccacacgcctgcaagcagggctggtttgtgcacagcgcaagcattggacacagccatgccctcctggagctccctgctgcctgcggagacaggcagacaatgcacgatgacatgtgtgatgggtgtggggagaggagcaggtgtgacttgaacctcttcagcccaggggcccaggaagggaaatgacaccctggaggaagcctgcagggaggcctggcttctgccagctggaggggtgggcaggcactaggcgtgggtgaaggctctgcagggaagagcctcattccaacagctgcactcggggtggctggagagggggcgtgtagggcagcgaggctggagtggtcagcggggtctggggtctcaaagaacatcatctgaaatgtgacaggaagtctctggaggcttttagatgtgtgtcttctggaggtttctggctgctgagtggggcaagactgtggggacaggagaggacatgggtaggtggggagtaggctggggccatcgtgcaggtgggaggggaagtggcctggaccacggaggggtggtggggtacagccccgcccagatctcagagccccccacccttcctgtccttgggcccatggggagacttggccaagccagtttctatccaggaggtctaactggccaccccacagctttgggcagacccgcaagcccatctcagtacccacactactgcggaagggcctgctttgccactcacagcccgtttgagccccagctccagcagccatgggggatccctcaccttcccacagttcagtgggaacaacgacccctcactgcaggaccattcgggtcagttgaactgacttgtgcatattgctcccagcaggcatgggctctgtgccctttcctgtgttcttggagacacttggggccttgccagtacagtgtggccaacgggccagaatatccgctgggagccctttggaaatgcagaatcccaggctccacccagccctgccccgtcagaatctgcattgtaggaagatttgttcctggtggccggtgtgcacattcccatgtgggccgtgctggcccagggctccctgtggtgtgcctctgtgtagatttcacctggctctggaaggccctgagaatagctctgaagatgatcttaggtggctttttttttttttttgagacagagtctcgctctgtcgcccaggctggagtgcagtggcgccatctgggctcactgcaagctccgcctcccgggttcgcgctattctcctgcctcagcctcccgagtagctgggactacaggcgcccgccaccacgcccagctaatttttttgtatttttttagtagagacagggtttcaccatgttagccaggatggtctcgatctcctgacctcgtgatccgcccgcctcagcctcccaaaatgctgggattacagtcgtgagccaccgtgcccggcctaggtggcttttaacccagggaactgacagtcctctgaagccgcccaggtattgggagagggagaggtggctgtggtctgagctcagcaggagccatcagatcagtttctggttgggcccccacatttcacacctgggcatctagggaagagacagggagggctcacccctctggcttagtggacatcgtttcacccccagccgggacagtgctcagcaaggccgtggctgagaggcacccatgagaaggtgagaggcccccactgcccctgcttataaagcatctggggagggcacattgccaggcagcaggagggaggccagcactcgtttgactgggccagcgtccctttcctgggcccctgtgctgtgctggggtgaggcgggaagggagaggatacagcccccaccctccctcctagagctcactcctgggcagacgagccaggcagcacagatgtgccatgaacagggatgtccagggtgcagtgcatgggcctacagaggaagaaccagccttctctggcggcccggggacccattagggaaaaaggaataggaagcgcccagcacacactgaccctgggaggcaggggctggctcctgtggcagaagggaacatctgtgccagacatctcacctacattgccttggtgagttcattcacaggcctccattacacaggagagaaatatcaaggtttctctagaaaggtttatttcatgggccaaggcttgtgtttccaaagccaggaagggctgaagccagaattggccctggctgcttgccacagagtctggccgggggaccctggacctcagcagggtcatgatgaggtcagctttggaggagcagggccagtgtgtcctgctttctgctcctggaatgagcctcactccctccctgctcaaggcagcccttcacccagccgccgggacaggtgccctgtgccacctgccatccctgtgattctccatctcagtgagtgctccctggggcctgggagcgcatctggctggtgactcctgtgtcccaggtctagcttggaccaggagctttgtagcccaccatgggccaagtaaacggctgggagtggggatagggaaggctctgagggttgtgagggttagggggtccctccatgaaccaggatcttccaggcagcagccccagcctctgaatgctccttaactgtggccgccatgcagtggttgccacatccaagaagaacgcgtgcgtgtcgctggtcttttctttcctctataaggtggtgcaggtgagtctcgctcggaggggccgtgggcttgggtggaggttgtcttggctctgcttgtggacctccccatacctggccaccctacagagagctgtggcatccccagggagcactggggctggaagcccaggaagtgggaaaggggagtcccaactccccacgcctgtggaattctatagctcacgttgctcccctaccgtggggaagaaaggaaagtgaacaggaaaaggtagggctcagagcaggggtgccctgaccctggaagggacaagcaggggtcagcgagctttggaaggatgtggggtgaccagctggatggggctggaataaccagcagagctgcagagctgagcccacctcagaatctcccagggggctctcaaggcacagatgcctgacgcccaccttggagagagctgacacgccaggcccaggctgccagtgagacacagatagcagccagggtgaaggcgccaggacaggtgtatgtgtggtgcagctagggaggccagcgtgcgtgtggcagagtatgaggctgaggtcagctgggaagagggcggattatacaggagtgtggatttcattccacttctgatgaaaggtagtggagggctttaagcaggagactgacaagacgtggtttgatctaaagcagcctctctggctgctgagcagaaggaggacttgaggccagtgaggaggctgctgctggcttcccggagaggatgggcctggccgaggtgggctgtggggctcacgaaagtggggaacaggacccaggaggcctgtgctgggcctgggaaagctttcatccctcactgatgctgcctgtgcagaatgttggggaacaggggcaagcctgggcggtgagggcttggggaaggagccgagggtcacctgggaaggccccacgtgcaggccaagggctgccttcactggaccggtgatgctgtcacaggcagggctgggcctggctgtgctgcctgtggtttccaagcagaggccgggtgatcacagtcctgaagcgcgcaggggtcagcagatcagagaatgggggatgcgggaaggggaaggtcctcacccaagggttgggctgtgcctttctgttttagtgacgctccttccttcagcatttgtgcctgcaaaagtgcttctaacagcccctcttctttggcgtcccttccttaaccttctgagctttccattgaaatggggaagatgcatcaagctttccactgaaatggggaagatggcagctcatcaggtccttgcctgagtcactccagactcagaaagggatgacagttacagtcgctcaggaggggctgcctgtctgcgggtgtctgggcagggaagagaatgggaacgcagagcttctgaaggcctcgggacatctgcagtggctccagcctggccccaccccacagccagccactgctgtcctgccccataacctgggtccagggccctgtagcacaccaccgagcctgggaagtaggctgttggtaggacttagcgggcaaatgaatgtgtgcaagcgttcattcattcctcatccgtccgctcaatgatctgcctcccattcctccctccctccccaaccgccacaggtgttttccgagtacttcaaggagctggaggaggagagcatccgggacaactttgttatcatctacgagctgctggacgagctcatggacttcggctacccccagaccaccgacagcaagatcctgcaggagtgagtgggcaggggtggggcctggggccaggcctgggcggtgtcatgacatcgacgtcatcaggtgtggaaacagaaggggcaaatttgtgttcatgttgtcccccacctgcctcccacctccagcagtattcgggtttttactaagttgctcttagtggttttaattcgtttcctcctctacgcccccacataaccgtgcttttcctgctcctcatctttactctccatccacacagatgccttcagtaccttgctactaaggagtcacctcccttgtttttactgtcataaaatgagactgtgatcgaaatctcccctctttggaatcctgcccttcagataagaagcaatgtgaattaagtgcttcctgggggccgggccccagcacttcacattcactcgattcacagcctccccgtataccgtctccccattttacaggggacaagcaagcagactcccagagaagcctgtgttcctaaccgctgcacctcctgctccttcagcaggatggggtcaccaggttacactccgaggcgtcagttccatccacgtgctcagcagggacgggaagcagctcacacccacttcttgttttccttcccaacatggtcttcttggtcccccaaaatgagcacttcagcctctataacttgagtgtattggcttttggaaattgtgaagatttttctgtatgaagcagccccaggtgaaccagaggctgccttttctggagctgctgaaatccaagggctattttcaagtcggtcagaacctgccctgtaccccccacccaaccctgccgaaatgtcaaggccagaagctgtggcgttggtgcgggtaccacctccttcactctgagcgtgtggccccacaggtacatcactcaggaaggccacaagctggaaacaggggccccgcggccaccagccaccgtcaccaacgcggtgtcctggcggtccgaaggcatcaagtatcggaagaatgaggtgttcttggacgtcatcgagtctgtcaacctcttggtaggcctcttttctttccttcttctgtagggttttatctcttccacgatagaaataaacacagcattttaaaactggcaaagccccgagagccgttctgtgtggtaacagatagcaggattcagtttgggccactcattgaaatgtgagtttgtcttatcttttttttttgagacggaatctcattctgtcgcccaggctagagtgtggtgacacgatctcggctcactgcaacctccgcctcccaggttcaggcgattctcctgcctcagcctcccgtgtagccgggattataggcacccgccaccacgctcggctaaagcttgttttctttattagcatttatgctgactgagaatccatacatgcacattatttttaaaaattagaagcagggtatgaggttagaaagtgaagggctcttatcagtcaccatgcacagaaaaaaaaaaaagaaactaaagggctcctataatcagaaagattaggatttattcaccgtcaccctctcgggcctcattctgtagacagacagaaacaagtatattgatttttctataaacctgagatcataagatgtggttctcctgcagcttgtttttttggtggtggttgttgtttgggttttgattttgcgttcagtgttactgttttgtatatttttttcttttggttttttaattatgaggaaagttgacgttttgaaaatgaattttagcgcttgtacagatttgtgtacccatcaccacacccaggacacagaacctcaaaacctcctcatgttgcccctttgtagctccatgctcccctcttccccatttcctggccaccattgaactgttctccatcactggagtcttcatcgtgttgtgattgtcacacgagtggcatcatatgtcaccgcagctgtctttctgagattgtcgtatgaatggcgtcatacagtcatgagctctcgagtctggctgctttaactcattctaattctttgcgattcatccaaatccaattgttttgcatatcaaaagtctgttcccttttatatttatttatatttattttctgttctgaaccacagaaggacatttgggtggttttccaatctttggcaattgtcaatagagttgctagaaacatgtcgtgtccaggtttatgtgtggacataagttttcatctctctagggtaaatacccaggagtgggatggctgggtcacacggtaagtgtatgtttacctttataagaaactgccaaaccattgctgttttgcattctcgccagcaacagatgagggttgtgatgaccccacatcctttgtcagtagttttatttttgtcatcctaataggtatgtagtagtatgtcagcacagttttgtgttttgtttttgtttttgtttttgagacacagtctcgctcttgtcgcccaggctggagtgcaatggcactatctccattcactgcaacctctgcctcccaggcttaagcgattctcctgcctcagcctcccgagtagctgggattacaggcacccaccaccaggcctggctcatttttgtatttttactagagacggggtttcaccatgttggccaggctggtctcgaactcctgacctcagatgatccacccgcctctgcctcccaaagtgctgggattacaggtgtgagctaccacgcctggcctattccattttcttaatggctaataatgttgagcattgctttacatgtttctttgtcatctgtatatcctctttggagaaatgtctctgtgcatctttttagcatttttaaattgggttattttcatatagttgagccttgatagttctttgtgtgttccagatagaagtcctctgtcagataggtgatttgcaagtattttcccccagtctgtagcttatctttttattctcttagcagtgttttttttttttcgacagagtctcactttgtagcccaggctgtagtacaagtggcatgcttggctcagtgcaacctccacctccgggcttcaagtgcttctccagcctcagcctcccaagtagctgggattacagacgcatgccaccatgcccggctaatttttgtatttttagtcgagacagggtttcactatgttggtcagggtggtatcgaactcctgacctcaggtgatctgccttcctcggcctccctaagtgttgggattacaggcgtcggccaccatgcccagcccccaatactatattgaataggagtggtgagagagggcatctttgtcttgtgccagttttcagggggaacgctttcagcttttgcccattcagtatgatgttggctatggatttgtcatagatggctcttattattttaggtatgttccttcaaaacctagttagttggctgggcatggtagctcccgctctactaaaaataggaaaattagccgggcgtggtgatgcgcgcctgtaatcccagctactcgggtggctgaggtgggaggatcacttgagccccagaggtagaggttgcagtgagtccagattgtgccaccgcactccagcctgggcgacagagcaagaccctgtttcaaaaaaaaacaaaaaacaaaaccaaaaaactccagtttgttgagagtttttaacatgaagagatgttgaattttatcaaaagccttttctgcacctattgagatgatcatgtagtttctgtctttagttctatttatgtgatgaatcatgtttattgatttgcatgtattgaaccaaccttgcatcccagggataaaagccttcttgattgtggcggattagctttttgatgtactgctggattcagtttactagtattttgttgaggatttttgcatcaatgttcatcaaggatattggcctgaagttttctttttttgttgtatctctgccaggttttggtatcaggatgatgctggcctcatagaatgagtaggggaggagtccctcctcctccgtttttttggaatcatttcagtaggaatggtaccagctcttctttgtacgtctgatagaattcagctgtgagtccgtctggtccaggttttttttggttgttaggctatttattactgatgcaattttggagctcattattggtctgttcagggattcagtttctccctggttccatcttggaagggtatatgtgtccgggagattatccatttcttctagattttctagttagtgtgcatagaagtgttaataatagtctctaagggttatttgtagttctgtggggtcaatggtaatatcccctttgtcatttctaattgtgtttatttgggttttctctcttttcttaatagtctagctagcagcctatctatcttattcattcttttaaaacaccagctcctggcttacttgatgttttgaatggtgtttttgtgtctcagtcttctagagttcagctgtgactttggttatttcttgtcttctgctagctttggagttggaggcttttgcttcgtgagttcttttagttgtgatgttaggttgttaatttgagatctttctaactttttgatgtgggcatgtagtgctgtaaatttctcttaacactgccctagccgtgtcccagagattctggtctgttgtatctttgttcttatttgtttcaaataatttcttgacttctgccttaatttcattatttacccaaaagtaatttgggagcaggttgtttaatttccatgtaattgtatgggtttgagtgattttcttagttttgaattctatttttattgatttgtggtctgagagagtggctggtatgcttttggttcttttgcatctgctgaggattattttatgtccaattgtgtggtggtttttagagtatgtaccatgtacagatgagatatattctctcgtttttgggtggagagttctgtagatatctatcaggtccagttgatccagtgctgagttaaggtcctggatatctttgataattttctgccccagtgatctgtctaatactgtcagtggggtgttgaaatctcccactgttattgtgtgggagtctaagtctctttgtaggtctctaagaacttgctttatgaatctgagtgctgctgttggctgcatatttatttaggttagttagatcttgttgaattgaataccttaccattatgcaatgcacttctttgtctttttttgatctttgttggcttaaagtctgttttgtctgaaattaagattgcaactctgcttttgtctgttttctatttgcttggtagatttttctccatttcttcattttgagtctgtgggtgttattgcatctgagatgggtcttttttttttcttttgagacagagtcttgctgtgttgcccaggctggagtgcagtggcgcaatctcggctcactgcaacctctgtcccccaggttcaagcaattctcctgcctcagcctcccaaatagttgggattacaggcacgcgccaccacgcctggcggttttctatttttagtagagacgaggtttcaccatgttggccaggctggtctcgaactcctgacctcaagtgatccactcgcctcggcctcccaaagtgctgggatattacaggcatgagccactgcacccagccaagaatggtgtcttaaagggagcatatcatttggtcttatttctttatccagctcttgccactctatgccttttaattggggcatttagcccatttacattcaaggttagtattgatatgcatgtatttgatcctgtcattgtgttgttagctgtttattatgctgacttgtttgtgtggttgctttatagtgttacttgtctgtgtacttaaatgtgtttttgtagtggctagtaatggccttttctttcctttttcttttttttttttttgagacaaagtctcactgggtagcccaggctggagtgccatggcgtgatcttggctcactgcaacctctgcctcccaggttcaagtgattctcctgcctcagcctcccgagtagctgggactacaggcgtatgccaccatgcccagctaatttttttttggtatttttagtagagacagagtttcaccatgttagccaggatggtctcgatctcctgacctgacctcgtgatccacctgccttggcctcccaaagtgctgggattacaggcgtgagccactgcacccggcctttttttttttttgagatggagtcttgccctgtcacccaggctggagtgcaatggcatgatctctgctcactgcaacctctgcctccctggctcaagcaattctcctgccttagcctcccgagtagctgggattacaggtacccaccaccatgaccggctaatttttgtatttttagtagatatggagttacaccatgttggccagactggtgtcgaactccacacctcaggtgattcgcctgcctcagcctcccaaagtgctgggattacaggcatgagccaccacacccggccttcttttcatatttagtacttctttcaggagctcttgtacagcaggtctgctggtaaacaaattccctcagcatttgcttgtctgaaaggatcttttttattcttctttttttttgagacagggtctcattctgttgctcaggctggagtgcagtggcatgatcatggctcactgcaacctctacctccctggcacaagctattctctggcctcagcctaccaattggctgggactataggcaggtaccaccacacccggctaatgtatatgtttttggtagagatggggttttgccatgtttcccaggctagtctcagactcctggattcaggcactccacccacctcggcctcctaaagtgctgggattacaggttgagccaccacacccaagttgaaaacgatctcatttctcctttgctgatgaagcttaggttggccagatgtgaaattctggattggaatttctttaaaaatgtttaatatattggccaggagtggtggcttacacctgtaatcccagcactttgggaggctaaggcgggggcgggggggggggagaggggggaggggggaggggaggggatcacctgaggtcaggaattcaagaccagcctggccaacatggtgaaacctggtctctactgaaaatataaaaattagcagcacgtggtggtgcatgcctgtagtcccagctgcttgggaggctgaggcaggagaattgcttgaacctgggaggcggaggttgcagtgacctgctgagatcccaccactgcactccagcctgggccacagaatgagattccatctcaaaaaaaaaaaaaaaaaaaaaaaaaaaaagaatgtttaatataggcctccaatctcttctggcttgtagggtttctgctgagaggcccactgctagtctgatgggcttccctttgtaggtgacctgctatgtctctctagcttctttcattttgaccctggacaatctgatgattatgtgttttggggatgatcttgtgaagtattttgcaggggttctctgcattccctgattttgaatattggcctctctagctagactggggaagttctcatggatagtatcctgaaatacgttttccaagttgcttccattttccccatctctttcagggacaccaatgagttgtagatttgctctcttttttaatcccatatttcttggaggctttgttcattccttttcgttattttttctctattctcatctgactgtcttatttcagaaagccagtcttcaagctctgagattctttcctcagcttggtctgtactactgttaatacttgtgattacattattaaattcttatactgtgtttttcagctgtatcaggtcagttacatcattttctatcctggctgttttgtctgccagctcatatattgttttattataattcttagcctccttagattgggtttcaatgttcctaatctcaatgatctttgttcctatccatattctgaagtctatttctgtcatttcagccatctcagcctagttaagaactcttgctttgggaggccaaggtgggcggatcacaaggtcaggagattgagaccatcctggtgaacacagtgaaaccccatctctactaaaaatacaaaaaattagccgggtgtggtggcgggcgcctgtagtcccagctacttgggaggctgaggcaggagaatggcgtgaacccaggaggcggagcttgcagtgagccgagattgcaccactgccctccagcctgggcgacagagcgaaactccgtctcaaaaaaaaaaaaaagaactcttgctggagaactactgcagtttggaggaaagaggacactctggttatttgagttgtcaagagtccttgtgctcgttctttctcatttttgtgggctgatattcctttagtctttgaagttgctgtcctttgaatgggtttctttttcctttatcctatttgatgaccctgggggtttgattgtgtataaggtgggttcagttggatggcttcattattggaagattttaggggaccaaggctcagcttaggactcctgaactgcatgctctaactctggaggactggtatccagccctggctttgatctctggctccttcaggttaagaacctgctctgctagaggggccaagctgctcccagacagctggtcacaacactccaatgggtggtgccaggcaaagcacttcatagggtagtggcagcaggatctgttcttgtttgcatgtgccagcggcagcacagcggggtgcacgcttatcggctgtgacagagtgctagtggatgtcagggagccagcctctgggagggcatttgtagcagcagcagtagtggcagtatggctggggtgggggcaggggccacgctggcaactgtgcacctgttcattggtgccgatgatggggttagcatgggggcactggtgggtgcaggactgtgtgtgccctttgtgcatgttcacactggcagcagtggctgctcagggctaggggtaggtcctctgttttctctgcctagtttcctgtgggaggcccagcataggtggggaactgggaggggtggggctggcgggctctatgctgccaacactctgacaacaacggtggtgggagaggagaatgaggggctggggtgcacttatgctggcaacagtggcacagcagggtgcacacacaggcatgctgttggggaagggtgggctaggtccacccacgcacacaccaccagcaaaacaatattgagggtgcctgtgggcaagaacctgcaggcaaaactgcacaggggaggctgcagtgggagcggggctcaggtgggctagtgtgtccatggggccgctgtgcaggagtattccccgttcaggtacagtctgccagtgcaggagctctgatgccgcccccaagaggtacctggggattgcactgcaagcaggcttggccaggctggggccccaggagaggccagcagactgagggttgctcaggtcagaccagccccatctgatgggcaagactaccctggagagttcaggtctgacagttcccctacggctaaagtctcctatgagagcaagtcaagcctaggggatgggtgtcctggctgtgctccaccacatatgcttctgcatcaaaccccctggcctggcttaggctggagttctgccccgcctgaggtaggaggcagaactcgacttaggaggtgaggcttggacaccagaccaaattgaggctagctaaaagaggtcagggcagaagcgcctccccataagacccaccccacagtgtgctatgtcagtttgccattgccgtggcaacacttggaagttactaccctttttcatggcaatgacccaacaacctagaagctaccacccacattctagaaatttctttataaactgccccttaatttgcatataattaaaagtcagtataaatgtgactgcagagctgcctctgagctgccgctctgggcgcactgcccatggggtagccccgctccatagggagcagtgcctctgctgccgtgcacatggctgctttagtaaaagttctgtttatcaccaccagctcgcccttgagttctttcctggctgaaaccaagaaccctcccgggctgtctcagttttggggctcgcctgccctgcatcactaccacttctttaagcagcttcccctgccaacgcagctggccgtggcagtcgaggggtccttcctgccgggattccagaggccatggcaagagtgggttgccccttgctagttcaattcaccccctccacaggagtcactgggagccaggaatgattcctggtgcacagtagccctgtgcagggttcccagcctcctcctctgccttccatccagcctctatgtcttccctccgttcactctcagggccttcccactgaagatctaggagtctaggagtgcacctgtctgcacagtgtccctgtctcttagtgggagatgtttctcctggctgcgtctagttggccatcttggagcaggagcaaaatctaggcagtctttaaacagcttcaaattagggttctcacaaacccctctttgggtaagcaaggtatagagggaagggacccagagcttccttgccctctctggacacaccaccctccaggaacctccacgtgttcagctctctggaagcttcttttatctcttttgctttacgtcttccctcactgagacttccagcacagtgttgaatatgagtggtgagagctgacattcttgctttgttcctgatcttagagggagaccattaagtcttttgccaccaactaggatgttagctgtaggtttattataggtgttctttttcaccttgaggaagttcccttttattgctagtttgctaacagtttttttttttttttaatcatgcgtgggtgttgtattttcttcagttctttttctgcatcaattgatgtaatcacatgagttttcttcttttggttgttaatatggtgtattccactgactgctttctgattattgaaccagtgttgcattcctggaataaaatcccattggtcatagtgtattataggttgagtatcccttatacaaatgcttgggagcagaagtgttttggatttcagatttctttggattttggaatatttgcatatgcatcatgagatatcttagggctgggacccaggtccaaacgtgaaattcatttttgtttttttgttttttttttttttttgagatggaatttcgctcttgttgcccaggctggagtgcaatggcacaatctcagctcactgcaacctctccctcctgggttcaagcgattctcctgcctcagtctcccaagtagctgggattacaggcacctgccaccatgcccggctaatttttgtatttttagtagaaacggggtttcaccatgttggccaggctggtctcgaactcctgacctcaggtgatccacctgcctcagccttccaaagtgctgggggaattcaggtgtgagccactgcacctggcttcatttatgttttatatacaccttatgcacgtagtctgaaggtaattttacttttcccttggagatgctgaataaactgcattgtgcacctgcattttgactgcaacctgtcacatgaagttgggtatggaatcttctacttttgacatcatgtcagggctcaaaaagttttggattttggagcattttggatttgggatttttgaattaggaatgcttaacctgtattctttttatgtattgctggatttcctttgctggtattttgttggagatttttggatctacactcataagagatactggtttgtaattttctcttttttgtaatgtttttgtctggttttggtatcaaggtaatggaggaagtgttttttcctcttccgttttctggaagacattttatagaatccatgttaattctttaaacatttgttagaattcaccactgaaactatccgagcctggagatttattttacaaaatgcttttaactattaatttcaaaaaaaagtgttttcttgagtcagggcttcgatctgttgcccaggctggagggcagtagcgtgaacacagctcactacactttgactccagtgatcatcttgctcaagtgatcatcccgcctcagcctcccaagtagctgggactgcagccgtgtgccaccatgcccggcttttggggtttttttgttttttgtgttttttttgagacagagtcttgctctgtcacccaggctggagtgcagtggcgcgattacagctcaccgcaacctctgcctcccaggttcaagcgattctccagcctcagcctcccatgtagttgagattacaggcatgtaccaccacacctgggtaatttttgtatttttggtagagacaggatttcaccttgttggctgggctggtcacaaattcctgacctcaagtgatctgctcaccccggcctcccaaaatgctgggattacaggcatgagccactgcgcccagccctaaaaaggtttttttaaaagccattcttgtagaggaggtctactggctacacattcccttggctttcctttaagaatgtctctatattttacctttatccctaaaggctattttcactggatatggacttctgaattgacggtttttgtttagcactttaatatgttataccacttccttctggcatccatcatttctggtgagaaatccacagtcccccaaatctttattcccctataggtgatgtattattgtcctctggctgctttccagatttttctttgcctttagtttcagcagttagatgaggtgtgcacatctttgtgtttctactgtttgggatttgttcagcttcttggatctgtaagtttatgtctttcatcaaattgggaagttatcaatcattgtttcctaaaatatggttttttgtttttttgttttgttttgttttttgagacagagtttcattcttgttgcccagtctggagtgcaatggcacaatcttggctcactgcaacctctgcctcccaggttcaagctgttataagtaaaatgtttattcagaaacagaatgcttgttcctcggtaccacaaggaaaaatcagcattcaaacaaaaagttttctcagcaaggcaaatttactttctgcagaaagggtgctcctcgcagatggaacaatggcgagagcacacccgaacaaaggaggaaagccgtttttatcccttatgcagcttgtccctgctgctgtgtcctatctccattggctggagccagacctcacaatctaagctaaacctgactggctaataacttaaaactttcctaaatagataaaggcaagggagaacaaaggaaaaagaggaagttgactcattcccttatatctaacatcccttacatctaaaaacaaatatcttggttaaagtacaaggacacagaatgtactcattcccttatatctaacatcctttatgtctaaaacaaatatttcggttaaagtacaaggacatagaatgtacattatttctaacacttatgatttattctttagtgagaagggaaactttgaagaggaacttttttactttctacaaagcaattctcctgtctcagcctcccgagtagctgggattacaggcattcaccaccacacttggctaattttgtatttttagtagagacagggtttctccatgtcgatcaggctggtctcaagctcccaacctcaggtgatccacctgcctcagcctcccaaagtgctgggattacaggcatgagccaccgcacccagccctcagatatgtttttgtcattttactcttccttcaggactccagtgacatgaaagacctttggttattatatcatgtgtccctgaggctgcttattttattctatcttttcttctctctgttagattggataatttacattgaactgcctttaagttcacaggtcctttggccctttcctgtttatctccattctgttattattattattactattattattattattttttttttttttgagataggttcccactctgtcatccaggctggagagccatggagcaagcatggctcactgtagccccaacctcctgggctcaagcgatccttctgcttcagcctcctgagtagctgggactacaggtgtgcaccaccaagcctggctaatttttaaaaaaaaatttttgtagagatgagggtctctctgtgttgccctggctgatctagaactcctggggcaagtgatcttcccacctcagcctcccaaagtgctgggattacaggcatgagccactgtacctggcctccattctgctattaagtccattgagcaagttgtttatttcagttactatatttttaaaaattttccatttgattcttctctttttgtttgtttttgtttttgtttttgttttgagacagggtcttactctgttgcccaggctggagtatagtggtgcagttatagctcactgcagcctcaacctcgtgtgttcaagtgatcttcccatctgagtgtgctgagtagctgagaccacaggcacgcaccaccatgcctggctaatttttttttattttttattttgtagagaccaggacttgctgtgttgcccaggctagtctcgaactcctggttgattcttctttatcatctgtttctttgctgagactttctattttaacatttgttgcaagcatttgcaattttaaaaatagctgtttaaagtcttcatcagataatcccaacatctgtgaagtgttgacagtggttgattgggttttccaggcaagttgacattttcgtggttgtttgtatgctgagtaattttggattgcatcctggactttttgagcattatgtggtgatactctaggtcttatttaagctatatgggaaatattgatatttttgttttagccaacagccaatcttactttcaggccacaagttccaatccccaacctgtaggccatgagcatcacgtcagtttttaaagcccccgtgccatttcctggtcagatctcctgggcgtgcactgcccagtggtcattctgggacccgagtggttagttcagttctcaaactctttcgtaagtcaaactatggtatatgcacaggattcacagatgctcgattctagagagttctggagacataaaccacttcatggggtgactttcctgagcttctggctctgtgctgtctacctggtacttttctgattccttgcggtttactgttgtacacgtctgccattgggcccacttcccagcccacatggagagaggacagagagagaaaaggacaacggttgccccaccccctcggaacagtagctggcaccacagggcctggggcatgaggaacaggggagatggggggcttctgtgttttccaggagagtcaggagttcctcttctggccccagagccaggcctggaggctctgctgagctctcgtgtgctctgtggtgcacacttctgcttccagattgctgctgcactttctcgtggggggcggtgggaacactctgcattcgtggctcttccctggtccacctgctgctgtcttcagtcttccggcagctgccaagcctcctgcccaggtttcagagctgtagtcagtggcaggggaaggggcgccagccgacctgcctcaccagccgcttgctttcttttgtgttcacgctggcctcatccctgcggtgtgggtggactgtatgggctcagccaatccagtcatgcaggtcactcaggtcccgtttctgacggccactggcagtgcagcattgagcacgcttgctcagccccagacgtgtgcacttgggtgtctccgtgacctgggccaggatttctggaggactgaggctgcagacatggaattgccaaggagagtgctgcccagaaagactgtctcgcgcactccgtgcagacctcttcgctttcttactttccgggacgggacagtggcctcgctaaccacattcccctctcccctggggactcttgtctgattgtttattgagccgaaaacagggtccatctgggtgctgtggggtgcaaaggcaagtcccagggggcagcttagagagagtcgagcaggaaagcgctagggctgcgggggtccccgccacagtgcgctgctgcatgtggctccgcccggaaggatcccactcctccaaacaggtcagcacaagggcagctgtcaggatgccaccttcctaagtggcttgcagagctggtggctgggtcaacatttgcctccagatgcgatcatctgagtgcagcctggtacttacacagccgggccctgagcaagcatcccttcagcacccgccctgggaagggcaccggctctgcgtggctggtcacacctcagctgagaaggttctgattgctgcccgcagggccgagatcagcctcgtgggctgggcagcttttcagctccactccctgggcctgctctcgcggcattcacgacctcatgtgttcagttacagctggctgccagggccagtcccaactccctgagggggaggcagcacccaaggggaattaggggccgtcacagtggagtggagggccctccgagaaagaggcaggcaaaatcccaatgctcgggctcctggagccccggccagtgagggtcccgagctcctgagcctccgcttgcccactgagcacctcctgccacacacgctgtttctggtgctggacacggcagcgcgcagccccacgtggcttcccccagcagggagagagagagagagacaagcaggcagacgcagggaagctgttgtgcaccatgggatcagggagccgcttgcgagatgaggacaggacagcacgaggaggtgaggctggggaaggtgacagaaccggagcccttggggccatgtccggttccctgcccctcccagggctgtcatttgcttggcacctcagttttcccaattccctcagaggcggcaagctggtgaggggcttttgtttgtctacccagtgctttttggacatcatgcataagactgcacagactctcctgccactctgcagacaggaaatgcaggccctgcacatgttagcctggctggagccagcatctgggcccaggtatccaagtcggtggcctttggcccacttgctggtgtgagcatggcctcgtgcagcatagcagtgtgcagtggtggccagggctgcagccccagcgattcttctgccagtcactctgtgccctcagcacggggcctctgatctgtgcctgtttcctcacctctaaaatggatgcaagaagagatgctccagcatcttggctcacgcaggacaggctagggggtgcaggaccgtcgccccggtgtggattttcagttgcactttcagatgcatctcggcatgcgcagtgggttacagcccctcaggtcatctccccacagtccctgccccagaggttgtcgaggcgtgtgtggagcaatgcctggcgcagtggaaatgctgtcagtgttagccactgtgactggatttaagttgattattttggatcaagtgttatcacacttcagggtggccctgagaagcaagaaggggtcaggactcaggaagcaccatctctcataagccctggggggtgaggggccagtggcctccctgggaggccaagaggagaaacagctttcaagaaaagcaagtctggcctggttcaagagaccccagcccagcccagcccatcggctgagcagggaccacagggtcctggcccaggtccagccgagctcatggactctcaaagctgactcagcgtggggaccagctgccgggccggcccggagcattcagggggctcctgggagggagggactggtacctgatagagaaccctcagagggggctccaggcacgcatcatcaggtcccagtgtggcctgaggcctagagggcaggacccacagtgtccacctcatgtccacagggcctcggcatgaaggctggaggggtgagcctggggaccctcagccaggcgtgggttggtgtgggttaggggtagaccttagccacagctgggactctcccagctcaggggatgcccaggagagggatgggcttggaggtgagaagggcgttgagagtggggtggccagagggtcacatgatgtggtaggaggcagtggctggtgagttggggacctcccctcacgcccacaccgccacccccaggtcagcgccaacggcaatgtcctgcgcagcgagatcgtgggctccatcaagatgcgagtcttcctctcgggcatgcccgagctgcgcctgggcctcaacgacaaggtcctctttgacaacacgggccgtgagtacccttgccaagggccctgcccatgaggatggcctcaccaggcacacacattacagcctagggcagggttgggccaggcggaggaacgagctggtttcaagcacttggttgagcagcacttcacactgcttgagacagctgtgtagagtattcatccttccctggacatagaaggtgcaggggagtgaagatcctccagtccagctgggaggcccccgtcacccggcctcacacgccaggtcctgcaccctgccctgctctgcctggggcactggggcctaggctaaggccttgctctctccctcccaggccaggtttctcccctcaccttgggccctaggtgtgggccgtgtgaaggccacgcatggtgattctcgctcccgccgcctggcctctaacacttcccacagcagggcgggggcagaggggcccagggcctggttttgtgaactgtgcctcccactcagctgtcacaggccactggaagagggtgcagtggctgggcatgcccccgttcctagcccggtgagggcttctcgggcatcagtctatcagggcagctccccgcctggggctgggcagggccccacccacatagccctcagtgaggtggcaaaccaaggtaggacccaggaccccgtggatgccagggcctgagcccttggggagccccgagccatcccccagccaagtccactgatcaatcattcagtgaacgtgtcctgagcaggtcccctggctgggccctgggatggccgctggggactcagcatgaaccagacccaccagccctgcccctggggaccccaggggtgtgaggagtgatggggcagttgtcttgggacccagcccccttggtgtttgtggcccaggctgctctcagtgcgtggactgggggccctgctctgccggggtgggttgcaggtggtaggagtactgctgagatagtgacccggagggcccagatctgtcctaccctcacccctgaccccaggcggcaaaagcaaatccgtggagctggaggatgtgaagttccaccagtgtgtgcggctatcacgcttcgagaatgaccgcaccatctccttcatcccacccgacggcgagttcgagctcatgtcctaccgtctcaacacccacgtgagtgcgccaccctggggctgggctgtcggcagactcctcctccccttcacctccaggaggtgaagcccaggcaggcgccagggccagccccaccccacgctccatgagctgcctggctctgcagagatggagtctgaggacttgggactccgagctttctgaggggcacagacccctttggccaccaccacccctttcccaggcagcccccagagcaggccctggtcatgttttctgcatttgccccaaggcctccccggtagctcccggctacctcggcctgtctgccctggccctccctgacgctggctgtacgctccctgcagggctctgggcccacacctgggcagatggtcccttgccctgggccttggtttcccctctgaaatgggcctttgtcaaacaaggccaggtgtgagcaccctctttgccctccttggcaggtcaagcctttgatatggatcgagtcggtgatcgagaagcactcccacagccgcatcgagtacatgatcaaggtgcgtgggccgaggccacccactgagggccttctggtgtctctggcccgtcccaggagcctaaccgagggctgggggtgccgtagggctgccatccgtgcaccctcactgtggcctcagatgcaggagtgacctgacactgaggggacaccgcctggggcctgctcctagatggtgccacttgtggggaggggcctgtagccaggcatccaggacactcccagaggtgttgcccccaggtggagcacctctgcccctcagcgaccctgtccagcgcagcctggccctgggacatagacattgtcctaggagggcagggcagagggagggatgaggagccttggaagctgagcagacaggaggatgaagatgaaactcctgaaattaggtcttgggagagtctcgagggcaggagaaggggtgggtagtgcctggagaagtggggccaggggcggggctagggaggatcccccgggccaggctgaggggcatgtgtcctggagaggctggccagctcaccttggcctccataaccccgggccgcattggcctggcctgcaggccaaaagccagttcaagcggcggtcaacagccaacaacgtggagatccacattcccgtgcccaatgatgccgactcacccaagttcaagacgacggtggggagcgttaagtgggtccccgagaacagcgagatcgtgtggtccatcaagtccttcccggtgagcactctgtccagacatccacgtgccccctgcgcctgtctctgcaaggcagcctgggtgcctcaggaccccctgcacctcaagatggggtgacagtggccactgtgtcttccacacctggggcttctgaaagggtggacggagagctgaggactggagtgggaggaagcagaggctgactcggcccctgggcccctttctgccttcctcttgtttgtgaaccagcctctgtcttcacctcagggcagtgccctctccctccctctctgtgatgcccctgagtactgatgtgagatggggctcctgtccatgcaggccctgaaggagccccgtccacactggcaggtccaaggccctttctgtgcaggctcagccttgcctgccatcaaggggaacggctgcctgtaggccggagcagcacagcctccagagctccgcaccagccgcccatgtcctgggccagctctgcatcggcgtggcttccctgacaacatgttaaggattctgaggagctgagtctgggcttgccgggtgtacacagtgcacagagaggctaggcccaggcatggctctggagctgagccgggtggcactgacctgctccaccaggggggctcagggcaggcgctgctttccatgttctcccctctctctccatctgcatcccagggggacttggggacagccccagctgagttaagctggaaatgctgcaattcaagtgccttgaatttcatgatggtactttccctcccagcctcagtctaatcacatgacataaaatacagaaagtagaggaaggagagagaaaagccagttaccccaccacctaatactcccgtcagcctttccgcgtgtctcctcacctttctttctgcgtattttgcttttcctcattatgtgcaagtagagccagctcagtgcctgcccttccacgtggcgctgcggcagagcgttttccttctggtattgactgtcttcttggcggtcacctttgggagctgtggatattccatggaggggtggtgaccatcccggatagttggattagctcctcttttcctgcaattccactgttgaaaatagtgtttatcatttaaaacacactgggagaatacttcatcaaataaacagcatggtgagctgtagacgggggaggaagggacagggctaagggccgagacacaggctggcgtggactgtgcttgtgtagattttacttcgaagccatgcacaggcacacctcattttattgtgcttcccagatactgcatttttatttttgttttagtttttaaacaaatggaaggtttgtggcaaccctgcgttgagcaagtctgttgatgtcattattccaacagcatgtggtctctgtgttgtcactttttagcaataaagtatgttttaactaaggtatgtacattctcctagacataatactgttgcacattcagactacagtatacggtaaccttttttttttttttgagacggagtctcgctctgtcgcctaggctggagtgcagtggcacaatctcggctcactgcaacctgtgcctcccaggttcaagtgattctcctgcctcagcgtcctgagcagctgggattacaggcatgtgtcaccacgcctggctaatttttgtatttttaatagagacggggtttca

SEQ ID NO: 936 - DNA, 28245 bp, Homo sapiens
  source 1..28245: mol_type = other DNA
tgccagcctaacagcgcccggcctcagcccccattgtccctggagctggcgaggtgtccggttgcggagccggcggcgtctctggaaatgcatcctgcatccccgcatggataacagctgcagctatgtcagaattgcacaaagaggggagagtgtcattgtgtgccttttgacacatacattaagaccaaaaaggaaaaaaagcgtctatctgtgctgccaccgaccagactcatggaggccagattttctccaattaaccagatcttgccctggtgcagacaagacttagtgagttcggaggaggggtggggagagggaattggctggggtccctaccctgggtggaaggaggagggaggggttccccctcccccttcccctaccctcccctccgggtttagggaggggattagaggtggggaggagctgggggggcgtttggcctgtgccccaaccttgtgagtgaggtgggggttggaggtgtgcggggggcggggcgtgtgccggggtcgccgcgggatggggggttggggatgtgcggggagaggcgcgtgtcccgagatcgcggggggtggggttggaggtgtgcgggtggaggggcgcgccctggagttgggggcgggcgaggcgtttgcgggcgcggggggcgggtttggaggtgtgcgggggaggggcgtgccctggagttgggggcggggcgaggcgggctcctccccggcgggcgggcccgggcgcggcgcggtggcctcgcggtgcctaggctggggctgccggaccgtgaggctgtgagtcgcgcggacggagccggacaaaagcgggcggcggcggcaggatgaacagcatcaagaacgtgccggcgcgggtgctgagccgcaggccgggccacagcctggaggccgagcgcgagcagttcgacaagacccaggcgagcgggcggcgggcggcgggcggcgggcggcggcgggcgggcgggcaagcggcgtccctgacccctcacgcgcgaacggctggggcccgggaggcgccggccaggggcgggggacggcgcgggggcagggcctgtgtccgcccgggctctccgagagctccgctgccgccccccgccggcctccgcggcccgagccgaccggcgcgcaggtgaaccggaagccgcgctccccgctcccgccgggcgctcgggcccagaggcgccggggctgagggggccggggtcagggtgtgcgcgggccgggagcgccggagctgaggcggcgggggacggagatggggccggggttgggtgtgcgcgagcccagcgcgccgggggtcgagggggctggggatccaggtgctcccggggccggcgcggcccgactggggtccccgaccttccgtgccgctccttgccggctcctgcccccgtctcctaccccctgaaaccgatgcccccacgggcaatttccttaaaggaaattccttaaactcccagcttccttctctcgtgagcggtttcccagggctgcacagtctcctattatttgctgggtgaaaagcttctcgtatgtcgccagacttgtttgcccgagcgctgcccacgtataaataggtgcacaccccctcattaaataccggcgcccgacagacagaaacttcctggggctcccttcctgcgcctcccacgcttgtaactcttccagatgatgcctatcctgggaaggcgttagaaatgaaataagggcgcgggtgtgcgttttgtacttgtgtttgtgccggggacccacgatgcagacgttgctgcgtttctggtttcctgttgctttttattttacaaactcttgaagtgctctcaggcttgggggatgggcggtggaggggggcatacttgtttatttgccaaaataagtcaaccaagactgaaatggctgaaaaattttactctagagataaaggaagccagaggacccctcccactcctgtctaaagcaggttggtgacatttgcgtttgtggcggctatttgcaagttccgtcccacttgtccttgcagagagctatgacttctgcggttgccttcacatctagttagcacacgcactctacaacagctttcgttttgaaatgagagagaacgcagggagaccttctaacctttgtgcttgggattgacccagaaagcgataataaatcctgaggatatcaaggctttagaaatgcgaagtgctggaacccaggtggctgcaaattaccaatttagccttgtgatcttcatcaccatcaactggttcagcccggatagcccgtcattttaaaaaaatttaaagtcaccaatacataattaattgtgccaagaacttgtagatcatagggagaaaacctgaattggcagacatatctggatgttgtcagaaactttgtttattcactgagttttttctcgtgcctttgaggacgtataaagaggtctgattgctacatggaggagatgggatgtgaaggaccaacttcattgatcttactcttaaatgataagaagtcaagggcaaccttcctgagtgtcaaagagagaatctctgatacaggaccacacattttagtggttggtttgatacacaagaaggtggattttttttttttttttttaaagacagagtctctctcgttgcccaggctggagtgcaatggcatgatctcagctcgctgcaacctccgcctcccgggttcaagtgattctcctgcctcagcctcccaagtggctgggactacaagcgtgcgccaccacacctggctaatttttgtgtttgcagtagagaaggtgtttcaccatgttggacaggctggtctcgaactcctgacctcaggcgatccacccgcctcacctcggcctcccgagatgttgggattacaggcacctctccgaaggtggattgttttgttttgttttgctctggttttttctcagaggctaagagggccactaacaatgaataactttgtaatgggtgaatgtcacaggtcttacctattctagggccccattttctggaaagttggagtttgagttcattgtctgggtttgctcgtcttcacagtgacttattgaggaatgtaagaatgaggttttgtacgtggttaatatttaattagatcgttcccagaaataatcaggtgagccgccagccaggtcccgtggtggaaaaggacctggagagctgaggttgttacttccatgtctccttcgggacagaaaatagcacatgcagtccagggacctggcttcctttgtaatacgctgcttgtcttgcattgaccacagcactgtgtgctgtggcaggagcactaggctggcttagaatttaaatattcactagcctgccagcctcgctttcctcccctgggctcctgggtcaggaggaagataattgctttcctgtgagcttttttgacaggacacaccctgtttgcaaatatctgtggggttagcgctcaggagtgtgaagagaggcgatcatgtgcctgctgggagctggtgcctgtgattgttgcatggtgtgtgtgtataatcccaggggaatgtccagaaaaccagtgtatgcttttcttccctatgactttagtccctttggttaaaaaaaaaaaaaatccttttcaaaatggaggtgacaaacttttattgtcttgttgctgttttctgaatacagaatactacaaaatacagcatgcctgtatttggaacctgaacactgcctgtaccatttaaaaagagggtgtggtatcataaaggcactagtaggtagatagacctaggctctagcctgtgtccctggcaagttgcttaacttgtaaatctatgtccttgtctgaaaaaaaaaccatacagatcgttccagctatcgtatagggctgttgtaaggtgtaagagagagaccgtgtggcagctagaacctgtgactacgttaatgacttagtaaggcgttgcaggtggaattagagtttttcatcagctgagatggtccttgagatggggcgattctcctgggctaccaggtgggctcagtgtaatcacaaaggtctttaaatgtggacaagggaggcaggagaggaggtcggactgagtccatgtgagaaagactcactgcctgctgctggggaggagccactagccaaggagtatgggcatcctccacagcctggaaaaggcgaggaaatggattcttccctagagcctccaggaggaaacacagcctttctgacactttgcttttagtcctgtgagacctgttttagacttccgacctccagaactgcgagtttgtgtgatttgttatggcagccataaggaactaatacatccagtatgtaaacatgaaagagcacctagggcatagaagggcctcagcagatacttggcccaaccgtctttctcccttcccttcctcggctgaaaagtttaacatctagagaagaaagcatctttgaagcatatcatgaagaaggactcagttaggagtactggaaatgctaatggtgagtcctgccttttcctgatctgtgaacctttctgcttcactgggcctcagtttccactgcaggcccacaggatggagatcaagcccagaagattcctctcaggttaggatgagagaaaccctttactacactgcaaggcctctggccactgctgagtgagccaagtctggcgggtgagcattaactgtagacatgaaactacccaggtgtaaggggttcctgtggggcagggactgtctagggcagcaatatgtggaaacagttcataggtccaattttccaggttggtgacatacatgcttagcatcccccgtgaaaccaaaatcctgtcaagattaacatttattgacaactgagggcttctcagccccggcacacagtagagcagtgttgtccaggaggaaccagaggcaagccacgtgtgtacttttagattgtctagtaactactagaaaagtcaacagaaacaggtgcgattaactgtaatagcatattttatttaacccagtatatccaaaagctagccctttcaacatgtaattgccacaaaaattatgaataggagaatttacattctttttctcctactaaatctttgaaataggtatgcactggacactcacagctgatctcagtctggactcaccacctttccaatactcacagcccgcaccggccagcggctaccgtgccggacaatgcaagtgttagaatcacctggtggcttttagaaaagggcaacatttacgtgtataggagtgatttgcccgcagcatggcatgggcgttgagctcgttgttcctgggcatgcgcactgctgtctcgccccgtgacatcctctgctcggttccaccccatcagcccacatggtgatgccctcgtggtgatgcccggcaggccgctgacttcccgacccctgggctgcatattgcctccctggcagagctattccagaggctgttcttggtccaggttggggtgggaaggggccacccatccttgacctccccctccctgtctctgatgtgttttgatgcccatgacacattcctgagcgccgcttgctgtcttaccatttggcctgttcctgtagctttggggtgtgccccaggaaggtccgagtcatctttgtaccctctaagaggtggagagatgccaactgtggccacgtgtggaatggtagggcagtcaagagcaagctccaggttcagcccctggctctgtcccttcaccactctgcctcagtttccttatctacaaaatgggggcaataatactacacacctcctggagtggttgtgaagaaatttacaggtgttcatagtgcctggtgtgtagtgaatgccgtgtaagtgttggctgttatgttgtgttcagaagagcaggctgggctgaaagagagaaacaagctccctgttgagctctgcccggtgcccttagattagctgtaagcggaggccttgtgtgctggggcggttggggagaaaagtggatctgcacagaggttggggggactcaggcaggtggggacagcccttccctggaagagtgagcccagaggtgccacattatgaaggctctccagggttgggaggatattctgggggacgacagcctcaggaggtgcagacaaagccagcaggagccttgcctggcagaactgctcaccctctgaatagggacaggcgcagacgaggccccttctctgacctgatccagaagccagcctcccagccagcgctgcaccggtcattcgcgaatgaaacccagctggccactggatcccagcagcttaaagtggaaagcctctgagtggagtccaggcctgcttggccaagggacagggatacccagccggctaacctgagacgccttggctgctctgttggcaatgcccttacccgccccctccccgcccaacttggtaatctgcgatgctaacttgaatatcacctcctctgtgcagccacccgctgccgtcctcctgcccaagcctctctgtgctgcccagtcctcatgacattatttgcgctgcttccacatctgccctgacacgctgtggctggcccagcagagcgggaggaagcagacagacatggggtgggcgcatgtgtagaccaggctcgcctgagaagtgggagtgtgtcatctccttgccgagttccctgagcaactgctcagacctgcaccagccacctaccctggggtcatcaggcagggccgcgtcgtaagtggctggatgagtggatgctcaggggccagtggtctcccttctttgatgctgtcttcttggtgaggtctgaaaggctcatggccatccattctagggaatgactgaggcctggagaaaagtttatttggggcgagattgttttttctctggctaaaataaacatgatcctcaaactgcagtaggttcatctgcttggaggtgactcaggctcctggcttttgggacagacgggtttgtggagtgatgtcaccagggcccagggaatgaaactgcacgacctggctgcctgtcacttccagagccagcctggcagaggggtgacgcaggaacagtcctcctactactgggtgtcacccacaaagcctggggcggaggtggcagtgggtcaggcggcaacattgtaaccagtgtcctggggaacctgggctctcatgctcccctcgggagctttcctaaacgctgaaatgacggagtggccaggaccaagcaggcctgggtgagagtgaggggagatacaggttaaatggagcggagcagttgcccctgacttcctgtctgctggagctgacccagctgtccgcctcgctgctttgcgtgtggccatatcccggcctcctcagctacagaaaccctgtgtttgctctgtcaatggcctttgaggggacagacgcatttgaatgagatctctctgtccttcaaccaactctttggaaatgttaaagcaaaataacctaccgctctgccagcgtccgtccgtgtgccccagctctttgaagaacgttcttgtccctgccaagtgctgctgttaggtgccacgataatacagcacagggaggcttacgtctgattcatttcagcgttgattttaaaaatagaaattgttttataattacttttactctgcagctctagtggataaattattagctggagaaggagagactcagtgccctgaagtcgtccagtacttgtctttgaaagagctcttgtccttcgagtgttcacccttccatttgcccagtggggatttgctgacagccagatgttggtttgggcctagagatacagcaggaaggaagatgtccctgtattcgggggttggaggtggggacagagtatgatcggtggacagacaactccggagcctcctgggccacagggtgccgcggggttggcgtgtggggcagccgctgcctggagcctcccagctcagttgcctggctttgctgacagtgcccattcctgcggtctgtttccatctggactccacatcaggcctgggccagcagcctctcgggagcgtcccctgcctcaccctgatctcccctcttctgaggcagcactcactgagatgctcgctggggtgtgccccatgagtctcagtccagggaccagtgcagctctgggctgctcacgagtcagcgggctctgtctggcctgattgttcctggaagcagggcaggtgtatcctgagggcttgggctccccctggccactggactgagctgaaggccgcagcccagaggcagatgccctcgccccaagggatgggggtagtgggaagggcccttggctctgccagccccaaggccttcgttaacttgagatttgaacaaatcctgatccggagcccactcgcaatttggaggcatgttagcaggcccttggggagtggggctcctgtggtgggacgataaggatgtctatgctgacacacttctcccacacccaggcctagcccgcaccctgaactgtgaaggccatgcagcccagggccgcctgggaggggcctgaggggctccatctccatctctggtccatgtctggcccacatctttttgttatttatgaccttggacaggtggttaacctgcagcctcaatgtcctcccttgcccacctgctccgaggttccttgtgaacattaatgaggcaacactggaacaatgctgtctgctcgggggcccagtacaaggctgagctcaataaaattgaatttattaataggttattgagacctgtctgctggccttatggcatagagtatgttcttacacacttggcgatgccagctatcctgagtgtatctgcagagcctcacctgccccctgggcccctgggtgcccctgagctttgtccccactctctgtccttaaaggtcaggcccctcctgctgccagcactgggcaggataagagcaggctcagagagttgtgagcaggtggcccctggggcgtgggtgtggactccgaggatttttcgagacccgaaaagctgcagggtctgtggaaccaggcaggagctgacctcactctgcttctgcccctctctgctgtctctgcggaccctccaactcccttctgcaaggtgtctcacggcgctgtggaactctctattattgttttgttttgtttgagatggagtttagctctgttgcccaggctggagtgcagtggcatgatcttggtcactgcagcctcccaggttcaagcgattctctgcctcagcttcctgagtaactgggattacaggcacacaccaccatgcccggctaatttttgtatttttagtgggagtttcgccatgttggccaggctggtctcaaactcctgacctcaagtgatccacctgcctcggtctcccaaagtgctgggattacaggcatgagccaccacacctggcctattatttttactttttagaggcaggttctcactctgttacccaggctgcagtgcagtggtgctatcatggctcactgcagcctggaactcctggacccaagccattctcagccttctaagtagcaggggactacagccgtgcaccactacacccggctaagttttaaattatttttggtagagatggggtcttgctaggctggccttgaactcctgggctcaagtgatctcccacctcagcctcccaaagtgctgggattataggcgtgcgccactgtgcctggtccccctccattatcacttctgtcctgcttcctccagagacctcccctgacccagccagacacccctccctgttgtgcccagcagtgggaagaacagcatcctcctcctcatgctctcatgctgcacattatcactgcatcccctgcagagccctggtcccacagccactcacagctgtgtggaaactgccctgccaggctgtgtgtgaggcccctgcctcttgggagctggatgggagctgtgggtgctgagtagcggacagaccccggggcggtcacatgtgtccttatgatcttcctttctctagcactgggtttttccaccctgagctgaggtccataatcaatcccttccactcctcaaaggctgcgctgccctgaaggggtgtctctggcagctgaccagccagcctctggcctgtgtcagagctgctggggttgttctgcccgaggggccacatggggcacaaatgcaggctagagaacccagggacaggcctgggcagccctctacctcccatggcacgctgcagtttccccaccttcaaaatggggagaactacgttcaccccactcggcagctgtgaggacagcatgttgagaacctcaggacccagaaccaagtattgctggcagttggacctgcctcgggactgtaagcctcagagcggagctgcgtcaaggacaccgtgtgggtctcaccacagagtgagcccgagtgcctgctgctgcggccctcagaaccctggagccacttccgcaagggagggtcagcagcagacgggagtaggtgggacatcactgggacctggcgggcttctcccgggacagggcttagctgctactgcctggtcagaggcgaggcccacggagcagccacagactcccactgtgcgagcactgtgcctccttgtgtggcgctctgagcctggtgcacacatctgcccatcctagacacaacggggctgtgttcccagagccagccggcaccctgcccgggagggccctgctgccacggatcctgtcccctgccgccagcgcggggagcaggcagcactgaggcccaggcgcacaggagaccatgccatgtgcccaaggcatgccccgtcacactgcattcctggggcctccctcctgccatgaaagtcatttgcatgccaggcactgttgaggagctgggggttcagcagcacctataggccgatctgcttcccctcgtgttgctgactgctgggtgaggggagagggtgataaataaggaaacactccactgtctgagggtgcccggccctcagagaccatccatccagaaggtgcagatttcaacagggcggctgcaggagggtgtgagggtgccgggtgcggggagctggagctctgctgagtgggcatctggagcctagggcctggggacacgggtggctgcaccttggcctcactgtgtctttcctcgcaaagaggagagggcagcccattcccccagaatgtgttctctgcttctagggtccctatctcagccccatcccggggtttcctcagtgtcaggagaaacccccgcatctctgtgtctacagcctctctggtgccaggtctgcaccagtcacttcgcctccacccttcttgccaggaatcttccgaaccaggtggcagctcaggtgtcggcagctggggatggggttacacaccccggagacggacacgcctggcttgtgacaggacagctgcttgccagtgagctggggaaagtcacagcccctgcctcctgccctgggagcccctccccacgggaggaactgcctgggggctgttcagagtcactaaggacacaggttgtggaatcagacagacctggctttgaacactgcctttatccttattagctgtacagacaagtatataagccttctgtgcctcagtttcctcaccaggaaaatgggttagtcaccacttccctgggctgttgctgggaggcgagttgcccatgcctggctggggctgggcactcaggatccttatcatcatagctgctgtcgtgagcaatattctgcctctgggggcatgacactctcagccatggcttctcacagttggtggatacgagtttgttcaaggaaggagctgaggcctgggggccactggctgggcagccctcaggatcaggcccaccagagcctctgtgcatttcctcaggtcgtggttccttgagatgggaccgcagctcctccccgactacagggagcagggctcagggcagccccaggacacctgcctgggagggtccagtacaatgggccctgtgtgtgaaagggggtcagcatcgtgctaggggccgggggcggcccagaggctgcctggcccagccccgcagtcccctagctcccatctgaggtcccaccaggtagggccccccagcttcccgggctggcttttctcacagaggaaattccacagtagaccctaattggatgtcctctgctccggtgttgggtgggagagtgcagtggtgtctggggagaaggcgcaggagcgctgcactgtcctgcaagccggctccctgcccttcaaggcctgcctggcttaggccagcctgtggctcaggagcccagctgccctggctgaggctgggggctgcgtgtcccatctcagtgtctgcatctgtcgaggccctgtccctcccgcccatggcctggacagctcttctcaggtcacaaacattggtggtgggggacagaggtttagcagacctgttccctgcatgagaaataccccatgccccacggagccagggccgggttgtagtgatggtaccgccgtgagccctcctcgagagcacagtcacgtccaggaagcctactcggaaaaggaggcagtagccggggcggggggggaggggtgagactgccataggtggagcgggagggatgctgagattctggccttggtcaagtgtgaaggtgccacttgcgcagctccgggtgacagctgcagaccccactcctgccttcctccgcccctggctgggctgcaggtggcagcaggagcttgacacagtttgacagggtgaggccccacccaggagaggggcagcctatggggcagtgggccacaggccctgggctttgcctaagtttcctgggaatgcctcccaggagagtggggacaatgtgatgtgcacccttcatggggtgccgcaaaggccaggtgggccccagccgggggctccagtctcagctgcttttccccaaggggagatggggccggaggacaccacactgggccatgacctggggctcagggcaccacatctgccaggagagtcaagtcgtgcaggttttgggcaggatggcctcccggagccatagcccagctttggtccttgtcccctgactcctggagctcttggtgttcactgtagttccagctgcaccgatcaggcacagggaagtccttcagaagcttaggttgaggggattcctgtctcccccatcgctccactggccttgaacccaggcagaatcctgttcagtattgtgcttctcccccttggggtggtgtctcctggggtggctgcctggggctctaaacactgctcctttgtccctcacaggccatcagcatcagcaaagccatcaacacccaggaggcccccgtgaaggagaagcacgcccggcgtatccttggccggctcttggacccaggagttgggtgtggatgtgggagcagcgtagtgctgcaggtggcctgcggtcagctgtgccggggtcacaagttccctcactgagcccggggaggagggtcctgtgcagcttggctccttcccatctcagtctcatcacaaaaacgcccccattgggcccaatgatttccttgtcttgccctaactcctgtccccttggctggacactggagctctggtgacccggggttgatgggcacgtgattgggggccggccctcttccggcggccctggcctctctcagccgggtttgctgagcccccgtgctccagtctctgcttccacacttggccttgacattgcaggcatcattctgggcacacaccacgagaagggggctttcaccttctggtcctacgccattgggctgccgctgcccagcagctccattctcagctggaagttctgccacgtcctccacaaggtccttcgagacgggcaccccaatgtgagtagcagctgctgcctctgctccccggagctggggcactgtcccgcggacatgcgggctctggccctgttcctgtccccgtagctccgggctgttcctcccgcctcgggtggggagtgcgtgtctcagggccctgccacacggtcctggacactcccccactcccgtattccctgcgctgcaggtgctgcatgactgccagcggtaccgcagcaacatccgggagattggagacctgtgggtaggtccagccattctaggtcctgcctggcattcggggctttcctgagcgtgtggggctgagcgaagggtggctccctgtgggcagttccctgcgggtggctgggttttcccaggggcgacagtgggaggggcagcacggggagatgctgcctgcctttgagggcctggcccagggcgctccacacgcataaccagtgggccctccagcgtcgaagtcacccgggccctttagtcctcacgagttgggaaatgtggcaagaccacagcccgggcacctcggtggttagagagcctgtggcagggcgcaggttcctgggctcccccagacctgctgctgaagaatcaggactggaggtctgcattttgagcacacacacagtaaggcctgagagccctggggggcctgcaatctggatgcactgcaagacctcaggagttagagatgtccctggtgggcagagggccttggcctggttctctctggagcactgtggggtgctcgtctgcctgggcagggacataggagcagggcaggccctggaccgggtacccacagggaggcctgaccagggcgttatccaacccagaaccactgcccggactcacttcccttgaagcgaggaaaacactgcccatggtgccacctgcagatgcaggcccagctggcccggccgcaggggccgtggggctggaggagggagcagggaggatgtgtccaggcgcccgtcgggacgtgcctccctgccagcaccagcactttaataaagcgtccctgctcagaactggcctgccgccctggacaaagagctctcttctcacaagagtttctttggcaggaatgacaaggaggaagattaagggaaaaagctagagacagagagggtggttggtggaggccaggagaagacgtttgttgaatgaagaagtgcccggtggtgggtcactctcgtgcccaggtccttgaggactcttggacgtgttcacgagccgtggcccctcaccctgtctgtcttcacacagggacatttgcatgaccgctacggacagctggtgaatgtctacaccaagctgctgctgaccaagatctccttccacctcaaggtggtttcctcgggggagtcatggggctgagggacccgtgggcttttcccactgtgacgttatggcacatgttgggacatcgagggtgggatctgtcctctccatgagtctttccattcaccttcttgtcccaactatgactaaaggggagacggggaagccagggcatcacgaagctcctagaacacttcaggcatttccgtggacgtgggcacgggcttccccaggcgtttctgtggacatgagcgctgggcttcctcagtctctgctgtgctggccgggtgctcccctcctcccaacccctccactgccctctgccacctatgtgggccacagcctgggtctgccaagagcagggtccagcgtggggccccctggttcagtggccgctgggttgggggggccctggttcagtggccgctgggtggggggggccctggttcggtggccgctgggttggggggccccctggttcggtggctgctgggtgggggggccctggttcggtggccgctgggtggggggggccctggttcggtggccgctgggtggggggggccctggttcggtggccgctgggtgggggggccccctggttcggtggctgctgggtgggggggccctggttcggtggccgctgggtggggggggccctggttcggtggccactgggtggggggggccctggttcggtggccgctgggtgggggggccccctggttcggtggccgctgggttggggggccctggttcggtggccgctgggtgtggggggccctggttcagtggccgctgggtgggggggagccctggttcggtggccgccaggtgtgggggggccctggttcagtggccgctgggtgggggttctctccacagcatccccagtttcccgcgggcctggaggtgacagatgaggtactggagaaggcagctgggaccgatgtcaacaacatgtgagtcactctgcatggctacatagccagttcccctcggcttccccattccttcctaccgcgtctcacgcccaggcgtccgcatggggcagtggggttgaatgagtccgtggctttgttggttgatgctcacgctcccagggacagagggtgaagttaaaagggtggggtgtacttgaaggactgtcgtcctggcagaggcacgctgtctcaccagagccatggtgtcggcggtgcccccgtccccactggagggggcgtctcaggacgagtgggtgggtccacccaccctttttcatttcttcccccacttctcttgcgtagcttccagctcactgtggagatgtttgattacatggattgtgagctgaagctttctgaatcaggtgagccgtaaagaggggatgcgggggtctgagtgtattgctaagtccccagagatgggacgagaagaaaaaagaagacatgagtgatcagaccaactgatcactatgaaatgaccctggccagccgcagtggctcacatctgtaatcccagcattttgggaggccgaggcaggcagattgcttgaggtcaggggttcaagaccagcctggccaacatggtgaaaccctgtctctactaaaaaaatataaaaattagccaggcgtggtggcgcacgcctgtattcccagctacttgggaggctgaggcaggagaatcacttgaacctgggcggcggagatcatgccgctacactccagcctgggcaacagagtgagtctccgtcttaaaaaaaaaaaaaagaaaaagaaatgcccctgcccctcctggggtccctgcacctccagggataggtaatggggcctcctggcccctccaaagcatggcaggccccagcgggtacatccaggatacaggttcagccatctcttccatccagtgagtgtcactccatcagccccaagacagggagggtgaggaggtgtgcacaggagccaccttgccaggttcctgccccagccttgggccatctgcagagcccagctggaagaaaggtttgggtcgtcctgccattttctgctctagaaagcctctgagtcacgtcagacttcctagcgagggaacccggccgctgttggacaggaaatctcagagggctcagcttccaggctggagaactgattgttctgggtggcagcttcaaaacaactcatgggtgactcagtgctctccataagagggcaagaagcaaatgcctccttaagggaaaattgggagttagaggcagtttgggcagcctccctgagtccccaggtctggccagtgcagctgggcgagcctgatgggtattcagttccagtgggtgggaggtgggctcagagttggacccttgtgcctgggaagagcctgctcaggatctgacatggagagcagagggcaggtgtccaaaggtgtggccccaactgtgcagcaggacagggctaccaggctctgtgtcctggcagagatgtgctgagcctgagcctctcagcacagagcccaccaggtaggagccagttacccctggcatgggagaaggccagtgtgggcaggcagtggccccacgagggaagtggagaacactcacaggcacgcttcccacctggtgacgctggtgtgttgatgaagcacaaatggggtgtaccagcatctgctggagaaattcccagatctgcagaggtgacaggtacaggggcttccctgcctcaggacctgtaacagcaaagaaacacaaacgtcctaaacatgcctcagcagaggctgcgtctcgctgtctgtgcagagcagagaacggagggtggtgggaagagagatgtgtcgaatctgggatggccgggaagatctagaaaacattctactgtgtgaaatcaagcagattgccgaacagcatggacatacgtgttgaagatccaagcagtactttatgtgtgctgtaattttttgcaaggaaaacatacttagcatgacatgtaattagagattacttttttaaaaaggcaaggggcggcactttgtgtcttccttcttgcccctcccccccaggctctctcctgtcactgcagagatttgcaagtggtcccatcacaggcaaggcaggagcaggacctgaggggccagggcacaggtctgtgcagcgggggctgtctggccgctctcccgtgctggccagctgcctgctctttgtcattctctctgccccagagaagctgccagccaaggaggaggcagcctcatgtttgtcctttgtccctcccacttggtagttctgatacaaggcccgattgtcaggggcaggggagacgggccctgggggtgtcaggggcaggggagacgggccctgggggtgtcaggggcaggggagacgggccctgggggtgtcaggggcaggggagacgggccctgggggtgtcaggggcaggggagacgggccctgggggtgtcaggggcaggggagacgggccctgggggtgtcaggggcaggggagacgggccctgggggtgtcaggggcaggggagacgggccctgggggtgtcaggggcaggggagacgggccctgggggtgtcaggggcaggggagacgggccctgggggtgtcaggggcaggggagatgggccctgggggcaagcgaggtttcagggtcacttggggtgtgcagagccaagctgtgaccctagtgccgtgttacttggcagaagccctgcctgttcccacatctgtaaagttaggcatttggggtgctccatcgtgagcctccttcctgctctaacattcagcgtgggtttgaggcccgtgggcatggagctatccgtcacccttgtcagtcgggcacctcgtcctgggctcccaggtggaggtctctggaagcccttgctgagctgggctgggagctcctttgccctgaccttgttgttgccgttgacctccttcatgggagcatctggtcttgacctggggcagccaccagcacatgaggctcccgtcttggaggcagggggcacactggtgtgtgggagctggcttagggccctgcttcacagttggaccaccttggacaggttgcccagctcccaagggctcacgttcttcctcctgccccttttgcacagttttccgacagctcaacacggccatcgccgtatcccagatgtcctcaggccagtgccgcctggcccccctcatccaggtcatccaggactgcagccacctctaccactacacggtcaagctcctgttcaagctacactcttgtgagtggcccagggcaacccctggcccggaaggctgtgtttatatggcttagacattcactgtcaaaaaggaaaatcgaaaaattagaggtttattcatttaaaaatggcagtaataaacccactgcccattaatagaaataacatatattttatgaaaaaaaaaaaaaaaaaacccactactttaccaagcaaaaaacttagtgagtggcttggttttcatttttacgactaaatgcctggctcggccaagacggaggccccagctgctcccaggaatctcccgccaggcaccctgggggtgcaagcgcaaaaaggcaaaaggtgtctggggtgttaggagagttttgatctaaccaaccccttgaaagggtctcgtccctcgaccgcactttgagaaccactgtgttagtgtcagcctgggaccaacgtgtttggtgaaagcggcttgctagtgcctcccgaagccaggtgtgggttaggtgagatgtggccgcagcgccttcctttccattcgctgtttccttctctagctcagtctgaactgagccctcccacagcgtctcccacaggtctccccatcccgatgggagagcgggcctggcccggtctcaggtgatctctgatctgtgagtttgtagcatacggaggaacaaggcagggcaggtgagcccctgagcagtgtgcagagaagtcctgttacacttgtgccaccctccaggtctccctgcggacaccctgcaaggccacagggaccggttccacgagcagtttcacaggtactgcctgggacagggacaggattgaggccggtgggggagaggctccgtggccccttcctgaacccgaacttcccaccatctctgcagcctcaggaacttcttccgcagagcctccgacatgctgtacttcaagcggctcatccagatcccccggctgcccgaggtaccacccccaagagggccccgaggccctttgaggaccccaggcacctggctgggccccacacaggctatggagatggcggaaggagggcttgcttaggggacagctgagcaggtcccacctgccgcccctgcagggaccccctaacttcctgcgggcctcagccctggctgagcacatcaagccggtggtggtgatccccgaggaggccccggaagatgaggagccggagaatctcattgagatcagcacagggccccccgcgggggagccagtggtgagccccctgcccagcccgtgtcccccagtcctccagctgcagcatgaggccaacgggagtgtcgggtggccagccctccctttgcccactgcccggcctggagggcacaggtgagtggggtcaccatgctttgctgtggcaggtggtggctgacctcttcgatcagacgtttggaccccccaatgggtctgtgaaggacgacaggtgagggctggaggagccgactgggctgggggtggttggaaacgggctcagctgagctgtgctctggacagttctgtctggaaaggccataggtggggaacatgaacccgtgaggtgcccaaatcctgagtggccactgaggaggagacaggttcctgtgctgggtctgttgactgttctggttgacttaacttgaaccccaggacctctgtccccagggacctccagattgagagcttgaagagagaggtggaaatgctccgctctgaactggagaagatcaagctggaggtgcggggtggggatgggtgggggccagggcccctcacggcccaggcagggccccacgtcacacctcctcccgcaggcccagcggtacatcgcgcagctgaagagccaggtgaatgcactggagggtgagctggaggagcagcggaagcagaagcagaaggccctggtggataatgagcagctccgccacgagctggcccagctgagggctgcccagctggagggcgagcggagccagggcctgcgtgaggaggctgagagtacgtggggccttggccacaggggtccaagggtgtgtccccagcccctgccaccccacacggggcatcactgcccctcctctcgcccccagggaaggccagtgccacggaggcgcgctacaacaagctgaaggaaaagcacagtgagctcgtccatgtgcacgcggagctgctcagaaaggtaggtgcagcccatcctccatcccagccggtggcagggcctctcggggatggcagcagagcatgagcccttcccctgcccatgcagaacgcggacacagccaagcagctgacggtgacgcagcaaagccaggaggaggtggcgcgggtgaaggagcagctggccttccaggtggagcaggtgaagcgggagtcggagttgaaggtatgtcccttgtggcacagggccctgccccggcatccccagcccactgccccagtgacacgctgtcctgtcccagctagaggagaagagcgaccagctggagaagctcaagagggagctggaggccaaggccggagagctggcccgcgcgcaggaggccctgagccacacagagcaggtgcatctggctttgatgactggaggtggggttctggggccagtcctgggtggaagtcaggtcctctttcccgtgaacaggccccacctgggtgccactcggtgatcctgggatgcagccctgacccagacccaggggctacatgggagacaggacctaccgctggtcctcagggagccctgagtctaatggaagtgatcactaacccccagggcccagtttataagcgtgggggcagggtgggtggggcctgggagctctgttcacatgcctggtgtccatgtctgtccacagagcaagtcggagctgagctcacggctggacacgctgagtgcggagaaggatgctctgagtggagctgtgcggcagcgggaggcagacctgctggcggcgcagagcctggtgcgcgagacagaggcggcgctgagccgggagcagcagcgcagctcccaggagcagggcgagttgcagggccggctggcagagagggtatggcctccccagatgcagcagcaccactgagttcactgccgtctggcaaccatcgatctgtctccgtgatctgcctgttctagagatttcatgtaaaggggatcatacacgatgcatccttttgtgtccggcttcttcactcagcatcacgttgtcaagggtcaccacatcatagcctgtgtcattacctcattccttttatggctgagtcgtactctgccgtgtggacagaccacattgtgtttatctgttcatcacttggtggacattgggtttgttgcaactttctggctgttgtaaatagtgctgctgtgggcctttgagcacaagtttctgtgtaaacatctgccatcacttatcttggatagatagctgatgtgtgtggaacacagtagaactgctgggtctcacctctgttaccctgttgagaaactaccagactgttttccaaagtggctgcaccattttacactcccaccagcaacgcatgaatgttccagtttctccacatccttgccaatgcttattattgtcttctttttattttagccatcctagtgggtgtggagtggtttctcacggtcttgatttgtgtttccctgatagcaaagggtgctacatatcttttcatgagctacctggccatttgtgtatctttggagaaatgtcttttaggaccttgagctcacgttttaattgggttatctttttattcttgagctgtgcactgtgtgggaagcctctttctagaaatctccacccccctgaccagtgagggtctcagctgggctccaactggtggcccatgggtcattccagggctggggcacatccttggccttggggaggatctctaacctgtcctcttcacccccattgccaggagtctcaggagcaggggctgcggcagaggctgctggacgagcagttcgcagtgttgcggggcgctgctgccgaggccgcgggcatcctgcaggatgccgtgagcaagctggacgaccccctgcacctgcgctgtaccagctccccaggtagacagtggggccacactcagccgctcccctgcctccttcccatccccagccctgagcagcgggtggcaggggcctcagttctcctcgtgcttgcagactacctggtgagcagggcccaggaggccttggatgccgtgagcaccctggaggagggccacgcccagtacctgacctccttggcaggtgagtgtagccagggcagggcggaggcgggggctgtgtcccagttccagcgcccatggccacctcttgccttttgggaggtttacagacagcagggacctctctgggaagccaagcagatgccccctgcctgctccttcccaggaacccacccctgccctgtggacaaataggcttttgcctctggggcctgggccaccatatgtctgcaggtggcagagcactgaagggcccggggccacacacactgtggtgtggttcccactgcctcctggacgttgtcttgccgagccctcctttcctcttcctcctcctcctgggatagctggccaccgacggtggtcccagtgctagtgtctcagtgtcatcctcccccaaccttggccccacccacccgcacagacgcctccgccctggtggcagctctgacccgcttctcccacctggctgcggataccatcatcaatggcggtgccacctcgcacctggctcccaccgaccctgccgaccgtaagtgggtcctgggatggcaggttctgtccacctcactggcttgtctcccctgggggtccttatggagcctgtcggtggggggggctccactcacggtcctttctcaccccaggcctcatagacacctgcagggagtgcggggcccgggctctggagctcatggggcagctgcaggaccagcaggctctgcggcacatgcaggccagcctggtgcggacacccctgcagggcatccttcagctgggccaggtgaggcacagctgagtgtgggtttgggaggcttgggcctgcctctgacctctgcacccacctctgggttggctgaacaggtgtttgtgcgtggagcctgcagcctcaggacacagggtggggaccatgcaccctcctcgatccctgtggtccccaacctctttcccaggctgcccgtgggacggggggggacggaggctacccctgtctgactcccatcctcaccaggaactgaaacccaagagcctagatgtgcggcaggaggagctgggggccgtggtcgacaaggagatggcggccacatccgcagccattgaagatgctgtgcggaggattgaggtgagcacgggatctggggactcccctcattcctgtggagctttgggggccggaggccccaactgggctgggtacaggctgcacccactcctgctctcagcctccagacagaggacagatggcgttttccaggggcctgtgaggtcagagctgagagggcaggaggcagccctggctttcccaggaccacggtcccctcctcccagccagctcacggctctgttcttgggtgcaggacatgatgaaccaggcacgccacgccagctcgggggtgaagctggaggtgaacgagaggtgagccccccttctgtccccccaggcccagccgaggtgggctccccgtggcccctaaggttctgcccccaactgttctgctcacgggaaaggaaggcctggctcagagcagacactccctccccacctgctgagccctgatgtggccaggcccgccatggcgtcgtgtgggctgctctgcagagcggcagctaagtctctccttctctcccccaggatcctcaactcctgcacagacctgatgaaggtgaggggctgtgacccgggggggtctgcacctggagggccaccagtcattgctgtcttggtctcggcaggctatccggctcctggtgacgacatccactagcctgcagaaggagatcgtggagagcggcagggtgaggggccggcggcagcagggcacagtccacaaggagcctgacccccagcctaggccaccctgggcatgagaccctccaccccctaccacagggaggcctcagggatgcgccctatggccagagtgagggggagagggcccttgagggccactttccacctttggtgtccttgactggcatgtcctgccctgttctcccgtcgccactagggggcagccacgcagcaggaattttacgccaagaactcgcgctggaccgaaggcctcatctcggcctccaaggctgtgggctggggagccacacagctggtgtaggttgccctgggtgggggggggcagggggctgcttcctgccagttggagcagtttggggttcaacagggtgcagggagtagagggggtgtggagtggtgccagccgtccgtggggtcagagaccctggccctgactggcccttgacccgcagggaggcagctgacaaggtggtgcttcacacgggcaagtatgaggagctcatcgtctgctcccacgagatcgcagccagcacggcccagctggtggcggcctccaaggtgagcttgcacgccgacagcagcacactgggctctgggcccagcttggcctgggctgtggctgccaagcccaggcctgctgctgccctgagctgggagacctgggcccaccctgacctctcgcccctcaggtgaaggccaacaagcacagcccccacctgagccgcctgcaggaatgttctcgcacagtcaatgagagggctgccaatgtggtggcctccaccaagtcaggccaggagcagattgaggacagaggtgagtgccagatgccaacgggggctgctggctcccgaggctgaatgggggtgggtgcccagatgttcacccccttgtcctccggccacagacaccatggatttctccggcctgtccctcatcaagctgaagaagcaggagatggagacccaggtaggcgcccatggctgccccgtgacctctgagctcatccctcgggcgaagcctggacccaggagagagctccctggggaggctgggctgggctgagcaggccgtgtggctacaggtgcgtgtcctggagctggagaagacgctggaggctgaacgcatgcggctgggggagttgcggaagcaacactacgtgctggctggggcatcaggcagccctggagaggaggtggccatccggcccagcactgccccccgaagtgtaaccaccaagaaaccacccctggcccagaagcccagcgtggcccccagacaggaccaccaggtgccgtctgcactgggatgggggagttcctggacgggggtgctgtccccagccctagaggggcacatggtgcacgtccctggggaagtcagggaccactgacaacatgcagggaggagcttgctcaagggagaggtggggccccaggtgcctggctgtgaccactgaccccccacctttaacccctgcagcttgacaaaaaggatggcatctacccagctcaactcgtgaactactaggccccccaggggtccagcagggtggctggtgacaggcctgggcctctgcaactgccctgacaggaccgagaggccttgcccctccacctggtgcccaagcctcccgccccaccgtctggatcaatgtcctcaaggcccctggcccttactgagcctgcagggtcctgggccatgtgggtggtgcttctggatgtgagtctcttatttatctgcagaaggaactttggggtgcagccaggacccggtaggcctgagcctcaactcttcagaaaatagtgtttttaatattcctcttcagaaaatagtgtttttaatattccgagctagagctcttcttcctacgtttgtagtcagcacactgggaaaccgggccagcgtggggctccctgccttctggactcctgaaggtcgtggatggatggaaggcacacagcccgtgccggctgatgggacgagggtcaggcatcctgtctgtggccttctggggcaccgattctaccaggccctccagctgcgtggtctccgcagaccaggctctgtgtgggctagaggaatgtcgcccattactcctcaggcctggccctcgggcctccgtgatgggagccccccaggaggggtcagatgctggaaggggccgctttctggggagtgaggtgagacatagcggcccgggcgctgccttcactcctggagtgagtttccatttccagctggaatctgcagccacccccatttcctgttttccattcccccgttctggccgcgccccactgcccacctgaaggggtggtttccagccctccggagagtgggcttggccctaggccctccagctcagccagaaaaagcccagaaacccaggtgctggaccagggccctcagggaggggaccctgcggctagagtgggctaggccctggctttgcccgtcagatttgaacgaatgtgtgtcccttgagcccaaggagagcggcaggaggggtgggaccaggctgggaggacagagccagcagctgccatgccctcctgctccccccaccccagccctagccctttagcctttcaccctgtgctctggaaaggctaccaaatactggccaaggtcaggaggagcaaaaatgagccagcaccagcgccttggctttgtgttagcatttcctcctgaagtgttctgttggcaataaaatgcactttgactgtttgttgtc

SEQ ID NO: 937 - DNA, 32744 bp, Homo sapiens
  source 1..32744: mol_type = other DNA
agtgggccgccatgttgtcggagtgaaaggtaagggggagcgagagcgccagagagagaagatcggggggctgaaatccatcttcatcctaccgctccgcccgtgagtatccgcaccccaccggccccaaacgctgctccggacccctaacgagcagattgtcccttcatattggtgtttgagagtggttgtgggggtgagaagggctttggaaaagccgccggggccctggctgaggcttctcactcgctgttcctcgtacatgttttggagtcagcagcaaggcccctattgttatcaaaggagggagggggtggggagcggggtcgaagctaggaaaatgctgggggtttaggcccgagcccagggcgtagacgtgcctctacatttttgcctggccctgttgggaaccaccgaagattgatgttgccattcgggttgctttttttgatgggtttgcgaagccccgagtcttctgtgtggccatgaagtgtaattctgtgccaccccgatttcttcgacttcttgagcttccgtggcagcgccggaggaggaggaacaataaatcgctttagaagcagccgtggcccttgtccacaggcgagattcaccgtgggggaactttgcgagccttaaatgtggagaagtggcgatcaggaagtttcagaatgctttttaggctcctgggttgctgtggccttttgtttccgtgtgagcttgtgtttttggtgggttcttcctttttgagcctcccggtgttggtgtctctcttcactcaaagaggggttcaccccttgctagtaggaaaatctagatacacaatactagttttagtcctcacaaacatgcttggtaaacatagatcatttgttttacttgtcagtaccattcccacgtcaagtgaggaatacactcctgtaacttttccctcctatagcccccccccccccccccgctgaaaaaacaaagccagaaacccacacacagcattaccagagaaggctttattctcccgtaacttagattgttaccttttattgttcaattaagaaaacactgttctcagccctcgataccattttgctcaattcctgttattactgggattaattaagaataagattttatgaagcttttcctgggttctgttttaaagtcagttaacttctgaaacaataggcttagcattttgtttcttgaaagcacctaaaaacttactaagacaggcccaaccccaagaaatgtggcttccgatgcagttttcgtaagcaaaataaacattttgaccctttgctaattttaactttataaaacactggggggctgttgattctttatctgggctcttgggaaacgctctccggattctgaactttgagttagtgttttgctttagcgacaattgaattcattttgttcaaggccacagctttttgaagttggaatttgtttagtttaggtttaaaatgaactgttttaagataaatttatgaccacagaatgtttgttaagtgtggtaaaaataaacaccttttaaaccactaagcattttagtaaaaggtgagccatggaaataaagtaaaccgtgttcctttgaattcaactcaattagtgatattttaaaaaactttgtaaacatttgaaagctgtgaaagagtagctggactgagcacttctagttgcttaaagtacttataaggtgtcatttgtaaaaaaatcacattttaaatgctacacgtattagtgagcttttctgatatttaggatactgagtttttaatttttgtgccgtatttgccaaaataccacaaaactacccaagataacatgttaattgcttaggtatttgctcactttgaaactgttctgccaggttttctctggtttgagaaactgccttgcctctttaggtaaagcaggaagtcttagggcatacagatagctttacaaaagccaattgtttcgtttgaacatttttataggagtcttttctttcccccattccttttagaatgaaggtgtgtttagtgtgcgtcagtgataaactcctcttttatgtggatattctttgttagataacttttttcttttaaaaatttttatttgtataatttgtgaggtacaagtgtaatttgtacatgcgtgtattgcgtagtggtgaagccagggctttttgtgtgtccatcactggaataacgtacattgtcctccttaggtaatctctcattatccttctctcagcctcctagataactattttgagaaggcttttatttcagaaaagattgcatttgctgttttaggaattctgttagggactggagttgccttaactaggggtaactaaattctaagagtcttaagcacgatgactttaaatttaccaaaaacttttatatttatctcattttcattaagaaaaacccaaaacattgagagtcatagaggaaggatttctttcattttctagatgaggaaacaggtagttttgtttagtgaaagaacttgggttttggaactcttggcctgctctagaacaaagattgttaggtcgagatttccttttagaacagaatgggactgtctagtattagtactaagagagtaatgaattctttaaaaaaccaagcagggaggcattaggctggtttgcacttttgaaagaccgatggtgaaaccgggctatgactttttggttttggtacttgagcagggactagtgtctaggttagactactccagtaccctgctaaggttctgatggattggaattcttaacctagactaggcatttccaaattaggctttaaacaaattacaaattccattgtgtcttcttaggctggcttcaaaaacatgaatttagttgtgagaagcaaatgctactttatcagaaggtttatttattcaacagagagatagtagatttgttattcatgtgtttttgaagcatcacagtgggggttgggagaagagataaagcatttgtagcagtagactgttaggccgatggctttgaaattagaccgtggctgtggacaggtgtgtcctaattggtaactgatttatttactttgtagctttttttttttttttttgagatggagtctcactctgtcgtccaggctggagtgcagtgccttgatctcggctcactgcaacctccgcctcctgggttcaagcgattcttctgcctcagtctcccgagtagctgggactacaggtgcgtgccaccacacctggctactttttatatttttagtagagacggggtttcagtatattggccaggctggtctggaattctgacctggagatgcgcctgcctccgcctcccaaagtgctgggattacaggcgtaagccaccgtgtccggacactttgtagcattttttaaaagcacccacaggctggcaagtgttctatcttaagtacagatgcagtttttggttttaaggaactttagtgtttcatagtaacatttgagggattctttgttggtcttccagaggagtagaggatacaaatgagacatattgttgagttactcctgcaaggggttagtagaaagaagtaagcttgggaacgattagggtttgaatcctttctctgctacttgctagttgaatggccttggaaacatcccattttcctcctgtaccttagtgttttcatttgtaaaatagaaataataatggctacctttcaatgcttttgtgatgagacaatgtctgcgatatattcattacactattaccgtgttgaagcttctgtttgtttgtttgtttttgagacaggaactcactctgtcgcccaagcgggtgtgcagcctcccgctcctgggctcaaatgatcctcccacctcagcctccctagtagctgggactataggcacatgccaccatgcctggctaattatttttagtagagataggtcttgctatgttgcccaggctggtcttgaactcctgggctcaagctgtctgcccacctcagcctcccaaagtgctgggattgtaggtatgagccaccacacccaactgaggcttctggtttgtatagtgaggctttcttttttttttataatttaaaaaaattattttatttatttatttattttgagacagagtctcgctctgtcgcccggctggagcacagtggtgcgacctctgcctccctggttcaagtgattctcctgcctcagcctcccaagtagctgggattacaggcgcgtgccaccaagcctggctaatttctgtgttttcagtagagtcggggtttcaccatgttagccaggatggtcttgatctcctgacctcatgatccacccgcctcggcctcccaaagtgctgggattacaggcatgagccaccgtgcccaacctccattggccttcttagagccttattttttaataaaataatagagatgggggtctcactgtgttgcctaggctggtcttcagctcctggctcaagcgattctccctgcctaagtctccgaaggtgctgggatgacaggagtgagccactgtgcccagcctgtagtgaggctttctacactaatatgaagtgtttaaatttggtttggtctcatcctgtttatagtagttgaagtactaatggcataatgtgattacagttaatagttgtaagttactggtaaaaatattaatgcttttaaaaatcagtgacaactgaggagagggcttaggctaaaagcattctgctgctgttcttggtcagagggttttattgtttctttaagaaatatcctatcaatatattggaggttttatttatttatttatttattattttttttttttttactgaaacagagtctcgatttgtcgcccaggctggagtgcagtggtgcgatcttggctcactgcaacctctgcctcccgggttcaaacgattctcctgcctcagcttcccaagtagttgggattaaaagtgtgtaccaccacacccagttaatttttgtatttccagtagagatggggtttcataatgttggccaggctggtctcgaactcctgacctcaagtgatacacctgccttggcctccgaagtgttgggattataggcgtgagccacctcgcctggccaatatgttggacactttaagggatcctttcaaattacacaatctgagccattgctacttatatatgggtttaggcttttgtttagttattagcatatgtctgctccagctgtaaagttgtgattgattgattgattgattttttgagagagagtctcgctctgtcacccaggttggagtacagtggcatgatctcggctcactgcaacctttgccttctggattcaagccattctcctgcctcagcctcccgagtagctgggattacaggtgcccagcaccatacctggctaatttttatatttttagtagagatggggtttcaccatgttggccaggctggtcttgaactcctgacgtcaggtgatccacccactttggcctcccaaagtgctgggattacaggcatgagccaccacacccggccgaagttgtgatagttttaaaaaggcttttggggctgggcgcggtggctcacgcctgtaatcccagcacttccggaggccgaggtgggtagatcacctgaggtcgggagttcgagaccagcctggccaacatggtgaaaccccgtctttactaaaaatacaaaaaattagccacccgtggtggtgggcgcctgtagtaccagctactcaggaggctgaggcaggagagtcgcttgagtctaggaggcggaggctgtagtgagccgagatcgcgtcattgcaccctagcctgggcaacaggggcaaaactcttgtctcaaaaaaaaaaaagcttttgttcatttaaaaactgtcagttggtttgaggtataagtaagttgggtagactgatagaagtctaattctgtattgctatgtgttggttaacaacataaacttctctgaagtggtagtattgagttctgatcccaataccttgccagagtgcatgccaccaacgacatttatttattgtaaaagacatggggttcatgtttttatcttagtgtgttttatgtttcaaaagatggaaatattaaatatttgtaacctgtttgtccttaggtgttggtggaatgagcgttgcatgtgtcttgaagagaaaagcagtgctttggcaggactctttcagcccccacctgaaacatcaccctcaagaaccagctaatcccaacatgcctgttgttttgacatctggaacagggtcgcaagcgcagccacaaccagctgcaaatcaggctcttgcagctgggactcactccagccctgtcccaggatctataggagttgcaggccgttcccaggacgacgctatggtggactacttctttcagaggcagcatggtgagcagcttgggggaggaggaagtggaggaggcggctataataatagcaaacatcgatggcctactggggataacattcatgcagaacatcaggtaaaaaaaagttcactattttagctttgacattcctttataatcactgtccacttaggatatctgctttcaatgaatgtctttaaaaacttaaattgctgatttcatttggtacaaacagttacttgttataaaggttgatcattgtaatactgttactgggtcatttatcattctggtgctaaatagtaaatagccaattcattcattcattcattcatttgagacagagtcttgctctgtcacccaggctggagtgtagtcgcctgatctcggcttgatctcggctcactgcagctgctgcctcccaggttcaagcagttctcctgcctcagcctcctgagtagctgggactacaggtgtgcaccaccacgcctggctgattatgtattttcagtagaaacagggtttcaccatgttgtccaggctggcctcgaactcctgacctcaagtgatctgcccgcttcggcctcccaaagtgctgggattacagttgtgagccacccacgcccggcctatagaatgcatttttttttttttttaagacggagtctcactcttttgcccaggctggagtgcactggcgcgatctctgctcactgcaagctccgcctcccaggttcatgccattctcctgcctcagcctcccgagtagctgggactacaggtgcccgcaccatgcctggctaattttttgtattttttttggtagagacggggtttcactgtgttagccaggatggtctctatctcctgacctcgtgatccacccatctcggcctcccaaagtgctgggattacaggcgtgagccactgcgcccggcctacaacgcatttttaagaacactttttttggaacaaaggattcttttttttactgttgacataagaactgctagggttgtttataggatagatacatatttttgaatcttttctcttgggtgtgggtgacttgattttaagatgttgtagttgaaagtagggggaagttgataacatcagctgctcaagtgaaatttatttgaaatgggactgatatattgtgtcagagagaagtggttgtggcttttaggttttaaccacctttgtcctcttgttattgtttaatttttaattttaacatgttcagtcttattaatctaaaaccatagtgggaatcatagcatattttactgagaagagaggttagccttatccatgtttcctgatttcttgataatgaccaaccaaaagattagactgttttgatcagggtattctttgaaattgggtataggttgaatttggaaaggttcattttgtgtcacccgtcagtactgattagcgagaactgacatttttcattaggcttctagtgcttctgttttacttcagaaaaaatcaggtacaaacatacctgcaagtctgattttattatacttcctctgatccccccaaaagtgaaccatagttgtttttttttttttttttttttttgagatggagtctcgctctgtcgcccaggctggagtgcagtggcacaatctcggctcactgcaacctccccctcccaggtttaagcaattctcctgccttaccttcccgagtagctgggattacaggcacccacctccatacctggctaatttttgtatttttagcagagagagggtttcaccatgttggccgggctggtcttgaactcctgacctcatgtgatccacctgcctcagcctcccaaagtgctgggattacgggtgtgagccaccatgcccagcccttttttttttttctttttctttttttttttttttttgagacaaggtctggctctgtcatccaggctggagtgtggtgatatgatgatattggctcactgcaaccacggtctccctggttcaagcgatcctcccacctcagtctcctgagtagctgggactacaggtttgcaacactacacccggctacttttgtattttttgtagagacggggttttgccatgttggccaggctctactttgagcccaggctcacagtgatccacctgccttggactcccagagtgctgggattgcaagtgtgagctactgcatctgaccagttctttactatagtcgaaacaaagacaggctgggtgcagtggctcatgcctgtaatcccagcactttgggaggccgaggtgggtggatcacctgaggtaaggagtttgagaccagcctgaccaacatggtgaaaccctgtctctactaaaaatgcagaaattagccaggcgtggtggcgcatgcttgtaatcccagctacttggaaggctgaggcaggagagtcacttgaacctgggacagggagtttgcagtgagctgagatcttgccattgcactccagcctaggcaatgggtgaaactccatctcaaaaaataaagtaaaaaattagctgggcgtgggggcacatgcctgtgtttccagctgcttgggagcctgaggtggaaggattgcttgagcgtgggtggcagaagttgcagtgaacagagatcatgccactgcacttcagcctgggcaacagagtgggaccctgtctcaaaaaaaaaaaaaaaaaaaaaaaaaaaaaaaaaaagaaaagaaaaggaaggttttcagctgtaaggctgaaagaaggctcacccctgcaatctcaacactttgggaggtcaaggcaggtggatcacctgaggtcaggagttcaagaccagcctggccaacatggtgaaaccccgtctctactaataatacaaaaaaattagcctggcatggtggtgcacacctgtaatcccagctcctcgggaggctgaggcaggagaatcgcttgaacccgggaggtggaggttgcagtgagcagagatcacaccattgcactccagcctgagtgacaagagcgaaactctgtctccaaaaaaagaaaaaagaaagattttctctttctttgggatgaagatatgcacagaatttggtgattgaattagaaatcttatatcctggaaagatgaagtaatggaggaaaagtacagagtgcctctggtttgggacacagtgattacatttgataggacacctgttgagtttgaggtagaagcagaatatctgggtgtatactgtaggcagctctacctgtagcaggaaatcaaggtaggaggtatttgatttgggtggcatctgtgtagtggggcaaaaacaaaccctgtaatctctgtactatttggctaaatgttattcaaaaatcataaacattggttttttaaaatctgtaataaagatctataagatcttttgttgtgtttcctaatgatagactgatgggtggaagctgaaaggagagtcaaggtgcctggcaggttctttgctaggtgagcaaatcaaactctaggtcagtccttggcagagctctaagatctgattattgctgtgcaagttaagaagcgtttattgaaggcttactcaggcctctgtcttacactgagccctatcataaggaatcacatctgacttactgagcagttttatccaggtcagttagcaaacttgagttaataatagtaaatggcaaaacctgtttcccactcaggtggcctaaaccagtgaccttggaattggcattcatcattacaacacaattctttgggctggacgcatgaaataatgaacaacgttggggaactcagggtagttggtatattgcagttgtggaccacccacaggttacttttctgtagtcattatagtgtattgtactggttttagtgttgttctcaccttctggactgaactattctagatcagagacttgtgtttttcatgccccttttccaggaggtattatgaaactttcgtgttgattgaatgagggaagacgagaggttcttcagttttgcgctcaggtaaaggagtgggtcttacagctcagtcatcctgctgggaaacacatggcaacaggtagaggccacttgataggcagctgtgctaagggtagcataattgaagagcaaaggggcacatctctaggtggagaatctctgcccttattagccactgttacggataggaggtgtaagagggtgcctgatctgtcatgtgggtcagagtgaaaaagaggttgagaaccactgatgataacggaaatatttatatgttctaggcattgggctattgtatttcctatatataatccttacagcaatcctatgaaggagataaatacccttttttgaaaagtgagaaactgaggctttgttaccaggtaatacctggtttttgaaatcagtctttgattccagtgtccacgttctagatctgtttctgcttccctaggcaagataaaccagacaaaactgtgcaaccaagtggcacattacagggccaaagaattgttttgccataattttgcttgaaatttagagactgtaaacttaataatgagatgaatacaaatgttgaccattctcctataattgcaggagtacttgcccccaactcccaaaagcagtaatggtaaagtccatttttcttcagttctgttttttattacatatgtgttctaagtggtaatgtggatggaaaattatctctgtagagacagaatgactcaatataaagtgatcctattgccagctcattctaccctaccactgggcctttttttttttttttttttttttagtggccctttggcataatggaacaaagtttgagatcgaattggcaggatgctttcactagtgaactagcgaagtaaagaatatcacaggctgtgatgccagtagcattggagggaggggaactctttgtcatgccaggtactttatttctctcgtaattactcccatttaagagcaattgcttttacacttttttctttttatttattgagacagggtttcactcctgttgccgaggctggagtgcaatgggcaccatctaggctcactgcaacctctgcctcctcggctcaagcgattcttctgccttagcctccctatcctgggaccacaggcacacgtcacaacacctagctcatctttgtattttttgtagaggtggagttttgccatgctcaggctggtctcaaactcctttttttttttttttttttttttttttgaaataaagtcttgctctgtagtccaggctggagtgcagtgacgcgatctcagctcactgcaacctccgcctcctgggttcaagtgattctcctgcctcagtctccccagtagctgggactacaagtgtgcaccaccacgcccggctaattttgtatttttagtagaaacaaggtttcaccatgttggccaggctagtctcgaactcctaacctcaggtgatccacctgcctcggcctcccaaagtgctgggattataggcatgagccaccgttcctgggccacttgtatacttacattaaaaagtttttcattttttggctggacgcagtggctcacacctgtaatcgcagcactttgggaggctgaggagggtggatagtttgagcccccaggagttcgagagcagcctggacaacatggtgagatcatgtctctacaaaatatacagaaattagccaggcatggtggcgctgtgcctgtggtcccagctacttggagggctgaggtaggaggatcacttgagcccaggagacgtaggttgcagtgagccgagattgtgccactgcactccattttgggtgacagagttgagaccctgtctcaaaaaaaaaaaaaggcctcccaaagtgctgggattacaggcgtgagccactgcgcccggcagagagccctcatttttgggccaaactgaggtcttcggagggaagtgagggaaagaagtctcatgaaaaaaattttttttttttttttgcctgtaaaattatacccatagtatacaattaagataatgtggactgggcgtggtggctcacgcctgtactcccagcactttgggaggctgaggcaggtggatcacgaggtcaggcgtttgagaccagccaacatggtgaaaccctgtctctactaaaaatacaaaaattagccaggtgtggtggcacgtgcctgtaatcccagctactcaggagaggcaggaaaatcgcttgaatcgggggcagaggttgcagtgagccgagatcccgccactgcattccagcctgggtgacagagggagactctgtctcaaaaaaaaaaaaagatgatggatattgggccaggcgtggtggcttatgcctgtaatcccagcacttttggaggccgaggtgggcggatcagttgaggccaggagttcgagactaacctgggcaacatgatgaaaccccgtgtctactaaaaatacaaaaatcagccgggcgtcgtggcgcgttactgtaattccagctgctcgagaggctgaggcatgagaattgctctaacccgggaagcagggcagaggttgcagtgagctgagatcgcacaactgcactccagcctgggcgacagagcaaggctctgtctcaaaaaaaaaaaaaaaagataatggatatggagcaaaatactagaaaataaagctgggtacattggctcctgcctctaatcccagatactcaggaggctgggtcaggagggttgcttgaggccaggagtttgagaccagcctgggcaatatagtgagacactgtatctacaataaaaaggaaaaaaattagctgggcatggtggcatatgcctgtagtcctactcaagggaggatcacttgagcccagggagttcaggcactccagcctgtgtgacagtgagatcctgtctctttgaaaagaaaaaaaaaatgaaaaaaaggaaatttaaaaaacaaatactaggaaacactagacacatcttcccacccaaatgagttatgtatttgaaaatgttactcattttgggctgggcacggtggctcatgtctgtaatcccagcactttgggaggccgaggcaggcggatcacgagatcaggagatcgagaccatcctggctaacacggtgaaaccctgtctctactaaaaatatgaaaaattagccgggtgtggtggtgggcgcctgtagtcccagctactcgggagtctgaggcaggagaatggcatgaacccgggaggtggagcttgcagtgagccaagatcgcaccactgccctccagcctgggcgacagagcaagactccgtctccaaagaaaaaaaaaagttacttattttgacagtaatttttatacctttagatttttttctttcctgaataacattgaaaatttcattactaaaagcctaaggtcaagtctttgacttgagagtgttttattcttgtattgtgaaatctgttttctctgtaaactgctgtgggatagataaactggttgatgaaatagggcaaaaaaattaaagtcgattggttgaactgtagcctctgtactggattatgagggacagaggtagaagctttgccctgggggaagggaaatttggaggacagttccacagagcttacccactttgcttgcactcttttagcactaggatatatcagtatccatcatagattgacagcctataggagataattccagagaaccaggcaaaaaaaaaaaatcagtgggtgaggccaggtgcagtggctcatacctataatcccagcactttgggaggccaaggcaggcggatcacctgaggtcaggagttggagaccagcctgaccaacatggagaaaccccatctctacaaaaaatacaaaattagtggggcgtggtggcgcacgcctgtaatcccagctacttgggtggctgaggcaggagaattgcttgaacctgggaggcagagtttgcggtgagccgagattgtgccattgcactccactctgggcaacaagagcgaaatgccgtctcaaaaaaaaaaaaaaaaaattcagtggatgaatatattttgactccacttgtaccttctttttctttcacttggtgtggccatcttaacaatgatattctgatacccacccctgacatgtcaaccagtcttactcttcagtgctgttagtctttttttttttgaagggttttaaaaattttatttttattatgtattaaaaaagagctatcatggtttctttcattggggtggatgccttggataatccattcaaggaagatcacttcgtccaacttaatgcagcccaatttaatgaaacccattttcttcgcttactgacagaaacactggtggggcatattgaggccgtaatttggatcagatcttgctggtctgagcatacgcaacaagagagagaaccctggctgaatttttgcgagtggctccagtagagctgctggtgacccatcttgctctcaggagtgcagtgagacaaaaggaaagagctccagttaatttttataccttgtaattaacagggactactatgttaaactgggagggagcccaagtatttcccaaactggggagtcttgacattccctagaaatgtctttctgttgtacctgctgatggactctcttagacaatgaatcttgtctacctgggtagattgccttagcatttgtgctagtagcatttggttaacatgttaaagctgaataatccatctttcatattttgtttctcttacacatgtactcttagagccttttcattatgctcagaattcacaaggcttaacattatgtgcttggtcaaaggaatcatcagcaggccttcttcaactataactttttcttttttttgagacagagtctcactttgtcacccactggcactatctaggctcactgaaacctctgcctcctttgtacaagcaatctggtgcctcagcctcctgagtagctgggattacaggggtgtaccaccatgcctggctaatttttgtatttttagtagagacagggtttcacaatgttgtccaggctggttttaaactcctggtctcaagcagtcctcgcaccttggcctcccaaagtactgagattaaaagtgtgagccacgtacctggcctgactataattttaacctagcctgattataactttaagaattaccttgttccagtgtaaacaaaagaagttcggctggttgcaattggctcacgcctgtaatcccagcactttgggaggctgaggtgggcggatcacctgaggtcaggagtttgagaccagcctggccaacatggtgaaaccccgtctctactaaaaaatacaaaaattagccaggtgtgttggcgggtgcctgtggtcccagctacttgggaggctgaggcaggagaatcacttgaacctgggaggcggagattgcagtgagctgagattgcaccactgcactccagcttgggcgacagagcaagactctgtctcaaaaaaaaaaaaaaaaaaaaaaaaggaagttcagtcagatgctcttctctaatgctgaatggtacttgattatatatgcctctgaaatggcaacttgtagagatatttatgatgtatctttaccttgtttaattttagaaggttttttaaatttaattttatttttttgagatggagtttcatcctttcacctaggctggagagaagtggcaggatctcagatcactgcaacctcttcctcctgggttcaagcagttctcctgcttcagcctcccaagcagttgggattatacgtgtccactaccatgcctggctaatttttttttttttttgagacggaatcttgctctgttgcccaggctggagtgcaatggcgcgatcttggctcactgcaacctctgcctcctgggttcaagcacttcttgtgccttaacttcctgagtagctgggattaccggcacatgctaccatgcccggctactttttctgtttttagtagagacagggtttcaccatgttggccaggctggtctcgaactcctgacctcaagtgatccacctgcctcagcctcccagagtgctgggattataggcatgagccaccgcccccagccaatttttgtagttttttgttttttattttttcagacagagtttcgctgtcacccagactggagtgcagtggcacaatctcggctcactgcaacctcctcctcccaggttcaggtgattctcctgcctcagcctcctgagtagctgggattataggcatgtgccatcatgccagctcatttttgtatttttagtagagacggggttttgccatattggccaggctggtcttgagctcctgacctcaggtgatctacccgcctcagcctcccaaagtactaggattacaggcgtgagccactgcgcccggcctcaaaaggtttttgatgtgaaattagtaaaattgtatgataggtggtagtgagatgtgactatgggaataaaaggtcatgataggaaaataaattggagtaaagttagaaatatgcaccagaataatgggttatagaatttaccctgatgggccgggcatggtggctcaagcctgtaatcgcagcactttgggaggccgaggcaggcggatcatgaggtcaggagattgagactgtcctggctaacacagtgaaaccccgtctctactaaaaatacaaaaaattagctgggcatggtggcacgcgcctgtagtcccagctacttgggaggctgaggcaggagaattgcttgaacttgggaggcggaggttgcagtgagccgagatcgcaccattgcactccagcctgggcgacagagcgagactccatctcaaaaaaaaaataaaaaaaataaaaataaaaagaaaaaagaaaaaagaatttaccttgatggtcctggtggctaaagaaaagaggaaagcataatgattcctgagattcttacttagaggaaaaaacagcagttagggagagttgtgtttggaatttcagttatagatgtggttgaagtgctttgtaaactgtaaagtaataagattttttttatttcttttttttattttttattttattttattttattgtttttgagacagtctcgttctgttgcccaggctggagtgcagtggcgcgatatcagctcactgcaagctctgcctcctgggttcatgtcattctcctgcctcagcctcccgagtagctgggactataggcgcccgccaccaagcccagctaatttttgtatttttagtagagatggggtttcactgtatcagccaggagggtctcgatctcctgacctcatgatccacccgcctcggcctcccaaagtgctggtattacaggcgtgagccactgtgtccggccttttaaaaagttttttagcggagtctcactcttgttgcccaggctgtatagtgcagtggtgcgatctcggctcactgcaatctccacctcctgggttcaagccattccaatgcctcagcctccccagtagctgggattacaggcatgtgccaacatgcccagctaatttttgtacttttagtagagatggggtttcaccgtgttggccaggatgtctcgaacacgtgacctcaggtgatccacccacctccacctcccagagtgctgggattacaggaatgagccaccatgcccagccagtgggatgttattacttgtttttcatgacacctttctgtattttcagaagacacacatgtcttttgtgcatgtgtccattttctctcaggcaacagcatttgctgaatactctgcaggctaagcctgagtacaaaattaggtttctgggtgtgtggaaagaatactttaacaattagaatctatctagttattcactcttgtgaaaggacttaaacattcatacaggatgaaagaactgacaacatagtgccaggagagaagtcagtgctgaagtgctgaggatagggtaaatcatcttttttttttcttttccttttgagagatttctgatctcctctttgttttttacattcagtttctttgacttctggatattgtaaagagccataatagcactgtggcttcagctcagtgtgtagttgttggctgccctggcattttgctccttgctgtgaatgtactctttttttgagattgggtctctatctgtcgcctaggctggagtgcaatggtgcaatctcggcttaccacagcttccacctcccgggttcaagtgagtcctgccacagcctcctgagtagctgggactaggggtgtgcaccaccatgcctggctaatttttgtatttttagtagagatgaggtttcactatgttggccaggctgatttttgaactcctgaccttatgatccacccgccttggccttccaaagtgctgagattacaggcgtgagccactgtgcatagcctgctgtgaatataatcttacacctccatgtaagaagtggtggggtcagtgattggcaataggttgggtaagtttaatacttgggaatttggttaaagaacttggccctgaatggtgtaaatgtgttggtacttgcagttgggccttgtgtggtggctcatgcctgtaatcccagcactttgggagacggaggtgggtggatcacgaggttaggagttcgagaccagactgaccaacatgctgtgtgtggtggcaggtgcctgtaatcccagctacttaggaggctgaggcaggagaatcgcttgaaccccggaggcggaagttacagtcagccaagatcgcgccactgcactccagcctgagtgacagagcaaggctctgtctcaaaaaaaaaaaaaaccaaaaaaacaaaaaaaaaaaacccaaaaaccccgctgcagttattagacttctccagaggaatgcgcttcatgttttttgtgtaatatttttttgaaaactgttgatttttttaattttgttttgagagagagtttcactcttgttgcccaggttggagtgcagtggcacgatttcggctcaccgcaacctccacctcccgggttcaagcaattctcctgccttagcctcccgagtagctgtgattacaggcgtgcgccaccacacccagctaattttgtatttttagtagagatgggatttctccttcttggtgaggctggtttcgacctcccgacctcaggtgatctgcccaccttggcctcccaaagtgctgggattacaggcgtgagctaccgcccccagcccttttttttttctaaattattttgagacagagtcttacgctgttgcccaggctggagtgtagtggcacgatctcggctcactgcaatctccacctcctgggttcaagcgattctcctgcctcaggctcccgagtagccgggattacaagcatgcaccaccacgtccagctaatttttgtatttttagtagagactgggtttcgccatgttgaccaggctggtcttgaactcctggcctcaagtgatccacccgcttcagcctcccaaagtgccaggattacagatgtgagccagtgggctcagcctgaactattgatttttgttgatagcttattaatggttttactagatttagtagatgtggatttgtctgttgccattagtaagtgctcttttatggtccaagtacctttcttaatatttttatgagtctcatcaggaaaactgttctaggtttttggaaattgggggccctaaatatttttaaattcatttttattcattaattaatattatcatcttgtacagatggggtctcatgttgcccaggcttgtcttgaacttctggcctccagcagtcctcctgccttgacctcccaaagtgctggtattacaggtgtgagccatcatgcctggcctgttaaagattttttaaaatagcagctttggccagtgcagtggctcaagcctgtaattcccagcactttgggaggctgaggtgggtggatcgtctgaggccaggagttcgcgacctgcctggccaacatggtgaaaccctgtctctactgaaaatacagaaaaaaattagccgggtgtgggggtgggcgcttgtaatcacagctactcaagaggccgaggcaggagaatcgcctgaaccctgtcggggcggaggttacagtgaactgagatcgcaccactgcactccagcctaggtgatgacttcgtctcaaaaaaaaaaaaagcagctttacagatttgtagtttatccatttaaagtgtataattccagctgggcacggtgggtcactcctgtaatcccagcactttgggaggccgaggcgggtggatcacgaggtcaggagatcgagaccaacatatgaaaccacatctctactaaaaatacaaaaactagctgggcgtggtggcgcatgcctttaatcccaggtactcaggaggctgaggcaagagagttgtttgaatccgggaggcggaggttgcagtaagccgagatcgtgccattgcactccagcctgggtgacacagctatactctgtctcaaacaacaacaacaacaaaaaacaaaacaaaacaataaaaattagctgggctggagcctgaggcggagcttgcagtgagccgacatcatgcaattgcactccagcctgggggacaagagcaagactccatcttaaaaaaaatatatagttcagtagtttttagtttttagtgtattcattgttgtgcatatatcataatcattaattttagaatatttgcattaccccaaaaatcctttacccagcagccgtcactccccagtcttaggcaaccaccagtccacttctgtctctttatttgcctattctggacataagtgaagcatgttttgtgactgccttcttttacttagcataatgttttaagggttcatctatgttgtatgtagcatttatcagtacatcatttatttttattttttattttttagatggagtctcgctgtcgcccaggctggagtgcagtggcacgatctcagctcactgcaggctccgccccctggggttcccgccattctcttgcctcagcctcccgagtagctgggactacaggcgcccgccacctcgcctggctaattttttgtatttttagttgagacggggtttcacagtgttagccaggatggtctcgatctcctgacctcgtgatccacctgcctcggcctcccaaagtgctgggattacaggtgtgagccactgcgcccggccttctttttatttttgtataatatttcattgtatagatctgccacatttaatttatccatttatcagttgatgggcctttttttcttcttttttggctattatggataatgctgctatgaacatttgtgttcaagtttttttctgtagacatgctttcatttctcaggtttgagagtatataaatttgtaatgtataggtacaaaaataacaaatttcttcactaggggcaggtgctcattagaaatgggggatgggaggattagtttatctacaacttacactatggatttggaatttttccaagccacacattttactggggctaatgactactttcttttctctctgaaggaagtatttggaggctaacactgtaaataaacttgtttacaaacccgggaagaggagtgcttaaactgtagagaacaggtgttttcagtgagctccgtaaactctttagatgcaatgaatatgcagttgattgatctgctggtgacaatttttctttattaaagcaagttccctaagaattttaacaaggggacagttcattaacctagtcttggttattatatgtatttaaaatcaccaaattgggtgttaattattaagaaatgttctctgtaatcccagcaatttgggaggctgaggcaggtggatcacctgaggtcaggagttcaagaccagcctgaccaacatggtgaaacccccatctctacaaaaatacaaaaatacaaaaaaaaaaaaattagccggacatgatgggggggtgcctataatcccaggttctcaggtggctgaggcaggagaatcacttgaaccctggaggcggatgttgtggtgagctgagatcgcaccattgcactccaacctgagcaacaagagtgaaactgtctcaaaaaaaaaggaaatgttctttaatttgttagagtttattgagtcaaattgcttcccccacccagttgtcccaaattagggagataccacttttaagggtcagaagccttgtaaaatacaaaacaatgaaattaatatgtcgttcctttggagaaacttagtttcataaagagaggagggaattataaagataattgtttctggctaggcgtggtggctcatgcctgtaatcccagcacatgaggcaagtggatcacctgaggtcaggaattcgagaccagcctagccaacatggagaaaccctgtcactactgagaaaaaaaaagaaaaatcatctggtgcatgcctgtaatggcttgactcttggaggtggagtctgcagtgagccgacgtcgtgctactgcactccagcctgggcaacagagcgagaccctgtcttttaagaaaatggtctttaagttcagtgtagcccttaaaagtgatgtacatggattaaggactggaagaaagtactgcaaagtgtttatatttgtatgcatggagagattacaggtagtatgctttgctcttgtccattttgtattttctgaatttcaaacagttaaaaaagaaaaaaagacaaaccttataccatctgttaagagcttggtctgccattttgagtgaaagcagatggtttacacatttccagtggagtttagatgttagaaaagaccttggaaatcgaaattatttagcttttttcccctgatgaagtgctgtcctttgcattagttatctctcttttaatttttaaaaaagttagtagatatgttgaatataggttgctgaaataggttgggtgtattcaatgagatctagaggcaattttattttattttattttatttatttatttatttatttatttatttttgatacagagtctcgctctgttgcccaggttggagtgcagtggtgcaatctcggctcactgcaacctctgcctcctggattcaagcgattctcatgcctcagcctcctgagtagctgggattacagggatgcaccaccatgcttggctaatttttatagttttagtagagacagggttccaaccatgttgaccaggctggtctcgaactcctgaccttagatgatccacctgcctcggcctcccaaagtcctgggattacaggcgtgagccactgggcctggcctagagatgattttattttagtattatttcctttctgtatctagaattaataacgagtaatcatatgctttgtcctggaagtgttctaatatttttacatgatttgagccactcagtactgtatgcacatttttatctttctcatttttttttaaaaaaagtatgttagtccattttgtgttgctataaaggaatataggagactgggcaatttataacaaaaagaggtttatttgtctcagttttgcagactgtacaggaagtaagttacagcatctgctgctggtgaggcctcaggacacttttactcatggcagaaggcacagtgggagcacatgtgtcacatggtcaagagagggagctggagagagaagaggttccaggcacttttaaacagccagctcttgtgtgaattaatagagtgagaactcactcattaccatggggaggatatcaagtacttcctgagggatgggcccccatgacccagacactacacactaggttcacctccaaccttagaagtcacatttcagatgagatttggaggggacaaacatccaagctatatcaaagtataatatcctttccccacaccccccgccccccagaggatagcttttctttaaaaaaaaaatttactttttgactggccgtgatggctcatgcctgtaatcctagcactttgggaggccaaggtgggaggatcacttgagtctaggagttggagaacagctggggcaacataccaagacccccatatctgttaaaaaatatttaaaaagcctaggagtttagttttcataagtgctcagtgaatggcatgatgctattcaaaattgaatttaattatttccttcaattcctgtactgtattctgtttctgtggttgatatatccatttgtggcatgttaggagctatcctagatttctgcctcctgtttctgccgacaatagttccgagattatacctatgttgctttatttgataggctcatgtttcttgcctggagatgttcagtagtcttctcactggctttcctgcatctcccgttttcttctttgtagccattgtctgtgccactgccaaattgatgtttttgaagatacgatctgcttatttctcacccttttgctcacgcactcgtgtgtgtgtgcgttttctttcctgttgcttttgggataacttctaagctcctcctcatagcataggagacctttcatgttattttttttttaaagataaaataaatttttattttaaatttattattagttttagagatgagggtgttcactttgttgcccaggctggacttgaactcctggcctcaagcagtcccttcccccttgtgtagctggcactacaggcatatgccttcgcatgcccagctgtcttttgtgttttggtccagcttgcctctccagtccttactggcgctccatttcggctatactaaagtatttgtagttttgtgaatacccatcctatttttatagtttgtgcagtttctcagcatactagtgctatttttatttatgtagttttctctttggaatcccctaccttcttcatttacctggccttttcctcatctttcaagcttcaactaatgtatcttcatctctgataaatgtactcctttactcccacttttctccaaggttgggtgcctgcctttgatgccactattgtatgtcatacacatctcattgaagctttatcttcctgtattggagtttaatatttactttttcccttaacatccggtgctaggaagctgtttcaataaagagattcttggcggggcatggtggctcatgcctgtgatcccagcactttgggaagccaatgtgggaggatcgcatgagcctaggagttctagaagagctgtggcagcatagtgagacccttgtctctattttttaaaaaaaagagattcttgggcttaagtccagtcctgctgaattagaattctcaatgataagacacagttcatgtattttgtttttaatatttattattattatttttgagatggagtttcgctcttgtcgcccagggattacaggtgtgagccactgggcccagcatgagtttttttaaatttcttgtgagatagagtcttgctctgtctcccaggctggagcacagtggcagcatctcagctttctgtctcactgcagcctctgcctcctgggttcaagcgattatcctgccacagcctcccaggtagctgggattacaagtgcgccaccatgcctggctaatttttgtgtttttagtagagacggggttttaccatgtcagccaggctggtcttgaactcctgacctcaggtgattagcctgcctcaacctcccaaagtgttgggattacaggcgtgagccactgggtccagcctaacatctttttatatacacccatctatagcctacgttatagaatccttacacatacataacatttttctgtgtttaaaaagttttagcctgggtaggctgggtgcagtggctcatgcctgttatcccagcactttggaaggctgaggtgggtggatcacaaggtcaggagattgagaccatcctggctaacacagtgaaactctgtctatactaaaaatacaaaaaaattagccgggtgtggtatcaggcgcctgtagtcccagctactcgggaggctgaggcaggagaatggcacgaacccgggaggcagagggagcttgcagtgagctgagatcgtgccactgcactccagcctgggtgacagagccagactctgcctcaaaaaaaaaaaaaattttttttttgttagcgtgggtaacagggagacctcattgctataaaaaaattaaaaagtcagccaggcatggtgacatacacgtgtagtcccagctactcaggcagctgaggtgggaggactgcttgaacctggcaggttgggactgctgtgagctgtatttgtgccactgcattccagcctgggtgacagaatgaggcattgtctcaaaaagagaaaaggaaaaaaaaaaaaaaaatatatatatatatatatatatatataaaattttaaaacattttaaatggctatataaattctctaagtatatgctttaataattactgctgtatttagactgtttccatcttttcctattacagtaccaggttaaagatgtttgttaacaaatctgtgcccatatttctcatgatttgcttaggttaaattcctagaagtggaattaccagatcaaagggcatgaatattaatcaaacccatattacatattgtcagatgtccagaaaagtcaaataaagcaaggtaaagttgtgtgtatttgtatgcgtgttttaaagaaggataagaatcatcttaaagaacctagctctagcagtactatttcaccacttgtatgactaagggcagtttctcacattacaaatatttgtatgtaatgcctgtcatgtttttgatactgtgctagacgctcaagggattatttttagggagataagacaaatcaccatagcactgttaataaggtgcggtttggtacttggcgggtgttacttcagatgttaaggagagtgtagaaagtagtgtctaccatggtctttgaacagtagtctacatttctgcaatgcctagtccatcgcaaagggagagcaaatcaactagagaagtaatcgcaggttaaagtttttcccccttgtttaaataatttctaccccctcagttcatggagactaacactgtaggcatgcctggtagctgatagttctcctctgaacatatttctctctctcttttttttttttaacctttagctttaaagatcatctgcattttcttctgtaataaaaggtatccacccatttggccatgtttatttattctttagcagttgaagtattaaatgatgccagggtttttttttttttttgagatggagtctcactctatttccgaggctggagtgcagtggcgaaatctcggctcactgcaacttccgcctcctgagttcacgccattctcctgcctcagcctcccaagtagctgggactacaggcccctgccaccacgcctggctaatttttttgtattttttagtagagacggggtttcaccgtgttagccaggatggtctgctgacctcctgactgtgttagccagatgatctcctgacctcgtgatctgcccaccttggcctcccaaagtgctgggattacaggtgtgagccaccacgcccggccctaaatgatgccaatttttattttaaatcctgaataatcttatattccttctttctttttttgagactgaatcgtgctttgtcgcccgggctggagtgcagtggtgcaatcttggccgcttccttggttcaagcagttatcctgcctcagcctgctgagtagctgggaatacaggtgcccgccaccacgcccagctaattttttgtatttttagtagaggcagggtttcaccatgttggccaggctggtctcaaactcctgacctcaagtgatccgcccgccttggcctcccaagtgctgggaggcatgagccattgtacccagcctaaattcattatgttttagatctttaactttctcatggggaggtagatacccagacttaataaaccttttcactgtccacctgctagtcttggaaaataattttaatgaagcgtcaccgatacttggacagtttctgtcacgtcagcagagaaatatcaacaggagtgattgtaaagtggctagtcttatggtccaagtgttacgatctttgatccacttttcaatttatttcaagatctgatctatattattttctagctcttctggtttattgctgaatagttgatgcctggtttttccttgtaggatattgtggcttcataaagagtgagaaatctcacactgagtattgtcttttagtttcttctgaccttaaccccttgtttaagtcttgtgtacaatacactggttggtatctgttctcagcacaaaaaactatgtgaagccagtgttcagggaagaaaccacaaccatggtaatcagcagtatctttaccttctctcatatggttatctgactcatcaattactcttatcttcatctgaaatgggacagtcatactcttcttcattatagctatcagacaactgcccttgtgctgaaccacccacattaatgtattttaggcctggtcttgatgtaagttctttgcctcgtgtggtttttcctacccttcgtgtactctgagtgtggctccaaagacctaaacgtgtcctcatgtatagccaggaacttcatagcattcttcaaaacagaacactaagctgctccccagtggagagctcgaggcctcagagcactccgaatccctgcctcccctgctgtccaatcccatttttagccaagtgccttgactggggagcaggatgtttgcctgaacatattttttgtagagatgagagtctgctgtgctgcccaggctgatcttgaactcctggcctcgcctcaagtgatcctcctgccttggcctcgaaagtactggccatgtagaggtgtgagccaccctgtatggtctgctcttgcctttgatgacaacaggaacaagtggtaaaaggcataaagagctgaatttgggccgggcatggtggctcacacctgtaatcccagcactttgggaggccgaggcaggcggatcatgaggtcggagttcaagaccagcctggccaacatggtgaaaccccatctctactaaaaaatacaaaaaattagccaggtgcagtggcacgcactcgtagtcccagctactcgggaggctgaggtaggagaattgcttgaactcgggaggcaggggttgcagtgagccgagatagtgccactgcacttcagcctgggcaacagagtgagactaaaaaaaaaaaaacaaacttgagtttgaattctatttcggatctttatcagttacatgattttggacaagtaatttctgtaaaccttggtttcctcgtatataaaatggaataacgtctgtttcgcagtgccagtgcctggtgtttagtgttgttgttattgacagttaataaatgatatgaacattcattcataacatcatgcaataggttttgcagccatttataccaaaagaggttttttggtttttttctcctccagtaattaggaaagaatgatttatctatattttgtttaagggctgtaataacttcttgctattcttttctttttttttttatttgagatggagtttcactctcgttgcccaggcaggagtgcagtggcgctatctcggttcactgcaacctctgcctcccaggttcaagcaattctcctgcctcagcctcctgagtagctgggattacaggtgcacgccaccatgcccggctaattttgtatttttagtagagacggtgtttctccatgttggtcaggctggtctcgacctcctgacctcaggtgatccgcccgcctcggcctccgaaagtgctgggattataggtgtgagccactgcgccccaccaacttcttgctttgcttccaaaatgggaataatattatctgtgttttcagggtagttatgacttttttttttttcttttgagacagacttgttttgtcacccaggttggagtgcagtggtgcagtctcggctcactgcaacctccgcctctcgggctcaagtgattcttgtgcctcagcctcccaagtagctgggattacaggcatgtgccatcatgcctggctgattttcatatttttaatagagacaggatttttctcatgttgcccaggctggtcgcaggctcaagggacccacttacctcagcctcctgtgtagttatgactattaaaagagatgataaagtgtataaagtatttatgggatcaggaccagacacaaagtaagtcttagtaatagttgttattaatacagatatatcgtgtgcagaagatgctgtagaacagatttactaggtttttttccctttgttgattaaattcaaattagattaattcttatattctctttccttttctcattgctcaagtttctcctctttgcctgccattttctcactggtatttcctttccataatggttcctggcatcaacgattctgattatattgttctgatctcttttagtgaaatggaaccatcatgatctaggtttctgtatgcaaaaaatccttgagaacaaaagtaggtgtggagatgaagagcctatctttatgaggaaataatctagcaaaggcagttaaaagtatggaaatctactctagttaacaaaaattcaggggatttagtgaaagaacactaaggactctctgaacctcagagcaagaaatatatatgtgggcttcctgaatacttggaggctttctgtttttttaaagggcactgtagtcccttgtctctgcttctttcagcacatttcttttctctatgttgactgctaccttttgcttatacgtcaattagccaccacacctgggtaatttttgtatttttggtagagacgggatttcaccgtgttggccatgctggtcttgaactgctgacctcgagtgaaactgtccacctcagcctcccaaagttctgtgattgcaggtgtgagcctgtacatttgttttaatatggaaattttcagtgtgatttaatgaactccccaactcagtgatactctgttgtaactgagtttggtttctctaatcaggcaacagacaactagtcaaatcggctccagtaaagggacgttcattgtaaagacacactgagcagttcaggacaagaatgccagtaaagcaagtacaagaactgaaccagaatgctagcaaaacctgtgtcgtttttagtgattttattccagaatgcatggtttaacataatgtttgctttattctgctttttaagattcaatgttcaataatacctgcttgaaaaatggataaattgtaattattcaaataattgaatttctatttggatcattaacttcttacaattcagaattcctttgtgcccaagtctgtttgaatttattttccatggctgggtgcggtggctaatacctgtaatcccagcactttagaaggcgggaggattgcttgaggtcaggaattcaaaaccagcctagatgacatagtgaaaccttgtctctacaaaaaaattaaaaacaattagctgggtgtggtggtgtgtgtctctagtcctggctactcgagaggctgaggtgggagtttgaggctgtagtgagctgtgattgcgccactgcattccagcctaggtaacagagccagaccctgtctcaaaaaaataaaatgggctgggcgtggtggctaacacctgtaagcccagcactttaggaggccatgctggatggatcacttgggcttagggcttcgagacctgcctgggcaacatggtaaaacctcgtcttcttcaaaaaatatgaaaattagctggatactcgggaggctgaggcaggagaatggcgtgaacccgggaagcagagcttgcagtgagccgagattgcgccactgcagtccgcagtccggcctgggcgacagagcgagactccgtctcaaaaaaaaaaaaaaaaaaaaaaaaaaagaaaattagctggatgtggtggcacatacctatagtctcagctgctcaggaggctgagatgggaggatcacttgagcctggaaggtggaggttgcagtgaggtgagatcgcaccactgcactccagcctgggcaacagccagactccatctcaaaaaaaaaaaggaaaaatcagtaaggtcgtcttctaaacttcctttattttttggctcgataaccaatatggtctcctaattctcttcctagccctgtatttagatttccaccttttatttctgccagcctacactgtagtcaaggaaaataacgtttttttttttctttttttgtatttttttttagagacaggattcaagcgattctcctgcctcggcctcccgagtggctgagactacaggcatgcg

SEQ ID NO: 938 - DNA, 32744 bp, Homo sapiens
  source 1..32744: mol_type = other DNA
tgtttacgtctgccttcatccccatcctttccgctccagcataagcaaaattataaccccgcacaccgacttgcatgcaattatcatagcccgagtgctcctccgttgagagacttcgcccccgagaccgctgactgtgaatgacaaatcaaaagtcagggttgcagaatcagccggactttcctgctcatttgcagcagagggaggaagcagagaatgaaagattctgaaaataaaggtaaggggcggactgcagaaagatggctaagagagggctaaaggctaaaagatgctagggatgcgatgtcactccacagacatatttagtttgtattaatggctagtttaaaattaccatacctatattaacattctagttatataataaacatgatgactttaaaaaatgactagcttctagtttccaaatattgtgtcattcagctttccatttttatagtcctaaatataaccctatttttgcattcttaatcttggctgagtaacacagctttcatagatttccttagactagctcccagatttttgataattttattttgggggtgttcacaatagttaataatgaatatacaggttttcaatgcattatgagaattggaatatctgaaataattgggacttaaaacagtttgggttctgaaggcaaacgctgacggagaatcctttaatgaacattaatctttttagaagcgctccatggggagccgtcgctgaccttcagaactgtttatcttgcaaagaaatgctgggatgtaaactacccccactccatcagcctccacaccttacctccccctcacctcccaacactctaattctgttagagggatgggggaagagagaaacgaatttaaataaaaactcaaaaaaggaaagggctaaccgaaaaatgagccaaccaaattttaagttcaacaacaagcattctggaggattctggggttttaaattcggaggctccttaaatattctgccgcagttgggggaggagcgatggacccctaggtctccggaggctacacgtgttccccgatcccgtttccagggggagcccttccttcctattgcgctggtcgtgctcctggcccgcgtgcccaggaagggcgcagcggagtcgcgtgcccgtccgggcggaggacgccgtctccgcgcggcggtgccgggcccctgcttccggaacgctaattttagggttcgccggcccccctttcttttcacccgctttccgtgcgagccgctgcgcagcagtctgcgcttcgagtgcgctgtgttttaaggaggccccggcgcttgccccttgggctcgggggcttgggtgcgcaggtgggggctggcacgcagcccgttgggcaggtttcgcgcagcgaccctccccacgccggagctaagttctttgggtgagacgtgcaacaacgcaggccccaaagctctctgcgcgcagcgccgcggggcttggccttctccagtcctcgggagtcagccaccgtctctggcttgttataggattcccacctcgtggtgggcaatgatatatacatattcaacattagaaaaagaaggaaaaaaaaaccccactcacaatctaatgccaatggagagaatggtattttaatctacgaaactgtaatgaaggctcttaaacaatcccactttccataattgaggctttcaaaagggccaggtagctggtggtgtttgtattaacatctcataggctctggatcattcacagccacgtattgatctatgtggttttgacgtttaaattttaatgaagcagccttagtggggaagaaaacagctatgcatgtgcctggtaagggggaagaggacctgttcactcctgtttctaagccagcatcttaagagtaggtattacctgtgtgtgaaatcaaagtattttaaaattaactctaggaagaatgttggattttcctgtgttgttttcagtggttggagaaagggtttctggagagaaaaaaaaaattgcttatttgccaagtcatgctaggccatggacatgatttagaaaaaaaattaaagctgcttgaattggaggcccaggttaaggttaatattcaacattgtttgaaatggaaacactcctggtttctcagtgtatcagtgtgttttaagctcagatccccagcctttttctaaggagagttggtatttagaatttttttttttttttttgagatggagtcacgccctgtcgcccaggttggagtgcaatggtgcgatctcggcccactgcaacctctgcctcccaggttcaagcgattctcctgcctcagcctcccgagtagctgggattacaggcccatgccaccacgcccggttaatttttgtatttttagtagagatggggtttcaccatcttggccaggctggtctcgaactcctgacctcaggtgatccacccgcctcggcctcccaaagtgctggagttacaggtatgagccaccgtgcctggccggtatttagaatttttgttttactttgtactgggaagagccttgggttgggagtcaagattggtaggctctggcttgttcagttataactcatttgtgacctaggacaggactctatttctttgggtctcagtttctttatcgctaaaatggagagctattagactagattcctgtttttcagattgtgagtggtgagaaagcaacttagtgagtcttaggcaacattttagatcgatgaaatagaacagaaactgtcagaaatcattgcacatagcagaggtaactactgtttcctgaaacttctgttatagatatttatctttatgcatgtgggtataagccgtattctgacatcacatcggtttttttttttcctgtgagtttcagtcaaagaagtttgaggaacactgaaataaatcatagctcagtaatggttttcaaggagtctgtgaaatgcagctttatatgcatatatatacagacagagagagagagaaagagagagtcaatagttttcctcagatttttaaaggattctaagactccaaataggttatgaattactgtatttctaaggtcccccaggccttttccaagcctagttctttgagagcaaagtatccctttagggctgctgggagatgggtatgtgttgacagagaccagataagtgtatggtgtgaggtggtgtgtgtgtgtgtgtgtgtgtgtgtaggtgtgaccatagcaaccagaccgtgagagccattcctgggtcccaaattaccagttggtgtcctgaatatgagacataaaaacactaaaaattagagtctctgtgttgaaaaggaccacaacaaaactattaaaatattatgaattgtttggaagtcaattctttttgtaaagactgaaaaagagaatcaggtaaaattataagaggttgatggggcaaagaaatcaccaggatgttgcaggttcagaaagtgaatttttgtaagctaccatcacatgagtggttcagtaaatgttgacttgtgccttaagaactgcctgcctgccttttccatctttttagttcatcttagggacaattcagtgaggtttttaaatacaaaagacattgtgtaacattgatctagcatatctcaaaatgttttgcaagccaggaaaaagaaattaagtataaggcaactaaaaagaaaatagttgagtgagttaataagtagatattggcaaacatgacagctaattataacaataagaaccatagctcctatttaattaacaactgttatgtgaaaagctctctgggaggtgctttacatattgtcacaacactgcaaggtaggtggtattttattctgaagaaatagattaagaattttgtacagggatacatagctagttaatggcagagccatgattcaaaatcaggtctttttttatctccaaaaccattcacatggtaggcaagtacttgaaaataagtagccctgtactctgtaaaattacagtttttaataaaattgtcaacatttttagaattaacttacctatataaaaagggagatgtgaaccttagaaaatgatggcttttgactaattttttaggttgtttttatttggaaaacagatattttaactcttcaaattcagctccaaattttctttttactaagttctttgagtatgttatgcagcaaggtcttagaggcacaaaataataagaatgaagactgaaaatttgggtgaatttttttttggtctataagaggtcaaagaaaatagttctcattccaatttttctgttatttttctagattttattttaaaatggcaaacatggcatttgtttagcaaacaaagttacacataacattttaatagtaggatttaaaagttgtcatgactgggcgtggtggctcaacctgtgatcccaacactttgggaggctgaggtggcagatcacttgaggtcaggaattcaagaccagcctggccaacatggtgaaaccccctctctactaaaaatacagaaatgagccgggcatggtggcatgcacctgtaatcccagctactggggaggctgagacaagagaatcgcttgaacctgggaggcggaggtttcagtgagccgagatagcaagactgcactccagcttgggtgacagagtgagaccctgtctcaaaaaaaaaaaaaaaagttgtctatgccaatggttcctgagataacttttcactggaagttattacaaaatctaattgggtttgagcagggtcagattcagacttttaggctctaaatattaaaaaatagtgtggtgttcatcctccaatctgtaattcaaaataagtgtaaaaaaatttttaaaaagttgtgatttttcttaaacatcttgactactttgatacttttagagaaaactcaaattctttcaaggatttttgtcactgctgcatgtgactgggtgagttggtgaaatgatactttagctggggtgatctgtaaatgactgagtgacttctcaaagcttcaggggtagcatgtggttaagctgggattagagactggtctatgccagtggtaatcaatgggtctggtattgctttttgggctacacactggaaatctgcaggtatgttatttgatggtcatatgattgaggggcgctgccattggcagaaactagaaatgatagtgccctccggtgttctgggctgttccattcaatgatgaattagctcatgtcctgtgcaattttcaaatgttttgctgaagatgtagtaaaaccttctatacttttctgggcttagaacataaattggtttcactgtacactgaaacttccaggattaaaaatgctgtgtaaatctaaggaagattatactgaattttgttcaggaaatcacttacccaaagcaatgccacttgtgttttagacaccagtacaacacacctgaatcataaaatctatatacaagtgcaagtagctacctacttaattatgttttctaatatagtcgtctgagcatttgcatattgaaatacatgttgctttattgtaaataacttatttcacttctcttttacattacagttgaaacgtatatgtatatatatatacatatgcatagtttaattttgtgttaggttatttcatctttaaatttcattttgagatactaaacaagaaaatacaaaatatttttatatgttactcagagtttaaaaatgacttgatttttacccctgaatgttttaaaataatttgaaccaacattaaaacttttggagactataggttcaataaggtatttatggcttctttaataaagattagagcagtctgcaacaatgagattgagctgagtataaattaccctctttaaagggcagatatactgggttataagggttataaatctctaaaagtgatgttactggtcgttgattatttttatgctattgttactgccacttacatttttattttttgttttactattattatttttgagatggagtcttgctctgtcactcaggcaggagttcagtggtgcgatcttggctcgctgcaacgtccaccttccaggtttaagcaattctcctgcctcagcctccctagtagctggaattacaggtgcacaccaccacacccagctaatttttgtatttttagtagagtcagggtttcaccatgttggccaggctggtcaccaactcctgacctcaagtgatccgccacctttggcctcccaaagtgctgggattacaggtgtgagccacttggcctggcaaaatttttttaaaacattttatttatattctctcagcaggacaatcttcctagcataactgttgagggcccctccagtctcaggttttgaccttgttttttatttttttttattaacttaaaaaacattattattttttcatttttatttttgacttgacgataactgtatatatttatggggtacaatgtgatgttttgatagaaatctactacattttggaatgatcaaatcaggccgattagcatatttatcacctcaaatatttatcatttctttgtgatgagaacatttaaaatcctcttttagtaattttgaaatatacaacacattattattaaccccagtcacagtgctgtgcaataggacagcaaaacttattcttctaactgtaactttgtgcctattgatcagcattgcccctttccctgcccatgcccccacctcccagcctctagtaaccaccttttgattctctaattctgtaagtttggcttttttagattccacacacaagtgagatcatatgatatttgactctctgtggcactttagaatttcattttctaattgtttattcctgggatgtagaaatagaattgattaggccgggtgcggtggcttatgactgtaatcctagcactttcggaggtggaggcaggtggaacaccagaggtcaggagttggagaccagcctggccaacatggtgaaaccctgtctctactaaaagtacaaaaaaaattagccgggtgtggtggtgtgtgcctgtaatcctagctactcgggaggctgtggtgggaggattgcttgaactaggaggtggagattgcagtgagccaagatcacaccactgtacactccagcctgggcaacagagcgagactccatctcaaaaaaaaaaaaaaagaaagaaatagaattgattttatatgttgaccttatttcagtgaccttgctaaattcacttattaatttcaatagtttttagattttaggggccttactatgtagaccgtttatttttctgtaaataatgacagctttttcttctttctgatccttatactttttcccctttgtctcattgcactagctaggatctctcttataatgttgaatagaagcagtgatggtgagtattcttatcttgttactgatcttaggggaaaagctatcacattttcaccattaagtacaacatttgatgtgggatttatatggacacttaaaaattagattaaggaagttaccttctattcctactgtgctaagtttttatcatgaatcagttctgagttgtaacaaatatttttctgtattatgtgcatcatatgattattttattctgttaatatggtgaatttcagtgattcttgaatgttaaaccaactttgcacttttggaacaaacaacttcgttgtgatatctttttatatattgctgtatttgacttgctaatattttgttgaggattatctttgtccatgagagagattaacctgtgatttccttttgttgtggtgcccttgccacattttggcatcaaggatatgttgaccttgtaaaatgaattaggaagtatttcctatttctctattccctggaaggtttttgtgagattagaattattctttaaatgtctggaagaattcactggtgaagccatttgggcctggaaattttgttcttggaaggttttaaaatatgtttttttgtttgtttgtttatttattttacttttgtaaagatgaggtctcactatgttgcccaggctgatcttgaactcctgacctcaagtgatcctgccaccttggcctctcaaagtgttgggcttacaggcgtgagccactctgcctggcttcagttgttttaatagtgtatgttattcagatttcctatttttgtgtgtgttttaataaattctgtttttttaggaatttgtccatttcatctgaatttccacatgaggttttctttatattctcttatgatctttaaaatgtttttaggtggtgtggtcctgtccttgttttttatttctgatagtggcatttctatttattgtcctggtaattctcacttattttgatgcaatattgtcaaggtcttatacatttgagtagtctctgtaatcttttactggttaattttttgtattatacatttatttttcatctcatgagttcttgcttttgtctttattatttcctcttacactctttggctataacttatgacttattttttagttttttgagatagaaggtatctttgattttcagcttttcttttaaaaaatattttcatttaaggctacacattaatatcctttaagccggccaggcgtggtggctcacgcctgtaatcccagcacttttggaggccgaggcaggtggatcacaaggtcaggagtttgagaccagcttggccaatgtggtgaaaccccgtctctactaaaaaattacaagtattagttgagcacggtggtatgtgcctgtgatcccagctactcgggaggctgaggcagaattgcttgaacccgggaggcggaggttgcagtgagccgagatcacaccactgcactccagcctggatgacacagcaagactctgtctcaatgaaaaaaaaaatcccttaagctatatatataatatcctttaagcatagcttttgtgtacacctgcaagtattgttatattttcattatttagtttaaaatattttatacttttctttttgatttttttgacccataaggtagtgtaacaacatactttttaatttttaaacagttggggagtttctagttctctttttgccattgatttctagcttgctttcactgtagtcagagaatatattttggatgacttggaaatgttttagacttgctttgtgacccttcatatgatcaatttttatatttatatgttgtacttaaaagaatgtgcatactaagatagtttggttccatgttctatatatgttaattatttcaatttgttaatcctgaggtgcggatcttctgtatcctcactgatttttttctcattctgttggttcccaagagagggcaaactcttccattataattttagatttgtctatttttccttttatatttgccaatttttgctttactttgtggctctgttattaggtgcataccatatacagttatagttgttatatcttcattatgaaatgtctttccttatcttgagcaatactcccttataatctacctttttgatattaatgtagctataccaactttctttgtgttaatagatacatggtagatcttttcccatttgtatactttttcttttttattattattatatatttttttgagatggagtcttgctctgtcatccaggctggagtgcagtggtgtgatcttggctcactgcatcctccgcctcctgggttcaagcgattctcctgcctcagcctcccaagtagctgggactacaggcgtgtgccaccacactcagctaatttttatatttttagtagagacagggttttgccatgttggccaggctggtctcgaactcctgacctcaggtgatccactcaccttggcctcccaaagtgctgggattacaggcatgagccactgtgcccagcctatactttacttttttctatacccatatatgtaatctgtatcttttagaagcagccataagtgaatttttaaaaatctagtctgacaatatggtctttagtttgaatatttaaaccatttaatataattattgatgtgttaagtgctatagctaccatgttactccttgtttcttatttgtgtcccatctgttttatataccactttcttttggattaatcaagcattatttttaactttccaacatattctttacacatttgttttcattttacttttctttgtgtgtatgtgcgtgtgtgtgcctgcgtgcgtgtgcaagtgattaccccagtgcttcttatatttaatcatgtttcagacaatgttaggcgcttagaagactttaactccatttaccctatcttctccctcacctcactttctgccttttgtattattattgtattttgttttaattatacatttattaaagccccataggacactgtaatgattgttttatggaataaatattcatttaaatttacccacatatttaccctattcattgcttttcatttctttcggattttttgtgtattccctctgggatcttttccttttgcatgaaaaaaactccctttaggatttcttgtagtgcatatatgctagaaacaaatattctcagtttttatgatctggaaatgagttgattttgtctttgcttttgaaggacaattttactaggtgtatagaattatggggaagcaggtgttcccccagcactttaaaacatgttatcccattgtcttctggttttcatcctttcttggaaaagcaggctgtcagtcagtcttatgttgttatttggtgttgcatcttttttcttcggctgttgttaagacttttctcaattgatttggttttcaacacttgtcccaggtgtggttttctttgtatttatcctgcttggggttttcagtccttcttgaatctgtgcggcttgaggttttttgtaattctcataattccctgccattatctctccaaacagtgttttgttcctttctctctttctgggactccgggtacctttatgttagaactttttaccctgtcccatatattccttcattttctgtatacttagcccttttctttcttttttagttttgttatttttttgctggcctatcttagagcttactggttctctctgctatgtttaacttgttgttacagaaccattaatttcttaattttgttttgtatttttcagttctagagttactattagattctttttttttttttttgagacagagtctccctctgttgcccaggctgcagtgcgatcctggctcactgcagctttcacctcctgggttcaagcgatcttcagcctcctgagtagctgggattacaggcatgtaccactatgcctggctaatttttgtatttttagtagagatggggtttcgccatgttggccaggctggtcttgaactcctggcctgaagtgatccgctcaccttgacctcccaaagtgctgggattataggcgtgggccaccgcgcccagcctctattagattctttaccaaaagagattcttcaccttgtcatctgttttctcaaatacatacatcacagtcatcttaaaaaactttgctcagtaacttcaatgtgtgggccacttgtgagtctttttatctcttctgtttttcttcttggttgtctttcttcatatgcctggcaattttttattatatgtccagtattgtgtatgaagatgctctggatgatgtcatctacctgttgagagtatttttcctactctttgtcagaagtagaacagagatcacttcaatcaggcactcagtctaattaaggctgttttgcagacttttaaggtttagtctacttctggttctcctaatcccaggcccctagggaaactgactgagagtctgagatgtttctcaccaccccttccccttgacagaccctaaactctaatttttgtctctctaatactgtgaacttgctgaaaactctactcagcaaaatgttcattgtgcttttcatttgctttctcgttggcttcttagcctctgctctgggcagctgagtcaggaatatctgaaggagaaaactcctgtcaggctgtgagttactctaggatatgccttttcagtcctaaactccactttttgtctctgcagcccttgaaactgtctaaaattctgcaggcttctctgtgtcttaacagctgccccttgcctggcttttcagcttcttaccccatgctaagaattggcatataccctaaataggaaaatgggcttgcagaaagtcaggctcacctcagtgagcctcccctctctccaagatctggttcctcaaatcgtggctgattagtagctttcctattacttcacacagatgtttaaaaattttatctggcttttctaatttccctcatcagaaccagtctgctacaacctactctattaaagctggaagttaaacacgtctgtttttttttgtttgttttaagtggattatgttaaaaaataaaaatcacaggccaaaaaccaaggtaacaatgtcattttaaacatgtaaatttaataaaggatatatgttgatttttagttactctttcttgccttattaaaagcttgtcagtaccttttttcatatgtactctgaaattcttacaaatatatgttgctttgttccagagaatatgtgtactaaaagactataatttttctgagtctggttctccattcaaatgttttaatacttttgtgattttatgatttgtaattgtcgactctcacctcccaattcaacatgatcctaaaatgtacaaaataatttgaatgattgagtttcaaaaagttttagaaaacttgatcttgtaacttttattccaaagctttgttgagggggagaagtacaggcttctgcctttaagggtactgcttcacttttggggcaaaaaagcaagggttttcaaagggggacttgacatgaatggcatgcaggggagggggtgagccagtgggggtctcaatgacttgctttggtgctttatctaccaggtggttgagctggtgccctcgcgggcagaactaggtggtaaggtggccagagtcttgagatactctccaagtgggagtgagtttcatcatgggcatactttaggttataatttgttatctctcgaggcagtctcctggtcgaagagacgtctggctctggagcttctaagtaagcaagagcttccaagtaagcacacagataagcttgccctacagggagtgtctggtgaaggaaaggtaaatgttataattgcatttctaaagagctaagtaggaagtggggaacaagggaaaaggaggaaacagaaaagaagaaaaaagtattttttaaaaaagtaattctttctcttagaaaaaggtgggtacttggttacagtctaaaccctttaccgtggctgagtaggtattttttcagcctctttcccaggttgcgcgctgcgtttagtgctgtcattctcatgtgcttcatgtcactgccaatgtgttcagcctctcaaatgcaagctccgttcatttactcattcatctcatatgtttttgatcacttatgtgctcaggtctcctttttcaaatcaatattatggcaattctagtaaatgatcagggaaattaaataggtcaattcatgtgacatagttctgaaaggcaacagagtgattggtggaattgtggaaatgtttttcacatttctccaaattttcttttaaaatcagacaaacaaactgacacttacttttcagtcttttcagatatgttccccaactctgactctagtacttgaaaatgtactaagtaagagggctttgggatgccagaaatagtctgttacttaatctggctgctggtttttaaaccagtttgtgaaaattcctggagctcagcacatggtttgttcacgtttcagtatgtctgttatactttaataaagaaaatgaactttttactgatagagtaacaaagaaagtgccaaagagaaagaaagcttgagaacctctgatcaagttcagcctcttcatgttatggacgagggaattgaagcttgggaaggaaaaattacctggggactgggggaatgtctcataaccaggacttgtactcaggccttctgactcctagttcatctgactttcctaactcattgatcaggaaaggggtggggaagaatctggcatgcgctaacattggagctgggcgacattctcagaatcccagatgtatcctgcgagtcagcacttcactccctactctttctgccctcctccatccccttccccatggcagtttaaaaacagacacttttatttcctgcaaacctggagatacttgtttcatcacctaagaatcatttgactgcatatgctgagaaaaagggaaattcgtgcctgtgaaatctaacaagagcccagcacaaggtatgtttgatcctcttttaaagccatttttagtttggtgctgtgtggtttaaatttagaataacatttctacaactttgggggaggggcggtgatggtggcgtgcagagattgaacccagctgtgactcctgctgctgtgagataaatgggaaaatctgggaaccagtgttaaaaggagagggctctttagagaggtagctgcagggaaggggacgtgccttaattgggatgggggtggaggtaaggccaagaaacagtgggagctgtctcctccccctcttgccctgtgggatctgacctactgaaaacagagtgaagactatttctgatctggtttggaaatccagaatttaatattaaaatacacgttaaatatttcaataaataaatattaatatgttaatattaatgttaagtcagaatgttaaaatatacatctaatatatatacacatacatgcacatgcatgcacacacacacagcttggaattggtagtgtcatcctggcttcattttacattctcaaaggctagatgttgggtttccagagtgctgtttcttctgcctgaaatacattttctctcctatttgcctggctcagttctgctcctctttccagtagtagcttcctctgactctaggtctccttcccactcgctgcctataacaagtttccagagcatcctgtgttttcccttttgtgtcacttcccgtatttttaattattagatgaaatttgggcacggcatatgtccttaatacatagagaaaagaagagaagacaaggagtcagggaagataaaagaaagctacccttggatcgcttcttttaaacttagcaaggtagacaggttccttaacttctctgagcctcagtttcctcactttcaaagtgaaaatagtaatacctaataaggttgttgtgagattagaacctaataaggttgttgcgagattagaaataatatattaaaggcacctagcataatatctaacacatagtaggtactcagtgtaacataatttaaaatgtatatatactcttaaaaggaaattatgaaaattcagaaaagcacagagaaagcctgtgaaaacattcattgtcccgtctcttagagataattgctgttaaattgagtggattctttttctgtgtgtatctttatgtatctatataatgtactgagttcagattattcatatttttttttcacttaatatgacggcccaaacactctccacatttttagtgtctgtaaaatactgccatgttatattttgtaataataactgggccttcagttattaaaagaagatttagaaactgacacttgatccattcaaactctacttttaccaggacaatatgtttacgtgttaggaggataattcatatccctgggtaaacaaatgatgtagtggacaaggtgcaaaaggactcctccctccattccttcttctctctctctttcagcctttcttgcttatttccatggataggagggttattttgatttttaaagtaatgaggcaactaggtgaaatgaagaaatccattggcctggaagttaggaggtcagaaattttccttcttacagtccagtcactgactcactttaaggcagtcttttcattttttggtctaatttttttcatttgtaaacatgggagaagtgggttttattagagagattttcagactgggcttttctgagtgagtgttagagttctgtggagatgttttttcatattaggtagatttcctctcaagggaaaattacatggctaaaaaaaattaagtttcacgtttcaaattttattttattttttagacagggtcatgctctatcacccaggctggagtgcagtggtgtaatcttggctcactgcaacctctgcctcctgggttcaagcagttcttgtgcctcagccttctgggtaggtgggtgctcgccattacactggctaatttttgtatttttagtagagacgggctttcaccatgttggccaggctggtctcgaactcctgacctcaagtgatgtgcccaccttggcctcccaaagtgacgggattacaagccttagccactgtgcccggctcaagtttcaaattttaaatgaaatctcagtggactttttccttttttaaaattgagatataattcacataccataaaattcaccttttcaaagtgtacaactcagtggtttttagtatattcataaggttgtacagtcatcactactatctaattccataacgctttcatggaaaccattaatagtcgctccccttttcctcctccccctagcccctggcaaccactaatctatttgtccctgcggatttgcctattctggacatttcctgtaaatggaattatagtatgtggtctggctgccttcacttagcgtagtggttataaagttgatgcatgttgtaccctaagtacttcatttcttttttccattccttttagttttttttttgttttgttttgagatggagtctcgctctgtcacccagactggagtgcagtggcacaatcttggctcactgcaagctccacctcctgcgttcacaccattctcctgcctcagcctcctgagtagctgggactacaggcgccagccaccacgcctggctaattttttgtatttttagtagaaatggggtttcactgtgttagccaggatggtctcgatctcctgacctcatgatccacccacctcggcctcccaaagttctgggaccacgggcgttagccaccgtgcccagccctgtttaaaatttttattttactcatttatttattttgacacagagtctggcccagtcaccagggctggagtgcagtggcacgaacatggctcactgcaaccttgaccttctgggctcaagctgtccttctgctcagccacccgtgaagctgggaccacaggtgcatgccaccatgcctggctaattttttcatttttttgtagagacaaagtctcacttttgcccaggctcaagtgaactccagggctcaagtgatcctcctttgttggccctgcaaagtgctgggattacaggcatgagccttcacacctggcaccattccttttttacagcattttagaaaaaatttttttcaagtttggaaaaaaaaagttttgtcaggctgttagaattcccgtagcagtagaatgcattatctgcagtgtttgttgagatgcaaaaacaatttcagtacttcagacttttaaataaaaggctctatttagttcatgtgaaaacttttaaagctctgcccttcccccttaaagctaagagactgatatactgattgccagtcttgttttcctcctctgggtttaggggaggggattagggccagactttcattggataaaggtagttgaggctggggttaggctcttttcagaggaaaaatcaagatattaacctgtcaccagaaggaggagggatggatggtgggtgggttaaaacaacagatgtcaggtgtacataactgggatggactttatctgctgcactattggtgcaaaatcctttcctcttatgtgtctcctggtgttcctaaggaaagtataaggaagtcacctgcagtttgtagggaatgagctatttactcatgcatgaactgtgttctctagttaaaaagggattgaaaagaagaacaatatcagagtccctatccaaattatgaactccttgaggtcagagattgtgtcttgtcacaattatacctccagtgtttgatatggaacctggcatacatgagtcattcagtgaatatttgtgagattacttggttttttgccttgttgacttaagaaaactttttattttgaaataatcatagatttgtccgagagattccaaagaaatgtacaatgatatcctatgcatccttcatcctctagcctccctgaatgttcacatcttataccaccatagtacaatataaaagccaagacattgacatttgcacaatccatagaacttaaggtttcaccagtcacacatgcactagtttatgtgtgtgtgtttatgtttgtagctctatgctatgtactatgtgaatacatgtaaccttaactaatgaccacggtgatcaagatgctcaaatatcaccacacactctcttgcattacccctttatggccacctccatttcccggtccttaacccttggaaatttagtctgttctccatctttataattatgttatttcatgattttttccagaaatgaaaccatgaaggtatccccaagattgccttttttttactcagcataatttccctgagttgcatccaagtcgttggatgtacaacatgcaccaacagtccattcctttttactgctgagtagtattccctaaaatggatatagcataatttgttaaaatatttatccattgaaagacatttgggtggtttccaattcttagctactaggaatagagctgctgtgaacatctgtgtacaagttcctgtgtgaaagtaagtcttcatttctttgggataaatgcccaatagtgcgattgctggattgtatggtaagtccattttcaattttgaaagcactgccaaactattttccagaggggatataccattttaaattccaaccattattgtatgagtgatccagtttctccatatccttgccagcaattggtatagtcactatttttctttttagcatttgtggtgggtgtgtagtgatacattgactttttgccccttctcctaccaaacaaatatgttaagttttgaactcagcttcccaactctcagtggcctggtctgtgatttccataggcctctatacttctgacctcctcctacctccatgaccttgacctgacttctctttcttctctccccagcctgggtcccggggtcccctttttacctcagaatcgctttatctcaatcctgccatcttcccaatgcctggagaaagtcacaaaagtgctctccactgctgccaggcctctgatgttacagctcctgggcagtcctttcctttacctcagtgatgtcaccctcccacttctgacaggctctgctccatacagtgaggtcttctctcagagaggaccttaccacctctcaacaagagtgagactgttcagtctgaagcccctcagcatctcctttctccatctctgcctttctgtttcttgcagaagccaactcctcatgtgtgcttatgttcccagagagcctccagctccccagggtagggatttatcagaggagtctattttcagacttcccttcgtctgttctccttttcctcagagtgtccttaatggaacacccacacctctcctctagtactgagtctgttgaatcaggatctctggaggtttgcagggcggagagtctctgtttttatcagtctcctcaaggcctccagtggggagtcagattcagagacggctgcctcagggaccctctgggcccctcttcttcacactacccctcagtagtgttttccccaaattttggagaaccaaattattttgttctggactcactgttttttgtttttttttttgagacggagtttcactttttttgcccaggctggagtgcaatggtgcgatctcggctcactgcaacctctgcctcccaggttcaagcaattctcctgcctcagcctcccaagtagctggaattacaggcacccaccaccacgcctggctcattttgtattttcagtagagatggggtttcaccacgttggccaggctggtctcgaactcctgacctcaggtgatccgcccacctcagcctcccaaagtgctgagattacaggcatgagccactgcgcctggctgactcactggttttaactctgtggttttccatctggttcctgcatttctgcccagctcctttaaatttatattaataattgtaattatcaggttgctttggttttgtagtcttattggctcctgctttgcagtgtcatcagtttcatctttacaaactctgatgctctaactttcttgcataaacagcagcaattgctcttctttccttgcacagaggtaggagtgttctcaatatgaccaccatctggtttcccagcctaggttttcacaaatctcctatacatgatttatgtggcccctgaaatgcctggcgtacaattgctcagaccatgttctttttggattttgttattgggcctcatcttattgcccctgccttagaagtacacctcccaattcagtctttggtcaactgaaatttattctttgtcaaagaccctttcccacagtttattccctgcaacgttttatgaattgttgcctgaactagatgttcggttctaacaatatatattacacatgatgccaagcactgttctgagtcatggtcatataaggtgattgggaaatgatcctcacccccccaccagtgttcccaaccatttttcccttctctagtctcccatagctttctctccccgcactatgattgttttttcattttcagctgtattttaggttttttgttttgttttgttttttgagaaagagtctcattccgtcacccaggctggagtgcagtgctgtgatctctgttcactgtagcctctggctcctggattcaagtgattctcgtgcctcagcctcccgtgtagctgcagttacaggcatgtaccaccacaccggctaatttttgtatttttgatagagatggggtttcatcatgttggtaggctggtcttcaactcctggcctcgagtgatctgcccgcctcggccttccaaagtgctgggattaaaggcatgagccaccatgccccactttattttaggtttttgagaggagataatttgtcaaacccagcactctgcctaccacaaaagttgatgtgcaggatatatttacggaataatttaacatatccctctacctccctgccccagcaacttggaaggtcaatgaacatgtgctgaattaaccccactcttgctgtgtgtgtattcttctctcatacaaccaaaacctaacttttgttaattagggttcagcattagccatttgaatagcagaattctaagttatgtagaacagtagttatccttttttttttctttttgagatagggttttgctctgtcacccaggctgaaatgcagtggtgtgatcatggctcactgcgacctcaaccactgtggcacaatccatcctcccacctcagcctcccgagtagctgggactacaggtatgcactaccacacctggttaatttttaaattttttgtggagacagggtctcactttgttgcccaggttggtcttgaactcctgggctcaagcagtcctcctgcttcagcctcctaaagtgttggaactacaggtatgagtcactgtgcctggccagttatcctttttgtttgtttgttttctgttcacctacagatcactttttagggttgaaaagcccatgtgcagaagactacaacagaaaagatggtaggagtgtgttggttttggagtaactctagtgaggtgatgaatgtaaatttaaaatcttaagtatacgaaacaggttactaatacatttgagaaacaataaaggtgctgcttatttatcttttaccatgtgctagaattgtgctaagtgcttagcatatattagctcatttaaacctagtactaatcctgagaggtatgttcattatattgatgaaggccttgaggatcagaattgtgaaataacctgctaaaatcagagagctaatagatagtgtagccaggattcccatataggtttctttgatcccacaacccatgttttctatgctgttttgcctctctagataaaagcagaaactctcacattgtaaagttaatgcttacctaaaatgtatattttgaaagttattaaacttttactgacccatatgaaaatgcctaagtcagtgagtgagtgaaggaatgaatgagtgagagaaagagtgaatgaaagaatagggtagattggaagtaccatatgtactagtctgtcagatatcctaatacactgaaaatcagatatttgtggtggtatatttgtgggaaaattatcttaaaaggattaaaagtccattaaaaatgcaaacaaatgaagtagtggtaatgtaaaaacattgaggggataatgagcttatatacaagatttttaaaaatggatacttaaaagttcatcagtcagtagagtaataagatgctgttgtagttcattttggcctcacttccttatctccttctttaaaagtccttcctcagtacctcttgagtagtggttatttattcctattacaatgtatttcctttcatttattttatctttttagactttggagactaggtccattttattaagcttcaagagattgaatgaagaacaatcactcccccatttacctacctccatttactttgccatttaatctcttttatttatttttttgaggcatggtcttagcctgttgcccagaatggagtacagtggcgcacaatcagggctcactgcagccgtgacctcctgggctccagtgatcctcctgcctcatcctcccaagtaggtgggaccacaggtgcatgctaccatacctggctgatttttgtattttttgtagagacagagtttcaccatgttgcccaggctggtcttgaactcctgggctccaacagtctgcttgccttggcctcctaaagtgtcgggataacaggcatgagccactgtgcctggactaatttcttttaaaagggtgccattacatcccatgaagtgctgggaagaacactgggggtcttagcactgagaatgtaaatgcttatttgaattctgttttcagtgtaatactcagccttgtactctgcctggtgttcccctgtccattgaacctcttgttgccctctccagagaataaatctctagtcttctgttggggttggggaatggcaactgcccatctgcattgtctgaggaaggggatctgggggtctgtcttagtattgccttcacctgtctacattgccatcaaatcctgagtccttaggggattccacactgtaactcagcttgccaggttaggatttagcttaattcattctgtttttattttctaaaatttgttgctgttttctctgaattcataagaaagttttaaaaggtttgaaagaaaagcaatacagagaagcttaactctaacatgaaaaatttataactaatggcaacattgggaaaaagcaagattggcagcatatgaaagtaagaacattgcacaaatgggcatatttagtcagaattcttaggagatgaactgctaaacatcggtttcagaatcctacataatgatttgtgagtgtgtgtatgcccaaagaacattgaatttgtaggcgaaattttaagtacacagaaaagtgtaaagcatttataaagtgaatacactgtgtaactagcatccaaatcaagtaacaggaggttactagcaacccagaagcccctttctagttcctgacaaccctccaacctctactaagaataactaatgacccaatgttttacactgtagattcattttgttcatttttgaattttgtataaatggaatcatttagtatatgatcttttgctctcatttattttgcccaaatttatgtttgtgagacccattgtgtggtagttgtagttcattctttctcattcctatatagtattccattaagggaatatactaatttagttttttcattttggcagacatttccagtttgggtctgctatgaaaagtactactatgaatattcccatatgtgtcttttggtgcccatgtgaacatatttctgttggttatatacatatttctgttggttatatatgttaaaaattactgggtcacatggtatgtgcatattgagctttaatagatactgccaaacagttttacaaagtggttgtaccaagttttactcctctcagcagggtgtgagatttctagttattccacatctttaccaacatttgatactgtcagtcatttaaatttttttttttccccaagatggagtctcgctctgttacctaggctggagtgcagtggcacgatctcggctcactgcaacctccactttccaggttcaagcgattctcctgcctcagcctcctgagtagctgggactacaggcgcgtgccaccaagcctggttaatcttttgtatttttagtagagacggggttttgccgtgttggccaagctggtcttgatctcctgacttctgatccacccgccttggccacccaaaatgctgagattacagatgtgagccactgcaccaggccagtcatttaaattttagccattctagttagtgtatctgtcactgtggtttgcatttgaattttcatgatgactgtgaggttaagcacctagtcataagtttattgggtatttgtatgtagtcttttgtgagaggcctgattatgaccagcacttttatctagactttcccagccaccagaaccataagatacaaatatgtattgtttaagctatctggtctatgctattttgttacagcagcctgagcttactaaggcagaggggaagtgctattgtaccagtaccaaacataggcctaagagcactgtgtcattgttgtttttttttttttttgagacagagtttcattatgttgcccaggctgagatgcagtggcatgatctgggctcactctaacctccacctttcgggttcaagcaaatctcctgcctcaggctcctgagtagctgggattataggcgcccactgccacacccagctaatttttgtagttttagtaaagatggggtttcaccatgttggctaggctggtcttgaactcctgacctcaagtgatccacccgcctcggcctcccaaagtgctgggattactggtatgagccactgcctctgtctgagcattgtatgttaaaacaacacacgtatatatcttacagttctggtggctggaaaagtcaagataaaggtgccagcagattgccaaattttcagctgcgttttctgccttttttgtactgatttgtagattttcttagagatttatattgagtcctttgaatgtatgtattggaaaaatcttctgtcaatgtggtttatattttcactttcttaatggtgtctttggatgaaccgaaattctttaatgcagtctactttattgatttgcttcacagttcctactttttgagtactgtttaagaattctgtttgcgtcaatatcgtgatattactttatgtaggttttcttctgaaagctttgttttagagtatattgatttttaaaaaatttaaatgcatttgttcacatatcagcctgatctattgaaaaacacttaaacacttaaataagcttaaataataacttttccacaaactatctatgtgatcttcggcaaggcagttagcattttttgttgttgttgtttatttttaaattattacctttcctatggtgctgaagggcagttagcatttgaacttaatttctttaactatagtatgataataataatatccatcttagagtattgttgtaagcatcatgactatctaaatgttagctattattaaaaagtcagctattagcaaagacattttcagagacaattggagatacttagatatagattggatgttagatgacagtaaggaattattaattttgtgttgtgtaggaaaatgtccccattaggaaatgcatcatgaaaaattaagaggtgaagtaaaatgtctcaattcattctttaaaagttcagcaaaaacaataaaatcccaaatatctagataaagcaaacttgcaaaatgtttcaaattattgaattttttgtttgtttgtttgaagtggagtcttactttgtcacccaggctggagtgcagggcactatcttggctcactgcaacgaccgcctcctgggttcaagtgattctcttgcttcagcctcatgagtagctggaattacaggcatacaccaccacacctggctaatttttgtatttttattagagacggggtttcactatgttgaccaggctggtctcgaactcctgaactcaagtgatccacccaccttggcctcccaaactgctgggattacagatgtgaaccaccatgcctagccaaattattgaatttatacattagatatgtagatattcatcatgtgaaattctttcagcttttttggtatgtttgaaattttcataataaaatattcaaggaaagttagtaatgaatctatagcattcctattatttaacattttctccaaagctaaaggtgcagaaggacctaattaaatggatttgagtcacttagcctgttctgcctgggaaaggagattaaaatgaatttaaaataaaatgtgaactatatccctgcatacttgagtgggataaagctgagccataaaaatccaggttttactgggtgtagaaaaaaggagaaggtgaggaaggggtatgagatgtactgagtgctgttaagggtcagatactctgctgggtgctgtaaatatcacctatcattcataaagcaattctacgaggtaagcaatattagaaaagtttgatatgaaaagtttgatagaaaagctttggataacttgactaacacaactagtggatagtggagtgaggatttgtacccagatctgtgtttttgcacacagatctgtttttgcttttcttctttcgttcctactttcctctctccctcccaccgttgtcacttttttcccaccttcactccctttccttcgttcttcctttctttctgacttctttacaaatgtttttattttttatttactttttactttttgagatggagtttcgctcttgttgcccaggctggagtacaatggcgcgatctcaacgcactacaacctctgcctcccaggttcaaggaattcttctgcctcagcctcccgagtagctgggattacaggtgcctgccaccacacctggctaattatttgtgtttttagtagagacggggtttcaccatgttggccaggctggtcttgaactcttgacctcagatgatctacccaccttggcctcccaaagtgctgggattacaggcatgagccaccgcacccggcctggttttttttttttgttttttttttttaatgaatattacgcttttcattgtagaaactctggaaaacacgtttgtattaatttaggttttgctacataataaaccaccccaaacttttttcttttttcctgagacagggtcttggtgtattgcctaggctggggtgcagtggcatgaatgtggctcattacagcttcgacttcctgggctcaagcaatcctcctgcctcagtttcctgagtggctgggaccacaggcacacaccatcatgcctggctattttctttaatttttttttgtagagatggggtctcatcatgttgcctaggctggtctcaaactcctgggctcaagtgatcctcctgccttggcttcccaaagtactgggaatataggtgtgagccattagacccagccagtttttttattttttatttttattattttacactgtgttgagataaccacccccaaaattagtggcttaagacagcatacattcaggtcacaattctgctggcagtaatttaaatgggctcagagggcagttcttccagtctgggccaacctcagctgttgtcattggggctcactcaaacgtatgaggcatcagctgggatgtcaggatcagctcctccatgtggcctcccatcctacagcagactagcttgggcttgttctcttggagaaggagaagaggagccaagagagcaagcagaaatccacaatgctcttgggcctgtgtctggagctggtaaaacagtacttcccctctgcctcagtcagctcaggctgctgtcacagaacatcatagactggatagcataaacaacacacacttatatctcaccattctggtggctgggaaagtcaagataaaggtgctggcagattcagttgctatgaggacccttatcctggcttgcagaaggctgcttgctgtcttctcattgagtcctcacatgggggtagatggggtgtgtgtgagagagagccagagagacagtgagcacatgctctggtgtttcttcttttccttataaggacactaatcccatgatgggggccctacccacataacctcatttaaacgtaatcatcttccaaaggcccccatctccaaatactaccacactgggagttaggccttcaacataggaattttggagggacacagacactccccaacaccctctattgtacaaagcaagtcacaaggccagcccagattcaaggagtgaagaagtgtaccctacctcttggtgagaagaaatataaaataatattgcattgtgatatgggtggcagcaagtgagggtgagtgggatgaatgtttgcagccatttttgcaaacattttttcataacatacaaaaataaacatctactttaagtcatttctaataccattatcaagagctaattattgttaatatgttggtctatgcacaaataggggcagatatgcacgtacagaggcatagttttgtctgtacacatacagaggcagattgcttttaagaatataattttcatttagaatcaaacttatgttctattagtgtattttcccaggtattaaattttccttgaaaacatgtttaccctatgatgcaaaggaaatcaacataaattactatgttccaggcattgtgctaagcactttcactcagttatcttaactaaaaaacaagtttcttgttaatttgcagggttaatttgcatcaaaacaaggaattcatttgttgctacaaagaaaaagcaatgaaaggactttgtgaaaaggttcagagaaaatgataatggttaagacatatcagcaatacccatttttctcttgaaacctgacttgtgaactataacagaaaatacagaagataaatccttgtacctattgcccaccaatccagtctttccattttataggtgaagtcatgtcattatttatgtatttgtttgatttggctgtatttcaggatcatgttgaacatcagttcttattgtatgggtaacataaataagaagcagaaaatgtagagggcaaaggccaaagtttgatcctgggcttgggactgattagttgttgactatgaaaaaaaaatcacttaatttttttgagttcaattttatcatctgtaattacaaaagcttcaatcttcttaaaattggtgtgaagattgactacagcattttatatctgcactgtctgatgtagtagccactggctataagtggctattgagcatttgaaatgtggctagtccaattgagatgtgctgtaagtataaaatacacagtagattttgaacacttaggtggaaaaatatataaaatatcttattgattacatgttgaaatggcaatatattgtacccattgagttaaataaagtgttattaaaattaattcacttgtttattttttaaattcacttgtaaaaatttattttggctgctggaaattaaaatattacacatatggctcacattatatttctgctggacaatgttttgcttaaaaaatgttctctgtacaatatagagtacagcataaatgttagttatagccagaaaaaaagtataggaggtttagttgaatatgtaaggattctaagtggtagcatgatgcttattatttttgctacatttataatgtaagcttttatttaggcatctgaagtttttctttttatgtgttatagagaagtagggatggaagtgctaatccaattatgtgaggaaatcataataacttcagtgtattgagctacagtgatgcaggcattgtgttaagtactgtattaggcaggattcctttgattacaagtgacagagatgcaatctgaattaactaaattgaaaaagggggatcttgtaattgtatgaagcatgggagtgcatctgggtctcctgaatttctagaatataaacactgtttttcctatatacctatcttcctctctcaaatttacttctccctcctcagcagcattgttctctcagatcacttgtctccatatgtcagaaagaatggctccttcaacctctgtgtgtcatctttgctctagggaaggatagactcagacttgctctttctggttttaaatggaaaagtcctgtgaaaaagccatggttgacctagcttggttataggtacctatccctgggctatggcagctctaacccaaccacagaagagaatttcccagaaaaagggaccattcttcttggttgataaaagaataaatgtacactatagctactctagctaatttaatatgtacagccaatcagtagggtagtacctcaatgaacaaatgagaaactgagactcagaaaagttatgtatttcattcaagttcaaatatccaggctggaagtctgggtctgtccatctccaaagcccatgttcttaactaccacactgagaaagttctagtaaatggggtttgtgtcgacttaagttttactgaattatttaataggtctttgctatttttttcctcctatcattgcttcccattgaaagttaagatagattgaggacaagggaactggccccatggtaatactcagtaaatccttatggaattgaaaaccaacaccactatgctctccaatcttgtgaccaaggctataaaggcgttagaaaagcactgctatcattatctttgtaccatgagcttaagacatagttaccactacttggacatttcctttttgtaatttgcagtcttctgccttcttttgaaaacttcttatttttcaccaacacatggttccctatagtctataccacatgggcatagagatttcagaggcaaagatgaaagagtcatactctgttattcataaataaaatatagccaaagggaattttaaaaaatgatgatctgtaagtctttcagaaaaatggtctggagtttgtcagtctcctactcggatcaaaaataaagtcaaagttttcaactaaaataattgcaataggctacaaatctgtttgtctactttaatacagtagaaatggaaagtagaagtaagtgacaactttattggctgaattcatattaagcagtgtgatggaatgctgagaactctgacccggactggtcagaaaaccagtctcctatatgtagctctgtgaccttaatcagtaataagtacaaaggctaactaaccttcattgggtgctaaacagcgtagaacatcttttcataggttgttgactgactctgcccagtggcagtagttattcattcattcgacacatctttttttttttttttttttgagacggagtctagctctgtcactcaggctggagtgcagtggcgcgatcttagctcactgcaacatccaccttctgggttcaagcaattctctgcctcagcctcctgagtagctgggattaaaggcgcacgccaccacgcctggctaattatttgtatttttattagagacggggtttcaccatgttggccaggctggtcttgaactcctgacctcgtgatccacctgcctcggcctccaaaagtgctgggattacaggagtgagccaccacgcccagcctcattcagcacatctttatcaggcatctaccctgtgtcaggcatggagttaggtaccaaatatggttctgctatcatggagcttacagtctggtgtgggaagtcatacatgtaaacaggcaatttcagtgtagcatgttgtaagtgctatgttagaagaagtagactgttctatgggacctcataaaatgatatcaaacgtggttttgagaaattggatggtttcctgggacatgctgtccatttagggatctgaagggcaggctgggattggccaggtgggggatcacaacaaagctctttgtctggacttagaaagaggttgggaagggggaagtggtgaaggctgagggctgagtcttgagggaaattagctggtcctagaatgcagagtccattatgctgactacctttgactgagggtgataggaaacccttgaatagttttaagcaactgagtcacataattagatctgcattttagaaagctgagatgtgaatcaattttttcatttttctgtcttgattttcttatctttaaattgaaagggata
